United States Patent Application Publication US 2007/0054278 A1 - sequence listing, part 106

SEQ ID NO: 97926 - DNA, 53827 bp, Homo sapiens
tacctgaaataacagaaagcttcagaatagtattatcataaggctccagaagagaataccctgatagtgttataatttgtattttgaaaaattatcctgtaaaatctgggcttaaattatctattacagctaagagaaaatatatacttacctttctagtcaaagaaagtagtatggcatccatgaaaattctaaaacctacatgttcaccatgagtcttgatataaacctaaaagagaatttaccatttattatgttagtctaaagacgctggcagacttcactgaggaaaagcttgtcacagtgctcattcgaatgatgtttataaaatgatttagctaattgtagccaaatgttcaaaacaagaaaaaaaatcactaaaacaaacaagcaaaaaatcatgtgttgtaccttgttatcctttaaggtgtagtgacataggctctgcctctgtccaaatctttttgggatttctactgcaatcttttctggatccacagcagggaaatgtgccagatctctctgaatctgagcaatggtttcagggcagttcatctcccgtagccaggctgcactatcttgcagaggacagtcacagttctcatggtaaaccggccctatttacataagaataacaaagtacaacagtgatcatttcactcagcattcgaaacttgtaataaacatctataatgtggcttcatgaattttgcttagttacataggaagagcattttcattgaaaacacattttaagagaattacaggccagcaaggttggctcatgtcggtaatcccagcactttgggaggctgaggcaggaagacagcctgagcccaggagttcgggagcagcctgggcaacacagggagaccatgtctctacaaaaaataaaaaattagctgggtgcgttggcatgcacctgtggtttcagctacttgggaggctgacgtgggaggatcacttgagcccaggaggttgaagctgcagtgagccatgtttgcgccactccatcctgggcaagacagtgagagcccgtttcaaagaaaaaaaaagtaatacatttttactatactggggcattgcaagtaagtcagccttctactctgacagctcttcacagtgaagttttgtgatattttcataataataaggtctactttgcatgagttcaaaagaaaggaaatagaggctgggtgcagtggctcacgtctgtaataccagcactttgggaggctgaggtgggtggataacttgaggtcaggagtttgagaccagcctggccaacatgttgaaaccccatctctactaaaaatacaaaaaagtttagctgggtatggtggtgtgtgcctgaaatctcagctactcaggaggctgaggcatgacaatagcttgaatctgggaggtgaaggttgcagtgagcggagattgtgccactgtgctccagcttgggggacagagtgagactcttgtttcaaaaaataaaagaaagacaacagatacttggtttatgtctatggtaatattacagctcattattccttatgttttgcagactgaagaataaccaaatactggtaaaagggtatcagaggagcatacctattttaatgaaagacaaaagtgatatgatttactattttgatggtctgttatacaaacaggttcttaaagtgtctaaggtacttttctcaataagtaaatcatcaataacagcaaaaataaacaaggaactgctattctttttttttttttttttaagaattattaaggaggaaaagtaggctgggttcttggctcatgcctgtaatcccagcactttgggaggctgaggcgggcggatcacgaggtcaggagatcgagaccatcctggtcaacatggtgaaaccccgtctctactaaaaatacaaaaattagccaggtgttgtggcgcgtccctgtagtctcagctatttgggtggctgaggcagcagaatcgcttgaacccgggaggcagagcttgcagtgagccgagattgcaccactgcactctaggctagtgacagagcgagacatcgtctcaaaaaaaaaaaaaaaaaaaaaagcaaaagtagctgggtacagtggctcacgcctgtaatcctagcactttgggagactgaggtgggcagatcacttgagctccagggttcgggaccagtctgagcaacatggcaaaaccctgtttctacaaaaaatacaaaaattagtggggcatggtggtgagtgcctgtagtcccagctactcatgcagctgaggtgggaggattgcttgaacccaggaggtcgaggctgcagtaagcagtgattgcaccactgcactccagcctgggcaacagagcgagaccctgtctcaacaacaacggcaacaaaaagaagcaaaagtaattctcaaaacagtccacttcactaattttataacaaattaattacagtctgcactgaggtttttactgttattcctttttataattctcagatcccacctaacccaggcagtggctgacaatggaatatctttttaaggtttagtgggtgatactgtaccaggctgtactggcagaatgtaggaaaggaacctagacactcttgaaaagtgtttaccttttcttacttctctgcagagttcacaaaaataaaaaaaaaaagtttacttttcttggggttgttaagggggggacaagatttctgcctttgtatatacactgcttccctactgtcttgtggtactgtcgcctgtaagagggaaggagatggctctaggtaataaaactgtactctcatcctatataagaaacatcagaatggccgagcatggtggctcacacctgtaatcccagcactttgggagactgaggcaggcagatcatgaggtcaagagatcgaaaccatcctggtcaacatggtgaaatcctgtctctactaaaaatacaaaaattagcctggcatggtggtgcgtgcctgtaatcccagctacatgggaggctaaggcaggataatcgcttgaacccggaaggcggagcttgcagtgagccaagactgcgccattgcactccagccttgtgacagagcgagactctgcctcaaaaaaaaaaaaaaaaaaataaataaataaataaataaataaatgtcagagaatttctctgggaaaatggcattggaacaaagacaaaaaaacaaccaccagtgcgctccttgtctttcgagctatctcccttcctgaagtgatctacctaatttcaataacacttatcagttacttaagtcatatatttccaattaagaaagtatcatatatgagcatgaacacagcttgattattcttgctaatgtatgtcttcgcggagtaaattctctactaatatgttccttgctctttagcaaatcagaatttccgttcaaatcttgaatgtctttttaccaggactcataacttagctttcaagtagaaagcctttatttttcttctttcagttaaaaaaaaaaaaaaaaaatatatatatatatatatcatgccaagttgtttttgttgatggaataacatatattattttattcaaatactgctgttataaaattatattccaaattaccttttaaaatatatggggatttggccacatgttgcccttggaatttaacttccaccttcagatttttgtagcttgcatacattctgtatcttactatgaaggacccatcttttcggtctaaaacctggactccaactctagtgaattgctcctctggtgctgagactttcacctggaagaccttttcgcctggagaagatgtgaatctgtgatgaaaaggcaatgggggagataaacagattttaacgaacaaacacacaaaggttatgctcttcagtctggaaacttgattattctcctccacattcttcctctaacatatgattgcttcttcttctcttatgcttttagtaccagaatgaatatgatggatcagagatttaaaaaaatgaggatgacaatggccaagataacatgaaacagtttcattaaacagtcacaatggagtatgttaagactattaatctatataagcacagaacatactcatgcattccatatggaaaaatattcttactaacttatttcatgccatcacatctggatatttgtgatcaaatgatgctcccaaagataatgatcttattttgaaaaatctctgccaatgaatctttacaatatcagtattataaatcacgctcaggcctggcactgtggcccatgcctactatctcaacatcttgggaggccaaggagggaagactgcttgaggccaggagttcgagatcagcctgggcaacaaggtgagatcctgtctctacaaataataataataataataaaaaacaaatagccaggcgaggtggcacacgcctgtagtcccaactactagggaggctgaggtgggaggatagcttcagcctgggaggttgagggtacagtgagctgtgattgcaccactgcactccagactaggctaggaagtgaaaccctgtcttaaaaaaaaaaaactcacgctcagccatgggcaaaagcaaagtagtaggtagtgtatcatcttttgccaaataacaaaatttacaacctgccttttacttgacaaccttttattccagtatttttttctgtatgaaatacacacagtcagcatccaccaataatagagacaatcatttcagaagtataggaattataaaaataagttttaagtatgatgttaaagtattaaattcattggaacaaaatatttgttacaatcatataggagattaatacttcgatactttccttccgaactctgaagtttcaaatagtacttcatttttctttttcagtttcaaaacatgcttacctgcagatgtctccttgaaaattgagggccgcaccagagaaagatgaagcccatcaagtctctaacaactaggtttaaatcccttataatagcttatgcgaaaagtagttagaaacagtatttccagcaaagtggagggactttgtcttgccctgataatgtgggaatctgaatcaaaattgctaggagattattttatatgttatatacaatacattatattgcatatattataattcggaacaatttctacagctacagagaaaaatgggtaaccaaatatcctggaatataaactgctgtggagaaacgagttcttggaaagaaaaatcttaaagggagaaacagatttaaccgccatccaaaataggtaaggagccgtttctcgacttacttattccctgatgtatccactgcctgaatatagaaatagcgggcgggaaggacgacgtctgcttttagcccgggtccccatatttcgctcttctccgggctcagctgcctttctccgccggtctcggcgagtgctggaactgtcgccagaaagaagcaataaagtagcaaagtgccaaacatttacaagacggactctcgaaatgatccaccgataaatgaagaagtgtaagaggtggacagaagcagccgagccttcggcagggacccgccggccgatcgcagcagccaacgcgactgcaaaggttgccgcccggcgtgcagggcaggcgcgcgggtctccgcgaccccaggacaatcaaagcccgtgccccggcgcgcccaggtgagggtcccctggcgttctgctgtcccggccgagaaccgcgctgctcctctctctcaggacaatgatgaacttgagttgctcctgccactggagcatcatttgggagcgaatccgtctcaggttccagccaaggtgtagggcgaggggattggcccgtgcgtcgggccaggctcagtaacgccttctccaagtggatggcggggtggacacgcgtcccggcgccccgggctccctgggatatgtagttcgcgacaggacgagcggaaatactgccaggattttaccacctctcgcccatttatttacttctcggtcaccgctttcgggggacagataaacaccacagatgcccatcaaaggggckcacgggtctggaggcgcagctcaggtttttgcgttggtcaccctgccctccgcacgtggagagggcaggcataaagcaccttgaaaggaaggtgctgtcaatgctatccgacgacctgtcgccgggcaccgcagcatcctcgctcgctccgatgggacgagggacgccggccccagggtaacaggaggcgcctcgccggccgcgcgctggatgctgtgatccaggtccggagccgggttccgccgcggccgcagcgacccgaccccacccgacaggccagaggtaccccggggcggggggcaggggccgaggtggcggccggctgtgcgctctgagcgcctggccctccgctgggcacctgggcgccgccagcccggcctgctgccgctctacgcgcagccacctgggcattcaaaatttttacttaattcgataccggcctgggctgccaggggtcatcgcctctccgagccccgtggcgtccagatggaggccactgcatgggtgcgcgctctcccgggaaggagtagggggaagagctgtgtcgcggggggaagagaagcgccagggaaagaagggcctagccctctggtgaacaaagctcgattaggaggtgtccatgtggataccggtgacccctgtgcggccgtcggtctccacgccacgctgggcagggtccgggaaccagcgcgcagcggccgtcgccttcccctgcacgccagcacccgggtcygggccgccgccaggagtcacgggctcaccgccctggtcagcttggcagtcggacccggagccgcctcctctgcctgcctccctcttgccagctgccccgaaaacccagaagagccggtggctccgagccaaggcgggcctggttcggcgccaggaaagggggtttctttcctattttcttttgtgcaattgtcattattaatgataccgactcgtttactcaaacagtcgaatcggagccccagctcttagcccggatgcagcaattgcccgtgggccccctttaacaccaacagcgtccccggggcccggggcaagcatgttcgaggcggtcacccccgggcctcggcgcgctccccctggcggagagcctcgtcttccggccggtgagggaaggtagaggagggagtaggggcgaggaggcctcggcggcccttgggctctgcgggctggggactcggggtgcccgcgacacgcgcggaggcgcgggctgggttggccacgggcagggagcgcagccgcgctccttcctctctgcccgcgtcgcctccgcgcgcactggttctgcgcggcggggcttggcctgcgcgactgtctactccgtcccggcggcctcggagcccggccgagcggcgagcttgtcagaggacggtggtggaaacgctcccggcctccccaggggcgcgggctggaggctggcgccaggcgcggaggactcccggtatcttttgacaggctggcgcctcggctctggggacccgcaggtctgaaggggaggaaggggcctggagggcgcgggaggacaccgggtgggaagggtggcattagctcggccgggggctatgcgcctctggtttcgccctcccgcgcatattcgacccttacgaggtcaccggaatgcccctgctcctcagttgccttctatacaggatatcgatcagggtattttgttatacgaaaaggctttactgaagaggtttttagagatgtttggttctctcataaacttgatacttgagaatacagacaaaatataacctgaaaagactayaacctaggcgatgaagattggctttacaaatggacgtttattttacagaacacttcgttcagtgactttgaacaatcatgactctggcggtgctttttaaacttgccattttataaatttttgctttgcatacgagcaaaccatatttctattgcttatgacatgattttatgagtaagctattagttgagcctgaggtcctgcagtcattcttagtagtaaattttttttttttttttttgagacggagttttgctctgatcgcccaggctggagtgcaatggtgcaactgtaacctccacctctggtgttcagcgattctccagccttgcctcctgagtagctgggcctacacgcatgcgccaccatgcacggctaattttgtatttttttattttttatttttttttagtagaaacgggtctcaccatgttggccaggctggcctcaaactcctgacctcagatgatccacccgcctcagcctcccaaagtgctgggattacaggtgtgagccaccacgccggcttagtaaatcttaatatagcaacacctcacttgcctggaagagggaaccgcaatcaatcaaaatgagggcctacagtaatgcctggcatgatgcaaacacttaaaaattatctgttgaatgagacgtctacaaatcctaggccctggggatacaataatctggaaaaccagacttgcaggatgcagacgttgatcatatgaacagatatgcacagaagtaagtgtaaaattgccacctggtaagacctgtgtgaggaaggtactagagtctgtaccgggtcacctggcctagtttgagaagccaagaaggtttcccccagaaagtgacatttgagctgacattggaaagatgaatgggaatgagctaagtaagggagacagtattgggagaaccaaaaagtaatgtggagcttggggggtgggggaaaggaatgagatggagctaaccagatagatctagggaccatcaggagttggccttttgttctaagagcagaggctttcaggcagaggagttctgtgatcatatatatgtagcaaactttattttctaatatctctgcacaggtcaggttagaagtgtcaactcactgggaatagtttataaatagagaaacaaaaggagataaaagatgagtcaaaacagtgacagctgcagcctattaagtggagggacaaactgcctctctatagctcagtattgtctataatgattctgttattagtattatcagtaataaattgtgcttagtgtactttaagaaagctagaatctgagcatgcaataatagaagcccccttggcctcttggggctctcactatagtggagagaatagacgtgagacagtgtggaaagaaagtaaacactagcagtgtttgggtcgtgggatttgggtaatttccattttcctgtaatatcttttggtactttgcatttttttgtaatgttttacttataaaatctatgaatattacattttcaaagagaaatttacatatagtttccaatgagaatgtttcatgcccttggattttagtgacagtcaatataaaatgcatccttatattgatgatcttcatttttttttgctaaaacttcgaccaaataaatcatcttgttccgtgaccattatttaaaagcaaacaaactaaaaacacaaacaaaccagactgttacttttttctctctttccttttttttttttttttttgagacagagtcttgctttgttgcccaggctagagtgcagtggtgtgatcatagctcactgcagcctcaaactcctggcctcaagtgattcttttgcctcagcctcccaaagcatagatattacaggtatgagccactgtgcctggctcacactgttactctttttattaatctagtgctgtgttctatctttagcgtccaggaagcttacccccaacttttgtgcttaaatgcagtcatttccctttgcctatgtttttgataagaatattctccatggctgggcatggtggcttgtgcctgtaatgccagcaatttgggaggctgaggcgggaggattgcttgaagccaagaggtcaagaccagcctaggcaacatagcaagaccctgtttcttaaaaaaaaaaaaaaaaaaggttattctatatatgttccaaatgagcatacttttacaatccctgccaggtgcagtggctcattcctataatcccagcactttggggggccgaggccagcagatcacctgaggtcaggagttccagaccagcctggccaacrtggtgaaaccccatctctactaaaaatacaaaaattagccaggcatggtggcacctgcctgtaattccagctactccagaggctgaggcaggagaatctcttgaatccaggagacagaggttgcagtgagctgagatccrgccattgcactccagcctgggcaacagagtgagattccatttaaaaaaatcaaatcaaatccctacactgtcacacagagagctggtcccacaggcaaaattccattcagtgtgaggaaggaagccctgggaaagtggaagccaagtctgagatgaggatataaaaggggcagggcctggaacatttccgtctcgccaccaaactcactctaataacctttgtctattgcctctcaccgagactatatgctctttcattcctcacctcgcacagcccacccccacgaccccaataccacaaatacctacctctctgtccaccacactgatgtagagaaaggcatgaaggtcacagatgagaagtagaaaatgctatgttaggacatctgctgagaatcagagcaactctgtcttccaaaaagacaagagtttggtctgaacaacgccaggtactgagcttccctctgccatcaccgttgcaccaccagatgaataaggagagagcaccacttccacttgaggacccactacaactactccaagaattttttttaccaaaagaaagtgaaagttttcaaagtgaaaccacaggaggttccacctttcgtggtaatattcctatccaactgaccctcttgcaaacaactataaactctgcacaaattattttaaaactgaagagttttttgtttgtttgttcgtttcgagacaagatggagtgcaggtcacccaggctggagtgcagtggcgcgatcttggctcaacgcaacctccaccttcgagcctcaagcaattctgcctcagcctcccgagtagctgggattacaggcatgcgtcactaccgcctggctaatttttatcttttttttgagatggagtttcactctgtcacccaggctggagtgcaatggcaggatctcagctcactgcaacctccacctcctgggttcaggccgttctcctgcctcagcctcgcaagtagctgtgattacaggtgcgcgccatcatgcccagctaatttttttgtgttttttagtagagacagggtttcaccctgtgtgccaggctggtctcgaactctgacctcatgatccacccgcctcggcctcctacagtgctgggattacaggtgtgagccactgcacccggcccttactgtctggctaatttttaaattttcagtcgagatggggtttcaccatattggccaggctagtcttgaactcctgacctcaaatgatccacccgcctcascctcccaaagtgctgggattacaggcatgagccaccacaccaggcctaaaaactgaaggtttgaatasagaaaaagcatgctttaaaagtaaagaaaatggaattttgcctagcatatgtggagtcctaatatgcagctctgtttccttaaattccatsaaagccatgcagtacctttgctagtttctcctcacagatcaggataacctagggggctcttgtgtgaatcgtcttctatttcttgcagcctaactcataggctttcgttgttcaatatttgtatgatggttttgatactatttttggtaacccatgacagttatttttatttctaattttttaagtaagcaaatgggcagagatattaactggtaaaagtccaactgatcacccagggtggactgaatctctcaactgatgctctgttgctggagccctgagaaacccgcataccctgcccgggcacctgcctggggttgtctgctgcgtgtyctgggatggttcaattcaccaaggacttcctctggtataaatcttcagcttccttgcatgccctcagttgctatttaagctttctgttttcttccctaaaggaatcagtttagacttgaaattcagtttttcctgaaactgatcagaagttagtgacaccttgattggatccgtttttctgtcaggtgatgaatctttggaaaatttactttctgtattctgtgtttatttaaatctgtggccgttattcatcatgtatcctttatgcctatgtacgtaaaaaatcttgctaatacattattttttagacaactttatggaggtataattcacacaccatataatttacccattaagttatgcaattcattggcttttagggtatttacaagttgtgtgttcattgccacaatcatttatagaatattatcattattacaaaaagaaactccatcacccccaaaccccaagccctaggaaaccatgaatctactttctgtctgcatagatttgcctgttctggacatgttatataaatagaataatacactatctggtcctttgtgacgatcttcttttactcactataatgttttcggggttcatccatgttgtagcatgggtcagtacttcatttctttttattgccaaataatattccattgtatggatataccacattttatttatacattcctcagttggtggacatttgggttgtttccattttttggccattatgaataatgctgctattaacatttgtgtgaagatgtattttcatctgtcacggatatataccttggcatgaaattgctggaccatatggtaactctgtttaattgttggaagaactgttttccaaagcaactggaccattttacatttccattagcaatgtatgagggttatgatttctccacgtcctcaccaacatttttgattatagccattctagcgtgtgtgaggtgttaatctcattgtggttttgatttgtatttccatgatggctaatgatactgagcatcttttcatgtgcttattggccatttatttttatttttgatacagtctcgctctgttgcccaggctagagtgtagtggcgcgatctcggctcactgcaacctctacctcccaggttcaagtgagtcttatgtctcagcctcctgagtagctgggactacaggcatgtgccaccatgcctggctaatttttgtatttttagaagggacggggtttcaccatgttggccaggctggtctcgaactcctgaccccaagtgatccacctgccttggcctcccaaagtgctggattacaggtgtgagtgactgcgcctggccttattggcaatttctgtactgattttggagaagacactattcagatactttgcccatttttaaaaattgggctatttgctggccgggcatggtggctcacatctgtaattccagcactttgggaggcagaggtgggcagatcacttgaggtcgggattttgagaccagcctgaccaagatggagaaaccccatctctactaaaaatacaaaattagccgggcgtggtggcgcatgcctgtaatcccagctacttgggaggctgaggcaggagaatcacttgaacccgggaggcggaggttgcggtgagccgagattgtgccattgcactccagcctgggcaacaagagtgaaactccatctcaaaaaaaaaaaaattgggctatttgctttttaattattttttaattatttgaaaataatttaatgcatattttagactaatttaaaaaataagatagtgattgtgactccagtcatatagtagttgtaaaattaatatagaatgaaggcatatgtatgcataaaacttgctatgctttttagtggctctttgtgtatctggtggattgttgatcattctttttccttcctcttaggagctcattttgcagctctcaagcttttatagcatgctgtaaacaattgtcaaagttgtttatcaagaaacagatagagttgcaacttgtttctagtaatagaaacttttacactgcattcaatgcctaacgttgcagaaacagaaaggtcaaatgattctggaaatggtgagcacaaatctgagagaaagtcacctgaagagaatctacaaggtgctgtaaaatctttctgcacaagtgcctcaggagcacccttgggtcccaaaggagatggtcattatccatggagttgtccagtgactcatacacgggaaaaaatttatgccatctgttcggactatgcctttctcaaccaggcgacctcaatctataaaactccaaatccatcccgctctccttgcctccctgatagtacctctttatctgctggaaataattcatcaagatacattggtatcccgactagtacatcggaaattatctacaatgaagaaaatagcttggaaaacttatccaacagcctgggcaagctacctctcgcatgggaaattgataaatctgaatttgatggggtgaccacaaattcgaaacacaaatcaggtaaggagggagccatgaagttcatatgtgaaaataatgagaaaacaaacactatgtcttgtttaatcttgccattacacatagtttccttgtataatactagataaggaacatggctatcatcttgtctgtcaatgtagttttaggaaagtaaccttgacgtagggcatgtagttcattgcggggcttccactggaaacttcaagcataagctttgtatcaaatattttgagagatttgaaaatctaataatgtaaaatattataaacagatggtagcttagaaaatgaaatgttaataacatggctagaataacttactactgtttcatagttttataggcacatgaagttgtatttcctgaccaaacatctttttttcctgctatataatgttttagctttttttgttgttaaaattttttaggcacccagcaaagcctccatgtaccaccaagtgggttgtgtactgctcaatttaagaggatgctgtttaccgaggttgtgcataactttcacagttgcaatggggtggtcctatggcagatagaaatactttacacttctttcttttgaattcaaagtaatacaggaattttatgaggcaggtactgttagccccatttgtaggtgaagaaattgaggcttagaagggataaatctctagaccgaagttgcagagttaataagaggaggtcaaactaggatttgtatttacttctagtcttctctgatgattttataaaaccttaatgcttctgcttgtttatctgcaaaatcaatttgtttcatagaattttaggtaaatttgtaattcttaagggtaggagggggattttgctttttttgtctaaatttgtaggtaatgagtctgcaattttctttttgtctaatgcctttggccagttttggaattagggctatgcaaatcttctaagaaaagttgggaagtgttttttcctcctgttttctgaggattttcagagagatattaaaatctgtatttataattatggagttgtcttgatttctgttaatttctgacaaattttaatttgtccatgtcatttaagttgtcaaatttgggggcttaaagttaatgttatccctctaacatctaaggaatctttgttgacaactccttttgcatcctaatactggtaattaatttattttctctattttttttaaaactgatcaatctagctaggagtttatcaattttgttaatcttttcaaataactagcttttgttaattttctcaattgtttgttttctatttcattggtttctgctctttattatttgcttcctctgacttactttgggtttattttgttcttcattttctgacttcttaagatggaagcttagatcattgattttagacttttctaccataagcatagaatactccaaattgctaagtactgctttagctgcagctcacaaattttgatatgcttattattattacttaattggaaatattttctaatttcctttgcaatttattctttgatacatgtattacttagatgtatgctgtttaatttctagatattaatagtttttctaaatattgatttctagtttagttccattgtggacagagggcatatgctctcagtctttttaaatttactgagacttgttttatgacccaacatatggtctatcttggtgaatgtgccatgtgcacttgaaaagaatgtgcattctgcagtcattgggagtatctataaatattaattatgtcgaagtgtttgaaagtgtcattcacatcttttgtgtctccgcttaacttgtgtcttgttctatcaattaccaaaagaagggtgttaaaaatcttcaactatgattgtgaagttgtcttttctccatttaatttcttttttaaaaactaatacatgtctaataacagaaaatttactgtcttaaccatttttacgtgtacagtttagtggcattaagtacatttacgttgttgtgcaaccatcatcactattcatctccaaatctctttccttttcttttctttcttttttttttttttctgagacagagtctcgctctgtcgcccaggctggagtgcagtggcgcgatctcggctcactgcaagctccgcctcccgggttcacaccattctcctgcctcagcctcccgagtacctgggactacaggcgcctgtcaccgtgcccggctacttttttgtatttttagtagggtcggggtttcaccgtggtctcgacctcctgacctcgtgatccgcccgcctcggcctcccaaagtgctgggattacaggcgtgagccaccccgcccagcccttcttttcatcttacaaaataaactttgtacccattaaacaataaatcctcattccttctcctcacagtccctggaaaccacaattttactttttgtcactgtgaatttgactattctaggtaccttatgtaagtgaaatcatatagtatttgtctttttatgactggtttatttatagccacccctgctctcttctgggtgctatttgctttggaatacttatttccatccttttactttcagcctatttgtatctctagatctaaagtgagtgtttcagagacagcatatagttagctaattttttctgtttctgtttttgtgtgtgaacccacgtatacaaaaacatatttttaaaaaaatgcattctgccagtctctatgttttgagtggagaatttaatccatttacatttgaagtaatcactgataaggagagacttgtcattttagtacttgttatttatatgtaaacactctgttcctatactgcttcgtccacacttaactttcagttattgatgttatcaaattacaaatttatatattgtgtgtctgaaaacataaactaataatttttatgtattaatctcttaaataatgtggaaaacaaaatgtggagttacaaaccaaagttattataataatagcttttttatttttattttttattttgaaatagggtcttgctctcttgcccaggctggagtgcagtggcacgaccatggcttactgcagccttgacctcaggcttaagcaatcctcccacttcagccttctgagtagctgggactacaggtgcacatcaccacgactggctaatttttaatatttttttgtagagatagagtctcactatgttgccaggggtggtcttgaactcctgggctcaagcaatcctcctgcctcggccttccaaagtgctgggaatacaggcatgagccactgctcctggcctactactagcttttaagctaataataatttctcaaaaatgtattagtctcataaatcatatagaatacaaaaactggagttgcaaactaacaaaataacactggcttttataattgttcgtgtattaccttcactgaggtaaatttatttcttcctatggctttgaggtactagctaatgtcctttcatttcaaccagcaggaatccttttagcattccttacagggcaagtctagtggtaataaactccttcagtttttgtttgtctgggaatgtctgagtttcttcttcacttttgaaggacagttttgctggatttagaattcttgtttgaattttttttttatttcagcactttgaatatatcagcccacttccttctggcttccaaagtttctgatgagaaatctgttgatattcttattaacagtccattgtatgtgatgagttgcttctcttgtgttgcttttaagagtctttgtctttttgcaatttttaaattttttatttgatacggagttttgttcttgttgcccaggttggagtgcaatggcacgatcttggctcaccacaacctccaccttctgggttcaagcaattctcctgcctcagcctcccaagtagctgggattacaggcgtgcgccaccatgcctggctaattttgtatttttagtagagacggagtttctccatgttggtcaggctggtcttgaactcctgacctcaggtcatccgcctgcctcagcctcccaaagtgctgggattacaggcgtgagccaccgtgcccagccttgcaattttattataacatatattggtgtgggtctttctaagttcatcctatttggaatttgttgagtttcttggatgtttatattcatgttttttaaatcaaatttggaaagtttttaggcattatttgtttggataatctcctacccctttttcagtgtcttctccttctggaacttctgcaatgtataggttggtccactcgatggtgtccccaggtcccttaaggtctgtttacttttcttcagacctttttttttctgttcctcatactcaattatttcagttttcccatcttcaaggtcactaatttttctgcctgctcaaaactgcctttgaatcactctagtgagtttttcatttcagttattatatttttcagcccaagaatttatttttggttttaagttttctatctcttcattgatatttccatgttcttcatacatacatctttcgttagttcttttggcatctttaagatagtggttttaaagtccttgtctagcaagtctgccatttggtctttccaggatggtttctgttggtttatatatttttttgtttctttgaatgggccttattctgtttcttgtgattttttgttgttgttgttgttggaaactagacattcaaatattatttaataatgcagtaactctggaaatcaatacccatctttcccagagtttgttgattttagtttttgttttttgattgctataggctgtttctatgctggtaatcaacctgaggtatacatttaagggcttctcagggaaaagcccctgcctttctctgagtgtgtacagtgattttctacatttccctgtataagtgattgcttttgaatatactgtttttgaaatgtctggctccccaaacagaaaatggagaggaaaaaaaacagaacaaaaaaaccacaccaaaggtgctggccccttaagtcctctggaagttgcttctgttgtagtgggaggggcttgcaacattggagggagagttgcaacaatggctgcccccctgtatctgtgctttcaagatcagaagcagcagtcagcaatcagaacacagatttccaattttcataggacatggacctttttgcccaccatggttcccacaaactgcctgaagcttctccaggagcatatgcacagtttcttggacttggggataggtagttgtaccttgctatgtgctgaaattgaccaaaatttgcatttactgttcaggacttcctctgaaagttgcaatcctttgaatagactctggaattccaaaataattacatcagacagattctgccagtgcagttgtctaggtggggagacagattcctggtgcctcctacactgcacttaattctgttaatttttttaaaaatgtaatttgaagctctgttattaagttcacatacatttatgagatttaggccttcttcctgaattgacccttttatcattatgaaatatatttcgttattcctggaagtatttcttgttctgaaagttactttgtttgatattaataaagctcctcagctttattttgattatatttgcatggtatatatttttccatctatttattttagttctagaatttacatttttatagcttctatttctcatctgagatttgctatatttttcatttattacaagagcattttatctatgtcataatgcagagttataatatctactttaatttcttatctgcaaatttcaaaatctggctaatctcacagtaggccttatcttttttcttgagaatgagtcatatttttcactttccttatatgttctataattttgcattgtatcctagagagtgggactattatgttatggcaactctggtatattccttcaaagtgttgatttttttttggttttgggaggcagttaatttggttgaactaaaactgtaaattctgtctccttggtacagctccaaccatctcagttcagctcttttagctgtgttgcttgaatttgctccttacatgcatggtccaggggtcagtccaaggtttgggccaaatttatacacagaatttgggccccctcttctctgtggctctcttctttctgggtttcctctcacctcactttcagtgatggtgattgcacaggactctgtcctttggttcttccagtaaaaaaagacagtggattttctgcttttgtttgctcttctcatacctttttctaaaagtcagtgtggtgaatacatatatttgtgtgtgtatgtgtctgtgtgtgtctgtctgtctgtgtgtgtgtttggtgttgaggctgtgtgtgtgtgctgtgggtagggtgaggaatggaagaaggaactcagtaatgagaaggagcagtgggcgaaggttcttgaagctgatgtgatggaaggcagaaggtgcaggtgttgctcttctatgttcccatctcaaacggcgctttcactttgatgtggcttctttccctcaagtcaaatgaacttttgcctgtgggaccagctctttctgtggcagtgcgggcattttatgaagtacgctcatttgggccgtatatgctaattgatcccaggggcaatccgagattcaacaaaaagagaatagggggcaaggtcatggaaccctagaggaaagtgtgagtacagactgttggcagagcctatcaaggtcacacatttctatgtttcattagctttaacattttaagtggctgggaaaactacttagggaattaagtcattattaggcagtgaagacatctcaagaaatgttagaaactaattcttctgttatctgactctstaagagtcattttaccagtcaaggaaatttggcacaatgagatttggcacagttgctcacctttgccagtgatgttcagctctktgaaaagtgtgttctctgtaaaaacttagaaaaaataattaaaagggtcacgcatgatggctcacacttgtaatcccagcattttgtgaggctgaggcaggtggattgcttgagctcaggagtttgagaccaacctgggcaacatagtgagaccctgactttgttaaaaatacaaaaattagctgggcatggtcgcacgcacttgtggtcccaggtactcctgaggctgatgtaggaggattgcttgagccccggaggcagaggttgcaatgagtggagattgcgtcactgcactcttgtctgggcaacaaagcaagaccttgtctcaaaacaaacaaacaaacaaacaaacaaaaagaataattaaaaggaaggcgaaacattgtttcttgactttatagtcttcattattattacatttttacagaaattccctgtgtaataatagttcctgagttccagctgttcgtaggtgtcaaatggtttctctgtatagtatcttgaaggaataaaactgatctctttccatgtttgcttactaggcatatatgtatataatctattttataatttatgaatgactcataaaaatgaaatattagccttcagttaatttttataacagaactgttttaaaatagaatatgtgtgaaatattaaagtatttgagcatagctatctgaaatcttaatagtattttaatgaaatgaggcttggatgttatttattgatattttactttatataattttttactagatacttcactaacgatttagaaataaaacttataaaaataaaaagtatagggatggataccccattctccatgatgtggttatttcacattgcatgcttgtatcaaaacatcttatgtacccctaagcatgtacacctactatgtactctcaaaaattaaaaaaaattaaaaagtacaaattctcactcttacttttggcttccttttgtctagctcccaattctcccttccccagtagtaaccactgttgtttgccttgagggtcttttggagaatgtttgtatgtgtgtgcatgtatgagtgtgtgtgcacatgcatacatagatgcatacatgcacacaggaggcttgcttttcattctagtttctgtgctagagttgcattttagtaatgtatatgtgtgcatcattcttcattcattctgtcgtctctgtcggtccagagatatttttaaacatcacatcatcacattaatggatctggtgcttttactttcttaacagagttgctttaatttggttttattgttttatagaaagccttcattttctggaaagtggtctagttaaatttttttactgtcgataatttgattttccggatgtggctaaagatttagtgattgactgttccaccagctaagtgactagctctggaattggagtataagaacctgacacgaaataggattcatggttgtttaaatttgtttttattatttctctttaaggtaggggactattattgaaaatacatgtattacttcattgtgtttgcaaatatcacttttagaacctgtggcagttatttatttgttattattttttctttgcactttctcagcagaattattaaggcagttacttcttaattttggtgcataattaatttttgtcatttcagtttacttcatcttaagcattttgcttattttatactcttgtattctaggcaatgcaaagaaacaagtttccaagagaaaaacttcagataaaaagggaagatatcagaaggaatgtcctcagcattctcctcttgaagatattaaacagcggaaagtattagacctcagacgatggtgatgttatcagtttttatttttttcatttttgaaatatgtaatatatgttgrcaataacgtagcagtttacaaattaatacattatatgtatcataaatatttttatttctaaaattattaccaggatttctgaatatttaaagtcaccacaaatgtttgaagtagattaataatgagttatgctggtctttcccaaactcggcttattattagagtcatctgtgtgactccacgtaactgccatgtagatttaacaatgattaaccttttgatgtagttaaatacttagcttttcattgctgaagaattttcaagtaagtgactgatttttattatatttcatctcaagttacctaagtatgcatctctaaaaaatgacttttttctacttaaccacaatacttttgtcatacttaataagattaacgatatttccctagtgtctaattcccaggctaaattcacgtttcccagattgttctgaaaaggtcttcacatctgtttgttcaaagtgggacccagttgtgaaccacatgtttgcttgtcatgacccataattctctcaatctaggtcagtctccaccccactttcccccttgtcttttaaaaattctattattttaatcgacaaatgagaataataaagattgacttattgaagagacttggccagatattttatagaatgtcctacattccagatttgtattttccttttagtttcctaaattatgcatctaacctcaatatttcctgtaaactggaagttgaatacaaagacttgattaaattccagtacaacattttatgcaagaacactgcttaagtgggccctcatacttcaaaggtttcacatcagaaggcacatggtatctgattatccagtattagcaattctaagtgattactgggttaaggtggtgacagctgtattctacattgacgagttctttctttctcctctggtaccctcaagtaatcagtagagtgacagagtggcattaggtaatagccaggttccatcagctttttaccttatggttttagccaaatgtattgacaacccaaacccattgatgatccttgtctgaatatttgttgcaaaatggttatatttcaaaattccaatttttttttttttttacttttattacccagccttcttctgtagctttcactgatcaactggggctatttggttatcttaaaatacagttcctagtctaatgaaaacaagtttaattcatgacaacttttatgtattactgaccctgatttgggtttttaaaattcctttgtatgacattttagaaatatatttttatcacttatttaataaatattggaccctttgctgtaggctgagaaacagagatgcacacaacattgtctttgttttcccaaggtttacaatccagttgaggtgaggggactaaacagaaaaatgttaaatatcttaggcagtttgtcatgtgatgggtatgaatcactaattaaccatgaaaggaggtaatgatcaccagaatgctttactaaggtcctgggtcttaagggaggaaatatgaagggttggagggtgaagggtctttgaaagaattacagcaaagtgtctctggaatgtgggtaatgaagagtagagtagcttgtctaaagtgaggctcagagaggccaagaaacctgccagtgtcacatggctaataagtagaagatcttgtattgaagctgaagagtcagactcaacattcatgctgtttgcgtataatacatgtcatgatctgtttcttagatatcaggctcaatatttagattttttttctgagttaaagataagccatggacgatttcttaacaaaaggaacttttatcaagataaatttggaatagttagtatgtagggaataatggagaagagacattaaagtcacaaacattcattttagtttctttgaaaagaaggttttgctcgtttgtgcttctaatcacttagatttaagctttgtttcaacaacaaatctgtgtaactacatattaatagtataacatgtgaggccatgaaggctaggactaggaaggatagatgggagaaatgccctgaggggaaaacatcaccaggactataagcctgttttccactgagaatattacaagattaggttagaatggaaagtcccgtagaagatagtagaatgttggtaagcattttaacctggtcataaacaagactaggaaacaagtttagattgatgaaaaagtatgaaaaatcttaagagaaattcccctttccctctcctttttaaaaattctttcaggccaaatttagtgttatgagaaaaactatatacatgcatgcaatactttgttagtaaatatatgtaaagataaatgttgtaaaatataaaacactgttagtattggacttgtaaaataatccccaaaattgaactctggcaaaaatattcacagcagaaaaaaaaaatcagtaaatgaatgagttgcttgtgttttatcagcawgggccatatagcttatgatgacagaactgttaataatcacttgtccacaaaggtctcttaggttggagttcacactcatatttaaacaactagggcagattacttgaataaggacattagtaaattgctcatgtttccagggataggggaaaggggtaaaagggagttgtgttgttcagtgggtaaagagtttcatttttgcaagatgaaaaagttctgttgcctaacaatttgcatatagttgacactactgacctgtacacttaaaaatagtgtacatgataaatttgatgttgtatgtttttatcacaattaaagaacaaagcaaaactgagggaggactcaatagatttgacagtaaggtgttgaagacagcacttagtatgttaagtgatagttrttagcttttgtgtgtcattttgtgtagtctacagatttagggctcrtggcacacgttctcactgataagtgagagccgaacaatgtgaacacatggacgtagggagggaacaacacacactgggccctgtcgcggggtgggaaccggggacaggagagtatcaggaaaaatagctaatgcacacagagtgtaatacctaggtaatgggttgatagatgcagcaaaccaccatgacacacatttatctatgtwataaagctgcacatcctgcatgtataccctggaacttaaaaaaaaatattgaagggtcatggttaacttgtatgtgtgccaatatgcatagtatatgtacatatacaaatgcatatatgtacacatgcatatgtctaatttttcattttgtaattaatttttagaccacactaaagtygctcttagtgatgataggkcttgtttctttgtttcattgtggctacttcttagcaccttctttagaaagcagttaggagaagatcatttgaaggccaacgagtgttgtgggttattgttaagctgatttaacattatctccccccacaaccacgcttgactagcttcacatttggccaggtgcagtggctcacgtctgtaatccagcactttgggaggctgaggtggaagatcacaaggtcaagagattgagaccatcctggccaacatagtgaaaccctgtctctactaaaaatacaaaaattagctggttgtggtggcgcacgcctgtcgtcccagctactcgggaggctgaggcaggagaattgcttgaacacgggaggtggaggttgcagtgagccaagattgcaccacagcactccagcctgggcgacagagtgagactctgtctcaaaaaaaaaaaaaaaaaaaaaagagaaagcaaacgtatttcttcttaaaacagaataaataaatagtctgtctctttctccttctgttcacatttgccccagtttcttctcttgaatcatgacagtttggaaaattgtctggattgcttagtgccactgaatcatgccatggaaggattttgtatttcacttttaaacttctctgtgacaggagaagcactgcttcrtggcttcttgcccaaggattttagatggacacagtgggtaataaatggatgaatttttgtttgggttgaagaatctctctgagaagttgacacgtgggggcaatggtttgtttctcttgtatttctgaagttgcaaatartcatgtaagcagttcaaccaggagtttacaccaaacttttaataggcgatatatcattattttttttcccattggtttggataacatccactttaactggcagttagtcatacttagctatttttgttaaagcaggtgatttattgttattttatatttatgacatgattaataagtgaatatggaagattttacattgacttaggggatcaaagttttcattatattaacacctttaattgccatgagttttctatttctagcatgcatattttgtgttcattcaagtgaagaaaacagtcttttgtgttctcaggtactgcataagccgaccacagtataagacttcttgtggcatctcttcattaatttcttgttggaatttcttatacagcacaatgggagctggaaagtaagtatgtcaatttatcagtacccccaaactccaaagtaatttgatgttgctttttctataacagaaaaaaatttaagaatagattttttataaatttaacaaaaccctgctgtattttagtgtaagtcttttagcttaaaatatatacatgtattattttcagtgaaataaaaatgggctgggtacagtggctcacacttgtaatgtcagcactttggaaggccaaggcgggagtattgcttgaagccaaggagtttgagaccagcctgggcaacaaagcaagaccccacctctacaaagtaaaaaaataaaaacaactagccaggcacaatggcatgtacttgtatttctagtctcttaggagactgaggcaagaggatcacttgagcccaggagtttaaggctgcwgtgagctatgatcacgccactgcactccagcctgggccacagagtgagaacctgtctctaaaaaaataaataaaataaaataatgaaaaatattactaatattatttgcaaatcagacaagcatattaacattgagayaggctgtatttgcgtatgactggaattgaaaaatgaaaggcaatgaatgtttcttttgtagccttccacctattacccaagaagaagctttacatattctgggctttcaacctccatttgaagatattaggtttggtcctttcacggggaatacaacacttatgaggtatgaagaccctcttagaggcaatatcgtgtttctagttttgcaaaataataatgatgtagatgtgtgttgatagtaaaccatgtatccagctgctgggcttcaacctctcataggtataccaactttgggctatgcctgaatttctttagaattggaataatgccatctttgttgtagaattrttgccatgaacaaatcttcttgttactttcaggtggtttagacaaattaatgaccacttccatgtaaaaggatgctcttatgttctatataagcctcatgggaagaataaaacagcaggagaaactggtaggtaaacatatagaagatttacatacacacatacacacatgcacacacacacatacacacacacggtttagagttcgtctcaaagactgcctgtttagcttcctgggacattatgtaaaccctcagcacagtctgttacttgcatgtaatctgtagggcactttttaataagcagttyaatattttacctcttctaacctttttatgtagaacctttagaactttaaggtatatcacaaacactactctaacacattgtattgtttgggtccgtggtgtgtgtgtgtgtttgtgtgtgtatgtatgtgcgtgtgtacgcgcacatgctagtaaaactctaaggaagcagcatggagttagcagttttcttcctaagaaggaatgtaaggatttgagaatatttgatgttagacctgtgtggtgacatataatggcaggaaaatagactgttgaagtgacaaagttctgctataaaatagtcttgtttataacagaaatattaatggagttgatctcaaggattattttagttatgtgctaattaaataatttgtactatttagcaatttccatttttaaaattgttacaatcttttgactgtgtaaatcagaaaattgtaatacattgttaaagaaaaaattattctgacacttgttaatagggtgagaagactttattttaaacttgtgaaaggcctattgtagtaggaatgagagatcaggctcaactctgaatacagcaaagacaacaaagacaactgggactttatagccaagggacacagcgaggggtttgggggtgggatattactaagagggtcaagggtatggggattcttgctaaagcctaacagacttcttgctaaaggcaggtcaagggctgagacatcaggagttggcaggggacgtccgtaaggaacttgattagatattaagggttgtgggttctctctaaactgacttagcaggattcatgctaaaacgggacacagaagtctaaggtccaggcctgtttgagaagaggactcaaggattaatcaggaagagaattgttatcaatagagggtatatggtttaccaaggtaaaagactgagcacaaagtcagatatatttctgttgacctatattgggtatatcaggttggttacttggaggcaggcttggagattacatgttgctttctacacatactagttttgtgaccttgaacaagtcacttgctgagccttgatgtagaccttttatctttctatatttgtatagggtcagtgtgaggataaaaggagacatacttgtaatgtacttagcacgctgtgttacagagtaaggactcagtaagtgctagcatttattcctactgactaaattctatgcattcacatggggcctgtctatccttctggaaaacacagctttaaatgctgtgttgctatttatttctgtttctagtgagactgtcaccacactactctcagtaagtgatcaggcaacgaaaaactaagaaaggatatattatcctgtttggtaattttctcttcagctgtgtctagtttgctttttatactgcctattgagtttgagttttttaaaagaggttttcaatcatttttattctaaaatatgtagttcttttaaaaatctgcttttaaaaataacctcattccttactcatattttcaaacccttttattttttaaatctattgaaactttttcctctgtatttggtgtaatgtaggaaatgtgtatatatctgattttgctgtctcttgtttcttctggatcttatttgaggtgtcttcgtgtgccatgaaaagaaaatgcataatttggcattgtcttttatagttcttgaatgtttacttccacaggatgtgccaaacctttttctggtccaaaagatttttatggtcattctccagttattagaaggtataataatgattctgtcagttgtgttcattaaaagttttataaaatgtctgccaatgacattttgcgccctgtaaactgaatacatagcagttcagtgaaagcaagtgagagggtaaggggtgtcaaggcacagtaattagcaacctgagctggcaccaccatgtggagttcctgcccctctctcaggatagcacatgtgtgacctgggacctttggatgtagggttgtatagtgtagacagcatccacactcaatccacagaataaatactagtaaagcttaatttctttttaaaatatgagggtcactataaataaatgttctaatattttgtttctgtgcccacaaagggggtcatcttgtataaccmcctggatgtgtcggtactgaaaatcattaacctagaggagcagtagttggcaaatgtttttacataaaaggcttgatagtaaatattcttggctttgagagacacatggttctggggcagtcacagctgcttgatgcagctgcttggatcttgaaggcagccatagacaacatgtaaacaaatggatatggtggtgtcctgggaaaaccttactgatggacctgaaatttgaatatcacataattttcacatgtcacaaaatattatttttcttttgaacttttaaaaattttattatttattttttagagatgagggtctcattccgtccactaggctggaatgcagtggctgtgatcatggcttactgcagccttgaactcctaggctcaagcgatcctttccccttagcctcccaagtagctaggactacaggttcatgccactgcacctggctaatttttaatttaattaattaattaattaatttttttttttgagacggagtcttgctctgttgcccaggctggagttcagtggcgcgatcttggctcactgcaagctccacctgctgggttcacgctattctcctgcctcagcctcccgagtagctgggactacaggcgcccaccaccatgcccggctaattttttgtattttttttagtagagatggggtttcaccatgttagccaggatggtctcgatctcctgaccttgtgatccgcccgcctcggcctcccaaagtgctgggattacaggcgtgaaccactgtgcccagactaattttattttttaatttttttcaattaaatttttagagatgggggctcactatattgcccaggctagtcttgaactcctggccttaagtgatcctcctacctcggcctcccaaagtgctgggattacaggcatgagctactgtgcctggcccaattttcttttgatttttaacaatgtaaaaaccattttagcttgctgcccatttcaacacaggctgcagtctggagactggatttacctgttggtgggagtttgccaaaccctaacctagaggatgaagcctaaattcctgagcatggtgtttgagggactggctttcgaatatcctgcttcagcctacctcccctggtgttcagccatgctgggctcctcgatgtttccctgttcttcacaagatacaggtcatccttaggcctatgtgcctcactgatgggatgccctgctgtggagcatgtggaatgtgggatttcatatctttgtgattggtggattcctatttatttgtccatcctggacttcagcgtaacaaatggatatggtggtgtcccgtgaaaacctggggggatggctttttcttctgcttgccaggcaggattcaatcccttcgtctcctgggttgtcacagcaccatgtgtgcctctggtagaactttgatttcattgcgaggtaattcttggtgcaccgtatggtttcatgcagaaaaactagagttgcctttcttgaggattaggccaagttcttactcatttgtgcatcacagtgcctgatacttaggtgctcagtaggagttaatttaatgaattcgcaattgaggatatgagtcaggaggaattcaggagattggggttacgaaacttctaagagagaattttgttgtccattccaaagctggcattcttcctttgcaagagctctctcttgtgatgtggaaaggaaaatgttttctctttccctttctgtagctcatctttccttctggctcctacctgctctcccctccccacactcccagacacacactcacctgcacctgtgtgctagatctgccctgctttccatcagaacccagtgcgtcctccttctgtcttctggagtctctcagttgacagtttttcgtgtgttcctaaggacaggaaatgagccaactcattgaatctgaagttttcaactttacatcttagcagtgtcttgaacattgccttttacattataaatagtaagagattaagattgtctcagaatcacttcctaactgattcatagggtggctttatatctcttttaatggggtgtggaccaaaatgcatgtctgggagtatagaaataatcactggaacgaatgtcatacttacgtgtcggatataatggaaagctattacaatacagttctcagtcttgtgtcccaagactgcattatgagtaaggccctgggagacaccagaacaagtctcataattccttttacttgttttctttttgcctgctgattagaagaggacttcatttgagtagttaatggctttttctattaatatcagcagtatctagatggagtgagaggatagatgaagagatgggtcagtcaaagtaaaggaaattaagggaagcaggaagacccagagaaattagaataagagagaaaatctatcaaagaaactctgggtatcgaggaaacatcagctatatacatttaatcaaattcccaaagtaagaacatatacttttataattaatggaatggaataaaacactaaaagggccatggagagagttgacttaggaatcactattctggaattttaaaagatttttgatcaactgtcttgtccaactttaagattttatactataattttgctagaaattctcatttgtagatcttttgaatatctgtactttatttattttattttccaatagtctggtacctcccaagttctttgtgacttatttaaatgtaatgatttggtgcatgtgttaaccagttcccttaataatctaggatgtgtagcattgggtcccaatgactttttttttttttttaacctatttgtttaaatttcctccagcatacatccaaacttttcattgaggaatgggataaactacctattttccttaaatttgttttcttttgttagggggttgaggtgcttactgtaatttgagtaagttttaatatatttttcaagttttattcctactttcaatttttttttccagaatattcgactttttactgcttttctgtgtgcatttcctgaaggataattaatctgcgtacgcctcctggaatatttttgtctttacctttgctaattgggggacccagttaagccctgcttcatctctgatatgttccttggccaccttagccctggattcctctaaattcctctagtactgatttttcacacccatcattttccatttgctatgtgctatgttttattatgtttcacctgttcaatgtgagtgtccagctccttgaccatagggactgttctgagtagcccttacatgctagatatgatgcccacgacattacacgttaccctatgaattctgatggtattcaggcggtagggtggttcatgtgtaaagcagacgtctcttccgttctctcccattgtggaagaaagagttgcagagataggctttctgatttctctctgggatgttcactggtgaaaaccattgtcagtggcgctatttgtttaaaaacacttttaaatctatcttctctttgtgcttaaattgttttttaaggaccactaagcctgtttttcacaatgggctttacgttttcctggggaccacgctgttgtgattcagggactccccggtgcttatgtccagtgggctcttagtaactgtaaactaagcacactaatggaataaaagtgaagtccagggattttgataagacttagctgttaatatcagtatttttttcagagatgtcactagtcacaatgaaaatttattctaggagttgccaacattaggtctctgttcagataacttccgagtatgggttcacttagccaccaacatttgcaccaggcaagtccagactcatttttttaatcagctagcttgaaaattgcatttatattcatgtatttagttttttctagtgggtattgcagttcataacttttgcttaacagagaagacccgtctctggcctcattcctgtataactcacacatcgcttcaccatgattgttgttaccagcttactgcagcacctcagtacatctccggtggacaatacattagtattctgttttcctcatgtactggttttctccaattaatattagacacaaataataaatctcttgaacatgcagtgctaacatacccctttcctctttaggagctgtttggtgcttgcttacagcataaactgcttagtgtcattccaagctgacacaaattggccttcccctgctgtcctccatgtaccagttgtatttaaaagatgtcaggggaagctggcatagtggctcacgcctgtaatcccagcaggttgggaggctgaggtgggtggattccttgaggccaggagtttgagactatcctggccaacatagtgaaaccttttctctactaagaatacaaaaaattacctgggcatggtggcgtgcacctgtaatcccagctacttgggaggctgaggcacgagaattgcttgaacccgggaggtggaggttgcagtgagctgagattgtgccatgcactccagcctgggcatcttttttttttttttttaaataaaaaagatgtcaggggaataaggaccttgcagagtaatgttagattgctggattacctatcagagtttcagaagctattcttgtctttgaaggtgtaaaaatatactctataagttcttatggagttatctagcattcctctatagatgatcagggtctacaggacaagctcatactaagcaaactcagaatgtcagaatgttaacagagtaacttgaagtaagaaacataatctcaaagggaccagaattctcttattggctgctcagaatacctgctcttctccatgcagcaggccagtggattcctgtagtttttttctcctttctctatgccgtgcagatcatggctctgcatttggtggtggttgctttgttgcttaagtttcagattttaaagctatactgaagtacagactcaacttcattctgaatttagcttccctcagtaatacatttgtgtcttctcatacacagaattactttcttggacaactaccttaatgtgttgaatgctgtatttactggctcggcacagtggctcacacctgtaatcccagcactttgggaggctgagaggggcgggacacttgattttgggaatttgagaccagcctggccaacatagtgaaaccccgtctctactaaaaatacaaaaattagctgggcgtggtggtgagtgcatggaatcccagttacttgggaggctgaggcatgaggattgtttgaaccggggaggtagaggttgcagtgagccgagatcatgccactgcactccagcctcggcaacagagcaaggccctgtctcaaaaaataaaataaaataaaataaataataaataaatgctgtatttactatcttttatttcagagggtgatctttttcttattttggcctgaaattgttggattgtcccacagtaggctcctctataccatcctaccctgtattctataaactagatcacgggctgttccctgagtatattccttttccccagtggttttgttttctcctaatgctctttcctctgtctagattgttgaaatcctgacacttcattaagtttcatcttgaatgctacttcttcttgactcctcaaacctgatgtgctctttctcctttgaattctatgccccttttgtggcactatcttattccaccttatataaaagttacttgttccatcttccctactaatgcacttgagggaccgtgcatcactccttggctctcttctgcggccgtggacctgctgctcttagtggtcttcagctatttcagtggccagaaagtcgatcactgaaactatgacttgcaagctttcatctgcttcatctatttttaggatttctagttttaatggrctgtttatgaataaataatttagcttcttctaggacatgccagttaatgaaacctcagttaatggctttgagtactaagtgctggtgaaaagtcatttcttatggtaatacttttgaaattgaccactattatagttatggcaaatgtccagggaagagtgggcataagaggttgtggtggtactaccagcctgtctctgtagagatgttatcttgtcacttggcttgtgaagactactcctctagcctccataagttttgtgtaaagattaaagtgtgtgtagaaaaatctgggttcttatcacacaacaaggaaagattaggctcacagatactttgaagggtgaaggggaacagaatttattgggtgaaaaggaaaaaactcagcaaagcgagaagggttcctgctaacaggcccccatctcacagattgaatcccaggttgccacacagggacaggagaggccaaggtcctcccctctgcaaacagcgggcacttcctgaggcccaaccccatcctcccagcacgcaggccagctggagattctccaggaagccgtttttacttggctgtctcattagtaggagaagtttgcatttttagaacttgattattacctggagtttatttttattcatatacatcagtagttttttaagttgggatgtgtgtactgcatatatattagaacttctatattttaacctaattttaaattccaactttttgtatatcttttataaagacatattagtacagtggtatatgtatatactttataaatgcatgtgctaacattgggcatgcttgttcagaattttaagtgacagctgtgtacaaccagaaaagttgaaaccattgctgaatacactaggtaaatttcatagacaagtatgtgtgttattagaaggttttggtaagcaaggacatattttagttctttagtttgctaatgagcttacctgaatttcagtttaaagagtaaaacagaatacatttattaacattttttgtacctatcaatagcttcttgtttttccccagcagtgtcagtgtattccaagtaatgtcttttctgtccttaagcccttaaccggtcctttgtgtaaagcatggacactgctttatgggctttcagtttgtgtgtttgtttgtttttaatagcttcaggggccctgtcaaagttaacccgtggattgaaagatgaatcgctggcttatatctatcattgccaaaatcaytatttttgtccaattggcttcgaagcaacccctgttaaagytaataaagcattcaggtaagcattgacrtgttttagaaagtgcattttaagaaatattaaaaaatagatgggtgyggtagctcacgcctgtratcctagcactttgggaggccgaggtgggcggatcacgaggtcagaagatcgagaccatcctggctaacacggtgaaaccccgtctctactaaaaatacaaaaaaaaaaaaaaaaaaattagccgggcgtggtggcaggcgcctgtagtcccagctactcgggaggctgaggsaggagaatggcgtgaacccgggaggcagaacttgcaaaaaaaaaaattaaaaaaattaaaaaatattcaaagtctgtgatattgggaggcttggccatctgctttcctgacatcaagttagactattctttaaacattatgacttattcttctgcagaattgcatttagttaattgtgctgttgaaaatatccatttagatactgttgttcagtcattataggaaaaagtcatttgaaaagtcacttgtttttctcttagagacagggtctcactctgtcatccaggctggagtgcaatggtgtaattataggtcactgctgcctcaaactcctggcctcaagcaatccttctrcctcagcctcctgagtggctagaactacaggcatgcaccaccatgcccagctcataaaattttttaatttgtgttttctatagagacggggtcttgctatgttgtgcaggctggtctcaaactcctggcctcaagtggtccttattcctgggcctcccaaagtgctgggattacaggtgtgagccaccacacccttcctgaaaagtaatttttacatttattataaaacagttgcaaaggattttatagactatgtcacagtgcytcatccaacgtcccacatgaacaatatattacagaatctagtgtcaagaagattgtcacaactgagtaaattaaaaagcatcttcttttcttaaagtgaagaatatggaatttgtctgggttccccctttgtcctgattgcaaggaagctctgagccaatttttatttccaatgtcagaaactacatgactttcatggttatatttcttttttgcctaatctagagtttctgttttattaactatataactttactggtaaacttgcatctttgtggaagagatgatccctaagaaagagaaggtgactaagttttaatggtttttttcctgcttagccacttttccttatgatgggttgagataataccaggatggttgaaagccaagggagaagtatctagttaagaattggtgggtggggtgcagtggtgtaatcccagcattttgggaggctgaggcaggcagattgcttgcacccaggagttcaagaccagcctgggcaacatagtgagaccctgtctcttaaaaaaatacaaaagttagctgagtgtgttggtatgcacctgtagtcccagctacttgggaggctgagacgggaggatcgcctgagctgagaacatgccattgcactccagcctgggcaacagagcgagatcctttctgtaaaaaaagaaagaaagaaagaaagaattggtgaaaacacaagccatgagtactttgagcaaagggattggcttggtcatggggataggatgggttttttttttttttttttgagacaaggccttgctgtgttgcccagactggagtgcagtggtgagatcatagctcactgcagcctcgacctcctgggcttaagtgatcctcccacctcagcctcctgagtagctggaactacaggtacacaccaccatacttggctaattttgagatggggtttcagggtttcaccatgttacccaggctggtcttgaattcctgggctccagtgatctgaccatgtcagtctcccaaagtgcttggattatagacgtgagccaccacacccagccaggatgggttatttggggctggaggccatgtggctttggagtcccactcaaaggcccctcgggtttggggaagagagggattctgagacaggttggaatgacctgggagaaccaggaagctggaagttgtgttttgtgaataaggagcaagagggaactctcttgttctctcccaatgctgaaatgctttattcatctttctggaggtggaatttcttgtaagtgaggtatactgtatgtttcttttatgatttcatcctgcagcttcaccttatttctgacatttatcaaatataaatcatggttttaaaccaactttgtaccctttaaaagagagtccctcacttctgcctgtacctaagaatcatgtgagattttcttaaaaaactatataaatccccaggctctactccagacctatttgaattagaatgtccagggatgggtttaggacatcagtgtgtttaaagacttcattgctttagggtttcatttttaggatgcgttttgagatgtcttgaattcatagtgaaaggagaagagtagtggaaaaatgcagatagcattccaggatttttttttcctcctagaattttagaggtggtatattaaaacattttatagccctagattttgaatagaggattaaggctgaaattttaatttgtgagttctctttaatggcctgtagaaatttgccctcacctaagctctaatgtctgttcttgatgaatgaatgccaggtttgaatacactctagtatgccttttattaatatatatttgaagcaatatactcaagggagtaactattaaacgtactgtgaatgtattttatatttagcaggggacctctctcaccacaggaagttgaatattggatcttaattggagaatcaagtagaaaacatcctgccattcactgtaaaaagtatgttaacttccctttattttctttaattgaggtaacatttagatacagtgaaatgcacagatcttagttgtatataattagtttgataaatgaatgcacctgtataatcaccacccaaacaggatatggtacacattcattgccatggaaaatactctcactctctactcctatcaatctccatagaaagcccctcttctgatttctgtcactacagatttgctttgcctcttcttgaattccatgtaaagagaatcagacaatattatttttgcatcaatatcttaagtaacatttttgagattcctccattgtgtcatgtgtatcaagagtttattatttttttattgctgagtagtattctgttgcataagcatgctgcaatttgttttccattttcctgttgatgggcatttggattgctttgaggtttggtctcttgtcaatgaagctcttgggaacattcatgtacaagccttgaaacaaattatataaaaattttattaaaatataattcacataccataaagttcactgcacccaccatgcgcggtggctcatgcctgtaatcccagcactttgggaggctgaggtgggaggatcgcttgagcccaggagttcaaggccaacctgggcaacatagtgagaccctgtctctacaaaaaaattaaaaaatgaggcaagaggattgcttgagcctaggagattgaggctgtaataagctgtgatcgtatcgctgcactctcatctgggtgacagaacgagatcctgcctcaaaaaaagggaaaaaagtgtacaattccatagattttattatagttacagggttctgcaccaatcaccactatataattgcagaacattttcatcactccagaaagaaaccccataccccttggcagtcactccgtattccctgagccctggcaaccactgatctaccttctgtctctagggatttgcctattcttgtttgtttgtttgtttggtttttttaagacagagtctctttctgtcacttaggtgggagtgcagtggtgtgatgtcagctcactgaaccttcatctcccaggttcaagagattctcctgccgtagcctcctgagtagttgggcttacaggcgcccactatcacgcccagctaatttttgtgtttttcgtagagacggggtttcgccatgttggccaggctggtctcaaactactgatatcaagtgatccaccctcctcagcctcccaaagtgttgggattacaggcgtgagccaccacgcctggctgggatttgcctgttcttgacatttcgtataaatggtgtcatacagtatgtagcattttgtacctggcttctttcacttaatacagtgttttcaatgtcatccatgttttagcatggattagaacttcattcctttatatggccaaatcatttcctttgtatggagaagtcacttttgttgtacaagtcttttagaggacatatgttttgttctcctggaagacacctaggactagaattgctgattcatagtatagatgtatatttaagaaactgtgagaaaattctccaaagtggttgtaaaacttctgatgaacagaagttctgattctaattaatcttaattaaatttattttatcaattttcttcttttatatgttttgtgcctctataagaaatttttgcctaccccacgacctcaaagatgctttcctgtttttttctagaagctttatagattttatgtttagatttctgatccatttctattattgttttgagacagggtctctctctatcacccaggccagagaacagcggtgtgatcatggctcactaaagcctcgacctcctgggttcaagtgatcctcccacctcagtctcctgagtagctgagaccacagatgtgtgcccccatgccctactaattttaaaacttttttgtagagacagagtcttgctgtgttgtccaggctggtttcaaactcctggactcaagtgatcttacttccttggcctcccaaagggccgggattacagatgtgagccaccatgcctggccttaattaccttttgtgtgtggtatgtggtagagctcaactttgattttttcccccagtgtttatctagttattctagcactatttgtttacaaagattttcctttccgtatttaacttctttggtgcctctgctgaaaactgtatgtgtgggctgtttctggaccctgtcctactaatctgtctgtccttttaccgatgccacactctcaattgttgtttatactaaatcctgaaattagatagcacgaattctctgaatttttctttttcttaaagattgttttggctcttctaggaccttggcttttccataaaaattttagaatttgtccttttaattagagtttgtaaagattttgatgaggatagaatctatagaattcataattttggctgggcgcggtggctcatgcttgtaatcccagcgcttaggtgggaggatcacttcagctcaggagttcgagaccagccttggcactatggcgaaaccccatctctactaaaacgacaaaaattagccaggcatggtggcatgtgcgtgtagtttcagctactcgggaggctgaggggggaggatcaactgagcctgggaggtcgaggctgcagtgagctgagattgcaccactgcactcctccctaagtgataaggtgagaccctgtctcataaagaaagaaagaattcatagtttagttttggaagaattgacatcataacaacatggactatatctttacttaattagagctttaatttcaactttttaaaaaaattttttcagtatggagttttatgtcttttattaaacattttttctctatgtgttctattacactgctggtgggaatgtaaattagtacaatcactatgacaaacagtatggagattccttaaagaactaaaagtagatctaccatttgatccagcaatcccactactgagtatctgcccaaaggaaaataagtcatatgaaaaacacacaggcacacacgtttatagtggtacaattcgcagttgcaaagatggagaatcaacctaagtgcccatcaaccaatgagtggataaagaaaatgtggtatgtatattaccacggaatactactcagccataaaaaggaatgaaatgatgtcttttgcaacaacttgggtggagccggaggccgttattctaagtgaagtaactcaggaatggaaagccaaatatcatatgttttcactttaagtgggagctaagctatgcggatgcaaaggcataagaatgatataatggactttggggactcctgagggcagtctgggaggcgggtgagagataaaagactacatattggattcagtgtacactgcttggatgatgggtgcactaaaatctcagaaatcaccaccgaagaacttattggtataaccaaaacccagctgtaccccaaaaacaattgaagtaaaacttaaaaaagatattgcaataaaaaggttttcctcagtgtgttatactttttgatgctattgtaaattgatttttttwaaatttcatttcttcattatttgctggttgaatacaaaaatacaattgattttcctatgtagaccttgaatcttmcatctttaccaaatccttttagttctagtagttgttttgtaattcccttggattttctgcacaattgtgttgtctcctaatagagacatattaactttacattcttttaaaagtggacttgactgtaattgaaaaggaaatatagcatattgctgctttagcatgcaggatgtcatctaacatgttggtatttatttattctgtaggaagagtaaccaattgtacactgaaaaccttggcaacggttggataaayagaattgtyataaaactagaagttattacagtttagtaratgaaacaatgttgagataagagaattactgccaattattgctgtgataatattgcagcaacttgctcatgaaaaattccattgcaatgatactttagacctaaagaaaattgtgctttatcctttcttcttaactatagatgggcagatattgttactgatctaaacactcaaaatccagaatacctggatatccggcacttagagaggggactgcagtatagaaaaacaaagaaggtaagaagaacaccattgtgtttgaaggcatttcccagctgaccaaaatgtggtgttttacttagcactctttaggttgcaartaacagaaacctatatttgatagaggagtgaaaattattttaaggacacasggctgtctttaaaacccaagggcaaggggtataacctggagtcataaaggaatggtagatggtagcaggtattggaatgacagcaagggccaagtagctggtagtctgcttcactcttttgggggctatatattgttcttagctttccttttgtctgattactttcttygtaagatcatcatctttccatttatgtgtcttttttagatgaacagtctagactgagactgacctgtcttgggttcagttccatagtcttagcccagcttgggccagattaactgtggccttgtggcagagtcatgtgtacaaacaaggctttgggagaggctctcaggaaatgatatcttattgatgcaatcttactcatataactatatgaagaataggagagagaggaaaaggaatgatcttggtgtttgaattaggcagatggggaagttctctagtatgtgttgggagtgagtagtagagaggcatggggaggaaggtgttttggctccggtgggcattgttatattttgtaaaggcagctgttagaaaaggtgcaggatgaggtgctctgatgatgcctggaaggaaagtaccattctgaggccggtgaagtaaaaaaagaaagaagggagttcatagggacctacaaattagtacarttaatttccctttattttcttcagccaacatttttttcttctcaggttgggggaaatttgcattgcatcatagcattccagagacttaactggcaaagatttggcctttggaactttccatttggaaccattagacaagaatcacaacctccaacacatgcccagggaattgccaaatctgagagtgaagacaatatttccaagaagcagcatggrcgtctgggccggtctttcagtgctagtttccatcaggactcggcatggaaaaagatgtctagtatccatgagagaaggaacagtggttaccagggttacagtgattacgatgggaatgattgactatgcttgctactgaacagctggcattatatatgaaactgctatatacaggactgtataaagacagtagaagattttagtaagcctacattaaataggagcagatcttgtggtataaaaaataaccttgtagttctccagatactaagcttgtatatgattatggtgggtgatttcagatatataagcagataagcacagattattgtcctttcaagttaagagtatataatctggacagaaaatttcacaaaattcaataaaattacaactgttgtctaaataagtgaaacacaaattcacttaatagcatcaagatttgaaatacttaagcatgaagtgacttttataatgactcgatccctagacatttgttacagatagttttatgcctaagaccaagatgtaaagtaccatctgcccttaaaaaaaaattggggctgtcaatttctagttttcactcatggttaacacgcatttaaaattatttcatgagtctagtagttctttgatttatagcaggatcttgcttgcctcatttgtttcctggttatgttcttaggattctgactaagaggcaaaagagaaaagactcaagaaactgatcctggagatcgagaccatcctggctaacatggtgaaaccccgtctctactaaacatacaaaaaattagccgggtgtagtggtgggcacctgtagtcctagctactcgagaggctgaggyaggagaatggcgtgaacccgggaggtggagcttgcagtgagcggagatcgcgccactgcactccagcctgggcaacagggcaagactctgtctcaaaaaaaaaaaaaaaaaaaagacggatccttttttttggtgcaaatgggtgacttagtgcattgattcagatttttaaaatttcttgatgtggtttgtaataatcaaatattgacaagaaccttaggtctcgaaagacttttatargtctagatgacgtttgccttaggggtaaagtaaaagaacaattggcaccttaagtttctatacccaaggttatctgtgaaatgagatctcctgatatttgattgctttctcagtatggagtcatatgttgataacagtactgaagatgcataagaaatgcccaagtcactcagaggacaactacccatattccagactctgagctgtttcctttttaaaaatcatatagacaattagctgtttgaagtgagtattaaatatttcagaagtgtgaatttcatgtatttgagctcctctagttgctgtcggtttttcttctgctgccaacctgtgactcacaaatgactaggatctcttgttctttaattttagggtcttgttccaggactcaaatcagtaacttggtgattacaaggtgctgaatgtgttggtaaccatatcgcaatacacctcaaggaaaaggttcagatttttatttttaaaatattttcatttttttcttgaattttatatccgtttgttcactcgtacatgcctagcctacagaaggggatatatattatgaaatggtcatttttctgaagagaatattttgcttgaaatgcaaaggactgaaagagatttgtaggttgttgattttgttacttcatactggaacttttaaaaagatttcatcaaataaagttttgttttctacttttaattatatgaatgtttttaaacctttgttttaggtagaaggtaccattgtgtctttgaagtacatgataatttgtcaattctgctcaactggtacattgtaagaaaccatcttgagccttttataattaatgaaacaatatgcattatgatgactgtaattttagatttctaatttaataggaaatagaaaatttgattcttttattagcttgaaccaaatgaagttgtcatctttgtaggtcaaaaatggttgaatattagcaatttcatacagttcaactgaatatttcagagaagacgtaggtaggaagaaccaagaggaaaggagaaaaatgcaaaataaaataagaaattaaaggatagggagacacctagaaaaacaggatgagttattcagactattgaccataatcaatttttataaaagtcttgatctgttctaagtttggcttccaagtttggctttccagttattaagagcacaatgaggtttgagtttagtgagattatctttcccgcagaagctgtaagcaagagttactgcatacttctcttagaagattagtaaaattcccttgatatttgatttcttggtcagctcttaggaatcctatagatacagtgaaagttcaaatactggctctgcacttacaagctatatcacctatagtgatataggcaagttaaggttaattttttttctgtgcctatttcctcattagtaaagtgggggtaatagtatctactttataaatgaatttcaagaataagctaatacatgtagtgtttagaacagtgctttgtagataggaagtgctatttaagagcttgctattattccaaaagatgtgaattttactattcagagtctttagagagagccctttagatagcatcttaaggagctaattccttttaaatcacatatgcaccccttagttgctgtttcttcaaaagaatatttcatattcaagaatgttgctttatttttttgagacagagtctcgctctattgccaaggctggagtgcagtggtgctctctgcaacctccgcctcccgggttcaagtggttctcctgcttcagcctcccgagtagctgggattacaggcatgcaccaccatgcccggctaatttttgtatttttagtagagactgggtttcaccatgttggccagggtggtctcgagctcccggcctcaagtgatctgcctgcctcggcctcccaaagtgctgggattacaggcgtgagccaccatgcccagcctttgctttggttttaaaagtacttacaatactcaaatgcctatgttggctatttatttttacccagctcacaggcagaaaaaaaaaagtttatttagatcaaattctgcagcaattcctttccctactgctattactgttaaagaactgtgtgccatcattaggccaagttggtgcagcacccaaaatacttgccaacttgtcttctcccagactggaggggctcaggcagctcttctaggatccatcacattctgcatctcaactttaccaataacactcccacccctcctgtaccagcgattcactcaacaaactaaattatacaccattaccaggtcagttcttaaatagctcagcagcaacaagaacaacaagatgttggtcgcattctaattttactggcagaaactgagggtttcattggtgaagaaacctgcctaggatcacagtgtcttagtttctcagggctaccataacaaaacaccacagacagggtggcgtaaacaacagaaatttgttttctcatggttctggaaactagaagtccaggagcaggcaggtttggtttcttctgaggcctgtctccttcacctgcagagggccgccttctcactgtgtcctcacaaggcctttcctctgtgcctatcatccctggagtctctccctgtggcccaatttcctctttctacaaagacaccagtcaaattggatttagggcctatcctaatggcctcgtttcaatttaatcatttttaaacgctgtgtcttcagatagtcacattctgaggtactcaggcttccacagatgaattttggaggacacaattcagaccataacacaaggcaacatatggttcagatgagatctgaatgaatgatcagcctaacctccaagcagattctttcagcagactgcaaggtgcactggagagctttagactagaggcttaagaggtcatttaggcaatatttacagaactgctaagtgccaggattgggggatgtagcagtcacgaaaatcgttcttcgtttcagtaagtttacagtttaccatggggaagagacaaatactgaacaggcagttatattactctcagtaaaataacaactgggaacagtttctggggattactttacatatggaggaaatgcaaaaaacactttgtcaggattattcctgtagcaaattagatgtgactaggtcaaccaaacatggccactgtgaaccatcttattgagcatagaagtggttttgctaaaaatggatttctccacggagcacggtggctcatgtctgtaactccagcactttgggagactgaggcaggaggattgtttgagaccagtttgggcaacaaagcaagaccctgtctcaaaaaaaaaaaaatcagggcgtggtggtgggggcctgtaatctcaactactcgggaggctgaggcaagagcatcacttgagcctgagaggtggaagttgcagtaagctgagactgcactactgcactctagcctgggcgacagagtgagaccctgtcaaaaaaataaaaaataaaaaaataaaaaaaatcaatttcccgtatacttctgttataaagaagtctttaaaaaattgcctgctcccttaagtcagccttttcactgagtttaaatttcgttccaatttgaacaaatatggatgctaatactatcctttatagttactagtgctaagtgcgttgcatgtaacaccttgaatacttactgaagtctgcaaggttggttttatgccctgattactgatggagacacaaattctgaacaactgtgacttcagggatgctaaacaccatagtgaggcacgatgcggggatttgaatcttggcctgagggttccagagctgtggccttttctggggttactctgttaattgatttctagtcctttctgatctacaagccgcggcattataacttttagatgctgaagaaaactaaactatatgtcaaggattaaggcttgtgaacccccaaaatttgggacaggtctcagttaatttagaaagtttattttgccaacgttaaggacgcgcagctgtgacacagccccaggaagtccagatgacatgtgcccaaggtggttggggcacagattggttttatacattttagggagacaggagacatcaatcaacatatgtaagtacactggttccttccagaaaggtggggacaactcggaagcaggaagggcttctaggtcacaggtagatgagagacaaaaggctacatacgagtttctgataagcctttccaaaggagacaatcagaatatgcatctatctcagtgagcagaaggatgactgactagaatgggaggcaggttttgccctgagcagttcccagcttgacttttcccttttgcttagtaattttgggaccctaacattttcacaggctttaaattttattattctttagttactacgtgctagcatataaataaatagtacaaaaccaagaaggcatccaccttttggttgtctcttcacgtgtaaaacaacactttgtgttaagtatcttcacacacggcggcgcaaaggtagaaaccgatactaaaaaagcgtgtagaaaatagctcccagcctgggcaacacagggagacctcatttctacaaaaataattcgccaagcatagtggtgcgcacctgcggtcccagctacttgagaggctgagatgggaaagttgcttgagctcgggcagcaggagttccaggctgcagtgagctaagaatgcgccactggactccagtatgggcgacagcgtgagaccctgtctcaaacaaaaacaaaagcccgttactccaccaagaaggcgcttttgcacattgttttaatgcttaacgccttcaggatgccagcgtgacggaagcaagtaaccaccaaggcatcaccactggcgctaaacttctcacttccggagtgctgcaagcgcagaaaatatacgtcatgtgcggaggcggagcttccgccctgcgcgtcgtattagacggaaaccgagcgggcccatttttcgtgggtttgcggacccaccagcgaaggcgggaggtgtcgcagggacatcttctggctgtttccgtcgcctgcgtggcccttgcaccccggtcttccattagcggcgcagacgtttgggcctaagcgctgggcgaggcgaggccctgcccctccccgccaacggccattctctggacctgtctttcttccgggaggcggtgacagctgctgagacgtgttgcagccagagtctctccgctttaatgcgctcccattagtgccgtcccccactggaaaaccgtggcttctgtattatttgccatctttgttgtgtaggagcagggagggcttcctcccggggtcctaggcggcggtgcagtccgtcgtagaagaattagagtagaagttgtcggggtccgctcttaggacgcagccgcctcatgggggtccaggggctctggaagctgctggagtgctccgggcggcaggtcagccccgaagcgctggaagggaagatcctggctgttggtatccttaacgccgcgttgggacttggggtgcagggattcggggctggattcctcgcggggctctgccttgggcacagtggcatctgcaggatgatggtcttgggtcggggtcggggtcgctatagaatctctgtcactaggttttctaagtacagtcgtccctcggtatccccggggctttggttccagcccctcctccgtataccacgatgttcaagttccttcaactcccttatataatggcgtggtatttgcatataaactacccacttccgtaatcttttaaatcgtttctagcttacttgtaatgccgaatgcaatgtaagtgatctgtaaatagttgttatactgtattttaaaattttttgtagtttttattggtatgttttatttatttatttttttccatcgcaaatatttttgatccgtggtaggttgattgcggaatcgggtgatgaggcgggccgccctgtctgctttccccagctttgcagtcttagcggcctgtgcatcctggtttgtcactttgtggcagtgctttatgttcctctctgccttagttctctcatctgcaaagtagaggtggtgatagtatctacacacaggattggaatgaggaataaagaaattgcctacatgagagaagtttagcgcgattaataca

SEQ ID NO: 97927 - DNA, 31573 bp, Homo sapiens
  misc_feature (1)...(31573): n = A,T,C or G
gaattcagagggtggccctcaggtcctcagactggctgggacctgagggtcccaagtgtcgaagggttggaggccagggctgtgggttgtgcttgacctgagaagataaagaagccgccctgatataattccagtcgggggaagccacggccttgtcagctggccacatttctccccatctccgagggccggccgtcgtcgtctttttttttttttttttttttttttttgagacagagtcttgctctgtcacccaggctggagtgcaatggcgcgatcttcgctcactgcaacctctgcctcctgggttcaagcggttctcctgcctcagcctcccaagtagctgggattgcaggtgcctaccaccacgctcagctaatttttgtatttttagtagagacagggtttcaccatgttggtcaggctggtctcgaactcctgacctcaggttatccacctgcctcagcctcccaaagtgctgggctgacaggcgcgagccacccaaggagtgagtgctctttttccttgcagagggtggaagccttgtgttctcagcccagggtcctgaactctcctgctctgtctggggaaggggaggacctgggggcgtcccagcctctctctctcgaccccaccagctgccaccctgttccccagcagcacccccaggcccacgtggacatctacgagaaacagcctgtgccctttggcctggtgcgctttggtgtggcgcctgatcaccccgaggtgaaggtgggtgtctctgggcctggaggctggggtttggagactttggtcaagatgaggagggcagggaggctccctggctggatgacaggacttcatgccatctgtgcccatgccacccagcttccctcctggggacacagagtggtgagggtggtgcagacttggtccctggagctgccttaccctctaacccctcccattcccgggggacctggcagaatgtcatcaacacatttacccagacggcccattctggccgctgtgccttctggggcaacgtggaggtgggcagggacgtgacggtgccggagctgcgggaggcctaccacgctgtggtgctggtgagtgcagctaggccctggcttggggaggcaggggctgcagaaggaggccggtggctcggggtggaaggcagcaggggtgaggccaggatgcaagctgctgagaagctggaaggaggccgctgggagcctggggggctgcccggcctatcagtgctggtgctgaaggctgtgggtctcgggcctgccatctttcatcagagctacggggcagaggaccatcgggccctggaaattcctggtgaggagctgccaggtgtgtgctccgcccgggccttcgtgggctggtacaacgggcttcctgagaaccaggaggtgagtatggggagcacgcccgctgcctcttcctccccgcccctcagcccttggatgccagacctgggggaagagggagctgccatccagtggcgagatgtgacattgtgctgactgaggcgggaggccagctgtggagggcctcgggggagagctgggtccaggtgggggaggagggaccagagttgtggactttcccggtgtggggaagccccagggcacagtggggaccaggcatgaggcacctgcagactgagatgagctgagtggagcgaggccgggggaccctatcaagacctttcccctccagctggagccagacctgagctgtgacacagccgtgattctggggcaggggaacgtggctctggacgtggcccgcatcctactgaccccacctgagcacctggaggtgagtggtaggtcagggctggcggggttggaggtggggtcaccctgaggagagagtgcccttgtctgcagggttcaggccttacctctccaagctgggctcagtgcctctgtttccccgtggtgcccaggcagaggctctctgaagggcagtgccatgagcttcctcttctaccattttcccttcactttctgcactccagctaagtggcgtttttctcttactcttcagtaagccacatcccctgcttggatcatccccactcacctcccaccagttaacagttaaagttcatctttgagatcttggctcggttgtcccttcctccaggacttccctgaattggtccactcccccatcgtgcctcctcccatagacctgtctacttctgtttcaccgcatatcatcgccacggcaattttacacacattgatgagtatttgatgagtatttctctccccagcagatcacaagctctgagagggcctgctccttgtctcttttcctcaccattgaccaccccgcccctccaagctctttgcatgggggtgagcacatggtagaggcccactacatacttgttgaatgaaagtgtgggcctggtgtgctattagttggagccatttgcagagttggcagcaatgctccatctggccaccaggggggagcagtggcgcaattttgagccgccagccttctccaggcccacggtggggacatgaccaaatggagagtcccctttcctcggtcagtgtctgatgactccaaggccctccttttgtgccagagaacggacatcacgaaggcagccctgggtgtactgaggcagagtcgagtgaagacagtgtggctagtgggccggcgtggacccctgcaagtggccttcaccattaaggtgctggggccagagtgggaggagccagggttccaggtggagggggcctctccttaaggggttggggtggggcagagcccctgggagtagctgctgcctgggatggaagaaggggagcagtcagggccccgggggccctgtgcctttggggaggaggcgggtggtggtctctcctgcctgggctggaccctggggtgggctcaggtggactgtgttctgggcctgacctcctcccccattccctgctcccaccttcaaggagcttcgggagatgattcagttaccgggagcccggcccattttggatcctgtggatttcttgggtctccaggacaagatcaagggtgaggggccctggcctggccccccaactactagggagagggtggcctaggtcagagagggattggggaagggcatgcagggagagggccggggcccagggacagcctggagacattctacgttgctgacagaggtcccccgcccgaggaagcggctgacggaactgctgcttcgaacggccacagagaagccagggccggcggaagctgcccgccaggcatcggcctcccgtgcctggggcctccgctttttccgaagcccccagcaggtgctgccctcaccagatgggcggcgggcagcaggtgtccgcctagcagtcactagactggaggtgagtctcatgtttctcaaagacacccccttcccaggcctctgccacccgcctggtgttgcccacactctccccaacagggtgtcgatgaggccacccgtgcagtgcccacgggagacatggaagacctcccttgtgggctggtgctcagcagcattgggtataagagccgccctgtcgacccaagcgtgccctttgactccaagcttggggtcatccccaatgtggagggccgggttatggatgtgccaggtgagagggtgtgaggaggctgggtgctgaattatggtgagaggccgagaagctggtatctcctggggccatgcgttcattcatctagcaacatgtactgagaagcttctgcagggcaggccctctctaggacccagtgccgccctcctcttggccctgagagaagttccagtctggctaggacatatgtgacatacgtcgggtcattaagtcattcaacaaacgtttactgaggtcttttctgggttaggccctgtgcttagtgctgggattggagattaataaggcagcctgtgtcctcagggagcgtccagttttactaagtgcccacatacctatctagtgattaattcacttggtaaacatttaccaagggcctactgaaactgcaggggagcaagcctcagctcctaagcttagggatcccctcatctacagggaaactgaggtgtaagggggtcggcctggtaaaaacagggagagaagaatccagggcagtggaccagcggccacagcaggctcagccgacagtctgccaagaggcgtggggtgtctgtgtgcgtgcacgtgggtgtagattgtgggcacaggatggccagggtggtatccagccacctccctcccttccccttttgttaccccctctcaggcctctactgcagcggctgggtgaagagaggacctacaggtgtcatagccacaaccatgactgacagcttcctcaccggccagatgctgctgcaggacctgaaggctgggttgctcccctctggccccaggcctggctacgcagccatccaggccctgctcagcagccgaggtctgggccccgatgctgaggtcctgggaggtggggtgggtggtccttctctgggcctcactctttgggagggggctgttctgggaggggtgaaggaggaggtgttgacaatctcccctttgcttcaggggtccggccagtctctttctcagactgggagaagctggatgccgaggaggtggcccggggccagggcacggggaagcccagggagaagctggtggatcctcaggagatgctgcgcctcctgggccactgagcccagccccagccccggcccccagcagggaagggatgagtgttgggaggggaagggctgggtccgtctgagtgggactttgcacctctgctgatcccggccggccctggcttggaggcttggctgctcttccagcgtctctcctccctcctggggaaggtcgcccttgcgcgcaaggttttagctttcagcaactgaggtaaccttagggacaggtggaggtgtgggccgatctaaccccttacccatctctctactgctggactgtggagggtcaccaggttgggaacatgctggaaataaaacagctgcaaccaagagccatggttgatgggggactttttttggaagggttggggtcgggggtcaccttctggccgtagctcccctaccatcaccaggtggcgctgcagagacggctccctgctcaggggcctcattggggcttgatggggctcggcagccaggcctggcatagccacccttcctttctccgctcggccctgctgtggctgcgggttgcctgtcttctgtccacactagggctgcccgggaccgggaccgggaccacccctccctggggagccctcagtacaatcaaaacagaaaagaaatgggagcgggggactgagaagcagcttgtcccctgtacctctgggtgccccaggcgagtctagcctggggcccattctttggctctcaaagccttcctgcttccgtttccagtcagacacactggcctttaaaaatagtgcctcagtctccctagggctttgcagtgtccagagagtggtcactcccttttatggcagccctcaagatgctgcctcgctgtataacctgaggggtcctcgaaattggcccaaggtcacacactcgtgagctgcgggctcaaacccaggctccgggcaggctggtgtgtcctccgaggcgcacttgccccgagtgtcaggtctggggacgcggttccggagaggggagaggggcccgggaatgcggcgggaggggcctcgaggggcagcgggccgggccgggccggggcggaggtggcgggccccggcggggcgggccctcgcgggcggcggtgagagctcccgcacagtcggctgcgagctctgggagcaggaggcgcggtgcgcagcccagcccgggacggagccgggcgccgtgcgagcctcgggagggttcgcggggcgcacgggcgggcccgggcccagcggaccagcccctgccacccccccccccccccgccccgccgcgcccgggctccggcgcccgcggagctgagactgagcgcgccagccctccggggccgaggctctgggacagacaccgcgagggaggcggccggcgcgggctctcgtcgcgggcgcagcgccccttcccctcggtaagtggcgagcggcgggcgaggggcaccaacttcgccgccaacttggggctgggttcccgcggcgcgcgagcaaggacggcggagacagaggcgggacacccggggggttggacccacgcaggactctcggggctcaagragggggcggctggaggacccggaccctcaagaacctggccttgggttttgacccgggcggccggagagaaggcgaagaagaggccgagcagacaggcgcgcggcggacgcgagagaaggacgcgggcgaagcgtccaagacgttcgtccccagggtcgccgagccctcctcctccttcgcttggcgcggcagcaccgcgggaccaggggagtctgggctgccgcggacccaaactgttgctgctggaagccgccggggcggagagcggggaacagggccgggagtgggggccggggctgggatccaccagagcgaggggttggaaaggagtcgagaaggtgaaagggggctgtgcggctccccagcccagtgccccagtttccctaggtctgctgggcacctgctgcgcactcgcctcggcgcccagaccccttcccccgccgcgagtcccgcttcttccccttccagctctgccccatctcctttgccccagcctagctctctccttcctgcgacctgggagaatcggagtgggcttccagagtagtggcatcttgcagatgctggcccgtgcccggctcccgggcttccagagcgcaaagggaagggtaggcagagagggcactgggcgagcaagacctggcgctgggccctggctgcgcaccagccgcctgcgccggtctctgggggcttcgcccaggatccccgacggcggggaggggaagccccgagtctcctgtttcctgcctacgcgggcagggcggggacacgcggagcaaaggcacccggcaacctgaacccccaggtgcgtcccgcgaccctgcaaggagctgctgggtgagcaagacgggaattcccgccaggccctgatgcccaccccattcgtccactcggtttcccagccctggtcgtccaaggggacttctggctcggtcccccagccctcggatggtggcgttatcttagttcagtccctgaccccgggccacaggaaaatcgaggaaagacacttatttggggagggtaccattccgctggctgtatttcagagcccgtccaggtcttggcggtgctagtgactttgagcctgtttctaaactcccgaagaataagagcgtgccaggggcaggtaggcaggtccgggacacctgggttcgcccagggcccccgggcgggcctgggatggtaytggggccgcctgccaggctggcttggtccccccactgcgggactcggggtcacgacccagcttgggggagtgggggtgggggccccggagccgcggacgccggcggggggcagcgtggggcggggggcgccgggtgcgtggtgctcagcttggccgccaggaggcgtggcgcgggtccccgcccggagccgccgccgccgccgccgccgccgcatcgcgagtgtccttgagccgcgggtgacggtggctctcgctgctcgcgccccctcctcccgcggggggagcctgatgccacgttccctatgaattatttatcgccggcctaaaaataccccgaacttcacagcccgagtgtaagagattgctgcggaggggagggggcggggcgtcccggtggccagggggagtccgggcggggtccgcggagacgggggccgtagccttggaggagcaagaactccgtgcccccagcagtggggcaagctagaacggcggtcctctcccctggcgcctgggttcgggttttggctgggcaaaagggagggagggaaacccgacggcaaaggaggggcggctcaccggaagggcagggggtccgggggttctgctggtgggtggggaggactcctgcgacagagtttcctagcctgggagagggagagccatcggtatctcagatgtgagcgggtatgagtgcgggagtgtgcatgtgtgtgcaggtccgtgccagggggtctggctgagctgtgaggacccgggaaggagaaggcccccagcctgggaaggtgctcagacccttctagatgctgctgtgtcctgcaggactgaccactgccatcctctctggggctctttggggatctctgtgtttgtcaaacattagtttaagggctgtttgtggaaggggtgagaccctgagtgggtgggtgggcagaggtctctgagacaatgtgtctgccctcaaggagcccgcagtccagtgtggggcagggtgttaatgagtgcacacacacctgccgcagggcagaatggaggggtggaggggaccactacacagagctccccacccaggaggggaagccagggcagggggaagaagggcaggtgccccagcctggccgcagtccctgcgcctagagcctgaggcatcaaggcaggtgcctgtgggagagggatttcagctgggccctgaaggagagtagacttctgttgggatgaggacattccagcctggggratgctggaacgaggcctggagatgagggcagaatggggctgtttggccagcagactggcagagctgtgggttccagggatgggaggacggttggttgcggtcagggtgcagagggctctgtctatgggactaagctgtctggacttcatttgtgggcaccagggtgtagctgtcctgtgtgaggagggagcagtggctggaggaaggcttcagcagtgcagtggggctggcgggggtgggtaggtgggaggtggggagggggaggcaagggaggagattgtggcgggggaaagtggagtttgtccctcctacctctgtagggtggctgggttagacggggtgatgagacagaattcggaagctccttgagtctgccccttgctatttggagcccagggacttacctagttttggcccctggctctggaggtattctgggatccctcccccattttaggccccttgattagaggtacaacctgcctcaamtcccccaccccccgacccccaaccccyaacccagcaggacaccttccctttggagagagtctctggtgtccccagcccatgaggatgtcttcctattggagagagtgggaatgagaacattttcagctattaccagacccttattccttcatgtgaatgagctctaggtccttggctaagaaaaggtcttgactggggagggtggaagcttgaggggagtagggagttggaaagagaaatacatttagaaaaaggaggttggagatgctaatggcagactgcttattctgcccctttgcagttgagggagagcctgggcccttcatccagggtcacactgtccaaagaaataaaatgggagccacaagtacaatttaaaattttctagtaaccacattaaaacaaatagaaacaggtgacgttaattttaatagtatattttctttgactaaacataccccaaatgttattatttcaacatgtaatcaagatacaagtgtttacgagattttttacattctttttccctgttgtcttcaatgtgcagtgtggcatgaaattttacactgatagcaaactccgtttgggtgagagatgtttctggtacccaatagtcgtgtatgactggcggctcctatactgggcagcacagatctagagctcattactgggaggcaggggtagtaggaggtttggggctccccagagggcaaggaacctctaggacctggaggtgtgggcagaggtgagcagacagaggccgtgcaaggggagcgacaagcatgtcagtgtcctttgtggttgagatctgacatccctgattggtggtggcagctgaggcatggcatggcatggctaggatcgatcccttgccagactcaaacatgtctctgggctgtcagttctgtcacttctgtcacttctgtgtcactgtactagggaaccgtacacatgggaagatttcaagggcgccaccatgagagcaatattcccttccttgccaaaactcttgtcttcttggcctgaaattctaccacctggcactttagcttaaggctctgaytgtggttaaactacatctctcttgggaatgagaaccctttcagctatgatcagtccctcataccttcctgtgaatgagctctagatgcttagctaagagaagatcttgacggggaggctggggagtttgagggaagtagggagagaaggttggaaagagaaatatatttagaaaaaaggaggttggaggtgctaacagcagcatgctcattctgcagatttgactctaagttcctggagggcagggaccatgtctcacccatagggacattccaccatccagcgcctgctgcagggaaggggctcagcacacacgggccaattgatgtttctacactaaagttggtttagtgggttccctggagggatcctttcagtgccaccctggggagaagaggaactttcctgaatgttcctggtagcctcttgcacttccccgctctctggattccttagagagaactagagatacaagaaggcccatatgtctgtaagacattaggctttggattaaaaaaaaagagagagatagctgggtgtggtggctgacgcctgtaatcccagcactttgggaggccgaggtgggcagatcatgaggtcaggagatcgagaccatcctggctaacacggtgaaaccctatctgtactaaaaaatacaaaaaattagccgggcatggtggtgggcgcctgtagtcccagctacttgggaggccgaggcaggaggatggcatgaacccgggaggtggagcttgcagtgagccgagatcgcaccactgcactccagtctgggtgacagagcaagactctgtctcaaaaaaaaaaaaaaaaaagagagagagagaaatttggtggcaggcaaaaggaaggccctgtgagaaagctggagcctgcccagcagttgtctcgggccccatccctgaagggcatctgtctttcggaggcgtggtttctggcaactgcttgattttcgtgagcatttctgtagcagagatgtgcagatcctgggggaggcgggagggctggagtggcaggctcaccctgtccaccctttagctcttccctgctcagaagttttgctggggatgtgatgaagatgggagagatggcagtgccatggccgatggccagctgggagggagagtgacatccgtgggcaccactccactcaggctttgtgttaccctcactgctgtggctcttggtcccaatccaaaataatgacatttagcaaggatacgtgtcaggcccctgggttgggttcaaaagatcctgcaygccagtgatggcccgagaggccagctcaccagctcatgtgtaacaagaccaaaccccagctcaccagcttgggttttccggtacccctgagctctgaacaagtcagtgctgttgcaccctgctgcggaagagctgctactagctgaggccacagaaggaagggctgtagtgacgtccagtgcccaggaggagggggctctgtgccaggcagaaccatgcagaggagggcccttggggctggccccatggcaagcagggcacactgaccagtagcacaggccctggtgagagacagatggaagatccggtttagactatgaggaggactggccggtgggggtgggggttgggggtgatgcaagagctgtcttccttcacctggctgggggcctgtcacctgcgggatgaggtcactaatcccagcaaatagcctgttagctcatctaagtcctcacactgctgtgattatttcaggcaagaaaacatggctcagagaggctaagtgacttccctaagatcacacagccagttagtggcagaactgggacacgaactcagatctgtctgactcaaatccatgcacttgaaccccagactagcattttcagtatgacttcctagggcagaacccactggctgagttttggaaggcatcagtagactggagggctgggtcccggtcatggctcctgttcttccccagcccttgctcttctgggatgcccttgggatgctcaactaacctctrtctctttctctttgtcygtgtctgtctgtctccctctctctcygcctctcttcggggagggaggttttcccctcttctctttcatcttccgtatgtgtgtccctctgtccctcctgtctgtccatctgcctctctccaaacctctgtctctctccctgtgcttgttctggtctctccgcaggaccctccggtggacatgggtggggccctggggccggccctgttgctcacctcgctcttcggtgcctgggcagggctgggtccggggcagggcgagcagggcatgacggtggcygtggtgtttagcagctcagggccgccccaggcccagttccgtgcccgcctcaccccccagagcttcctggacctacccctggagatccagccgctcacagttggggtcaacaccaccaaccccagcagcctcctcacccagatctgcggcctcctgggtgctgcccacgtccacggcattgtctttgaggacaacgtggacaccgaggcggtggcccagatccttgacttcatctcctcccagacccatgtgcccatcctcagcatcagcggaggctctgctgtggtcctcacccccaaggtgcatgtccaaactcatgtcccctcgtgcctcaggcctggaaccaggctggggtcgggggtgctttggttctgggaagctgggattagacgggatgggcagggaggtgggggctgagggcatgatgtgggtgatggggagatggttatgggaatgacatcccatgttctagaggagagatattctgggctgacctcacattgtgtctggatgaggggtgggcagggtgcaggcccaccctctggctgtggggctcaggccccagccctcctcctctctgcttccctcagcttcctaggtcagggtgaagacccagagggccagccgggcatggaggtggtgccatgccctctgggcagtggtagttgacctgtagggtgagcaccagggaaccctgggagccctgggggaggcagaaacggccctgcccttgcagggctcaggggagaacgttccaaacacacattcatcagcagttacaactaggacaagcgttctgaaggaaagacacaggatgctgtgagggagctcactcatggctcatgcatagggtgttggccagggaaagtctctggagaaatgatgtctaggctgagggcctaagggcgagccggtggggagggggagaggcccaggcagagaagcaggtgggatgaaggycccaaggcgaggaaggagctcagagctttggaggaatagagggaaaagcctggagaaggaggcgggggcctggccacctgggaagacatttgggcttttccctaagcaagtgagcagacagggcagcgcaagccggctgtgacagtggccgtggtctgtgcctgccttagccctgtgagcttcctggccctgcccctgttgatctagccactcagggaagagcggaggagagttgagggaagagactgatctgattcgcctttgtttcattaatttttatatgaagaattttgagtatacattaaaaagtataaggaagactcatatatcccccattcgccctggccatccaccccagcctcaccagcacccccttccccttcttctgtgttaatttgaatcaaagcccaggcatcctcttattccatccataaatatttcagtatgtatccctggcagataagggcttaagaacgtaaaaccaccatacattatcacgtctaaaaaataataaaaactccttcaaatatccaggcagtgttcaaatttccccattgtttcataactgtcataagtgtttattttgcagcctgtttgctcgaattaagagccaaatcgggtccacacgtgccggttggttggtgtggcttctgagtttctctcaacctctgggcccctcctctgtctgtctctcttttttccttgcaatttgtttattgaagaaactgcgttgcttggcctctgaattttcccttatttgcttttttaaaagattgggacagtggcagcagtgagaccagttacgaggggactgcgstggccccggtgccagccggcagtgccttgggtttttgtggtggcagaggggtggagaggaggagctttcccaccctcagggcttcaaccagggtggcgtttccccgtcctcttggggccccggcataagatctcaggacattggctctcaaccctcatcgtgctcttaggaaatacrgacgcctggctttgcacctctggaattcagattcagttggtctggggcagcgcttctcagtctagcgggctcaaggatcggctgaagagcttgtgagaatacagatgccaggcggcatacccagcgactccgatccagtcggtgtggggtgcgacctgagaatctgcatttctgacaaactccccagtggtgctgatgctgcgggtctgcgggccagcgtggtgggctgggggccgggcatgaccatgctactaggcagnnnnnnnnnnnnnnnnnnnnnnnnnnnnnnnnnnnnnnnnnnnnnnnnnnnnnnnnnnnnnnnnnnnnnnnnnnnnnnnnnnnnnnnnnnnnnnnnnnnnnnnnnnnnnnnnnnnnnnnnnnnnnnnnnnnnnnnnnnnnnnnnnnnnnnnnnnnnnnnnnnnnnnnnnnnnnnnnnnnnnnnnnnnnnnnnnnnncggctcaggccccgcccccgcccccaggagccgggctccgccttcctgcagctgggcgtgtccctggagcagcagctgcaggtgctgttcaaggtgctggaagagtacgactggagcgccttcgccgtcatcaccagcctgcacccgggccacgcgctcttcctggagggcgtgcgcgccgtcgccgacgccagccacgtgagttggcggctgctggacgtggtcacgctggagctgggcccgggagggccgcgcgcgcgcacgcagcgcctgctgcgccagctcgacgcgcccgtgtttgtggcctactgctcgcgcgaggaggccgaggtgctcttcgccgaggcggcgcaggccggtctggtggggcccggccacgtgtggctggtgcccaacctggcgctgggcagcaccgatgcgccccccgccaccttccccgtgggcctcatcagcgtcgtcaccgagagctggcgcctcagcctgcgccagaaggtgcgcgacggcgtggccattctggccctgggcgcccacagctactggcgccagcatggaaccctgccagccccggccggggactgccgtgttcaccctgggcccgtcagccctgcccgggaggccttctacaggtgggcacctgcccggggcataggggtagggaggtggggagcgcttcgggggagctggctggcagtgagtttgggctggccagccacacctcccactagctgcgtgcctggggccacattaccccacctgtctgggccttagtgtcctcatctgaacaaacagcaggtgtcagggtgtggcaaggatcgtggggccaatatagggaagcactttgaacaataaacacaatcaatgccacctgctgtcggtggyggcggtgaggcagaggcagggggtgcctggtccttggcagggctgcaggcatctctcccctctggcaggcacctactgaatgtcacctgggagggccgagacttctccttcagccctggtgggtacctggtccagcccaccatggtggtgatcgccctcaaccggcaccgcctctgggagatggtgagaagggggtgagcccaggggccctcagtgtcctcttattttgtccccgcctcctcttgtgcccacagctgagcagagagtccctctgtcccttatccaacccctcatcttccaggtctcagctgaaacaaacatctcctccactgggaagcctccaggtgcccmggggtgggtgaggtgccctgctctgggctcccataacaccccggcttccctctactatagaacatttcaagcgctcctatctcctggtcctgcccctgcaggagtaacccatgaccatgctggccagacaggcttgtaaacaatatgcagggacaagtgcttgagtagacgtgtgcaaaagattgtgggattggagatgaggaacaggaattagttctgccttcaaaggaggaaactgggaaagaggtcccagaagatgggatatttgagctgggctgtggaggtttgagtaggagcccaccaggaagaggtgctagcctggaagagacagaggggcagaagggtttggagcatgaagggccttgagtgctcagctaaggacgttctgtcaaagtcaggggggaccagtacagtgagtgagacagggtcaggtctgggctttaggaagatgctgtgggtcagtgtggagctgtatgaacacagggacccgaggctgggggaggctgttgggagcagccctactctgacctgccccagcatccctaggtgagagagggagattcttggccctggcaggctccacctagagggtgggggctgtagggctggaggccccaggctgaggctgtcaccctccacaggtggggcgctgggagcatggcgtcctatacatgaagtaccccgtgtggcctcgctacagtgcctctctgcagcctgtggtggacagtcggcacctgacggtggccacgctggaagagcggccctttgtcatcgtggagagccctgaccctggcacaggaggctgtgtccccaacaccgtgccctgccgcagrcagagcaaccacaccttcaggtctgtggagggccctgggaggctagtgtgagctgggtgctgccgtgtgatggtcaggtgtcgtgtatgtcccatgcttgggtgtggggcaggggtccacgtgccaggctggaggagtggctggggyggggctgggccacgacatactctgactcccggtggtctcatggcggcatggctgcagcagcggggacgtggccccctacaccaagctctgctgtaagggattctgcatcgacatcctcaagaagctggccagagtggtcaaattctcctacgacctgtacctggtgaccaacggcaagcatggcaagcgggtgcgcggcgtatggaacggcatgattggggaggtaggccccaccccactccctcctcacctgccctgcctgcccacctgctgcccaggccccatgtggctctcagatgccctctagaggggggcatgggctgtcaccaatgatgactcctggggtggtcagtactgaaagctgagctctgagggccccagagggaatgattgactcagctggtgggtgctagaaggggtgtctggaggtgcctgtgcagcgtgtccaccccacgggagcccctttttcaaacctccgtggcgtccggcccccaggtgtactacaagcgggcagacatggccatcggctccctcaccatcaatgaggaacgctccgagatcgtagacttctctgtaccctttgtggagacgggcatcagtgtgatggtggctcgcagcaatggcaccgtctccccctcggccttcttgggtgaggcccagggtgggcagagacggctccgggggcagaggggcccacgaggagggtgtgtacagcttgggtggggatggggagttgggtgggctctcacaggccaagcacagcagccttgggtcttggaggttggctggaggtgagtggaaaggagacaggagaagtgaagtcagtgttcggttctaggtatggctgccaggtgagggtggggttgggggtgtgggatgggtcgtggtgccactgtgagtggcaggaaaatccagcaggcaggctcgcctcaggatgggccatggcccaggactgtggaacgagtgggggaggcccgtggggagttgaggagcgagtgtagtgtgcgaagaggtgtgttgcttcctgggtgaggagtccggcattggttgggcagccaggtcccatgctgggtgctggggctacagcgtagtctttgccttcccaaagttccctgtcagaggccacgtgggacatgaagtgtgaggtggcagagagctgtgaagacaggcgaggggcaggggaagagctgaggctggccagacaggagtggaaaccccggctctgccctgtcctgctgtgtggcctcgggcaagtcacagaacctctctgagcaggctcctcagccacggaagagaggaaaaaaaaaaccacttcatagcatagcaagtgctcatggcaggattgatttccctccctccctccctctctccttcccactcttcctttcttctttccttcctttttttttttgagacagggtgttcctctgtcacccaggctggactgcagtggtgccatcttggctcactacagcctggaaactcctgggctcaagtgatcctcccacctcagcctcttgagtagctgggaccacaggtgcatgccgccacacctggctaatttttgtattttgtgtagagacaggttttcactatgttgcccaggctggtctccaaactcctggactcaagcagtccacctgcctcagccgcccaaaatgctgggattacaggtgtgagctactgcacctggccaatagtagtgatttcttttctttcctttttttttgagaatgagtcttgctctgtcatccaggctggagtgcagtggtgcrctctcagctcactgcaactgccgcctcctgggttcaactgattctcttgcctcaggctcctgagtagctgggactacaggcatgtgtcaccatgcctggctaatttttgtatttttagtagagacagggtttcgccatgttggccaggctggtctcgaacgatccgcccgtctcgtcctcccaaagtgctgggattacaggcgagagccaccaagcccagccagcagtagtgatttcttactctaggagacagaaacagtcttgtctgaggcctggggtggatgtctccagttccctgggtgtgggtttccatgttggtaggatgaggagtaagacttggcctcaggggctctgattccaggcagaaccaccagatcatccacgtggggccaggcaggggttgtgaagtcaaaggaacgtttcttggggtgggtgacttgtacctgtcccagggaagtggggggcggggggagaccaaggatgctggagagcctgacctcttttgggggcctctcctggggctctgctgctctgagtcagaggcccccttggctgggtccgcagagctggtgggcccctactttgatcacgtggrcctacctgtctccacccagtgcttctgggcctrgggcagggaacatgccgaggcctctgagctgcctccctctgtccccagagccatatagccctgcagtgtgggtgatgatgtttgtcatgtgcctcactgtggtggccatcaccgtcttcatgttcgagtacttcagccctgtcagctacaaccagaacctcaccagaggcaagagtaagccttgcctgggcccggcaggaggggtgggcctgggcaccctgagggctgggctcaggggcaaygggtccttcagagaatacctttgggaggtcccttgcttttggatggcacatgctgggggccagtcagatgacacacacacacasaaacacacacgtgagctcacttcacctggcgagggaatggccaggacgcgtcccccccaaggccaggctgagaccggagctgtgcagtcgggtgggctgagccctgagccctttcatggtgggcaggaggagctccagcatccccccgcctcttgcccccagagtccgggggcccagctttcactatcggcaagtccgtgtggctgctgtgggcgctggtcttcaacaactcagtgcccatcgagaacccgcggggcaccaccagcaagatcatggttctggtctgggccttctttgctgtcatcttcctcgccagctacacggccaacctggccgccttcatgatccaagagcaatacatcgacactgtgtcgggcctcagtgacaagaaggttgtggggccatagctgctgggggtgggggggggcactgagggtggggacaggccgtgagtgggcaggccctggacagtcgagtctggggaatttgacctggaggctggggcaggaagaagcttcagggcctgctgagaaggggttgggggctggggcaagagatggctcagggccaccggctgagaggccttgggtaagtctctccctgtcttgggcctcagagtctccatttggaaaacacaggagtggcctggacagcctttaagaccttctgctctgactatgcaagtccacactggggctgggctctggggtgggtttggggctttggtgcctggaaggctggaggaagggttgtgactggctgctgccctccgcctgcagtttcagcggcctcaagatcagtacccacctttccgcttcggcacggtgcccaacggcagcacggagcggaacatccgcagtaactaccgtgacatgcacacccacatggtcaagttcaaccagcgctcggtggaggacgcgctcaccagcctcaagatggggtgggtccccagccctgcacccgctgtcttcatccgtgtgtctccccagtgaccagccttagctctcaatgtggggacagtgggactgggctgtcctgcaggactcctgtggggtggagggaagaggtcttggggcagagtggagcttgaggcaaaaatggaaggccaccatgtgtctcagaacacagctgtggtgccaatcaaagttcagcctcagcctgaggtggtggttgggaccttctctgagtcttaggagcacggagagggtgggcagaaagggtggtgtgtcttctgggaacagayagtcccctggccactctgcrgaggagggtgggaggggtcctcaccccatccaggacccaagagaaccagacaagtctctgcccattggtccctcccgggggtgcccagcaggctcatgtggtttagacccctgtcacgccccagtttcggtgtcccctcccctcccatatggtccctagctctgaggctcagcctgtccccaggaagctggatgccttcatctatgatgctgctgtcctcaactacatggcaggcaaggacgagggctgcaagctggtcaccattgggtctggcaaggtctttgctaccactggctacggcatcgccatgcagaaggactcccactggaagcgggccatagacctggygctcttgcagttcctgggggacggtgggtactgccattgctgggatgcccagggtgggctgtggagcccaaggttgtcagcatttccaccaccactcaagttcccaaggcctgtgagcagggagaggtctctggggggtgagaggttggggcagctgaggtgggcaggtactaggagcaactggagagagacttgaggaagggataggtgtgcagggcgggagcaggaactgggctagagagtccctgaagggcaggaagacaggaaggggctcaggcctcatggtgggggtggggatgggtggagtggctgaactcctttcttcttccctaagacccctcccaagatctctcccagatgagcacctcctttgctcagtatagtatctccatggccatcttgagattacggatctgcccagtcccacatgtgtgagtggtccagcccagcctgcccccaaacccagagagagctttgtgtttggaggagttccattcttgttagataagacatggtctagactgggtgtggtggctcatggctataaccccagcactttgggaggctgaggtgggaggatcacttgaagtcaagagtttgagaccagcctgggcaacacagcaagatcctgtctctataaataaagtttttaaaaaattagccaggcatggtggcacacacctataatcccagctacttgggaggctgaggcaggaggatcccttgagtccaggagtttgaggctgcagtgagccatgattgtgccactgcactccagcctgggtgacagagtgagaccctgtctcaaaaaaaaaaaaaaaaaaaatctgatttctcaaaccatataataatgagagcggccaggtgaggtggctcatacctgtaatcccagcactttgggaggccaaggtgtgaggattgcttaagtctaggagatcgggatcagcttggacaacatggggataccctatctctacaaaagatacaaaaattagccaggtgtggtggtgtgcctgtagtcccagctactcagggggctgaggtggaaggatcgcttgaacctaggagatccaggctgcagtgagccatgatcacaccactgcaccccagcctgggtgacagagcacgactgtctcaatataataataataacaataataataataagagcaatcacaatgtgtgtctcttaggagcctaggccttttgtctctgtgtgcccagctccgtgagtggcatgtagatggttaataagtatatgaagaggagtgaatgaatgaatgctaacatttacccaatcacaagcctttactgggggtgcacagggggaggacccaaaggccagcattgcccactccagcctccaccctgctttcctatttccttgctcactgaccctccactccccgccccaccatcctgctccagccaggctggatccccatgtggtctgcttgaggaagaagtgggtggcaccctgccccagatcccttcttactccaggtttgtggtgagctttgtgagggggttgcttataggggggtttcctgagccagatgtgtacaccccccaactccaggagagacacagaaactggagacagtgtggctctcagggatctgccagaatgagaagaacgaggtgatgagcagcaagctggacatcgacaacatggcaggcgtcttctacatgctgctggtggccatggggctggccctgctggtcttcgcctgggagcacctggtctactggaagctgcgccactcggtgcccaactcatcccagctggacttcctgctggctttcagcagggtgggtgcccacccctccccacacaggccaaagttttaagggcacctacccagataagtccgggctggccatggcccatttccagaggtaaaaccaaggttctggcccggctcatggctcacacctgtaatctcaacactttgagaggcttaggccagtggatcccttgagtccagaagtttgagaccagcctgggcaacatggcgaaaacccatctctacagaaaataaaagaattagctgggcgtggtggtgcgcgcctgcagtcccagctactcaggaggctgaattgggaggatcgcttgagccaagaaggcagaggttgcagtgagccgagatggcaccactgcactccagcctgggcagcagagtgagatcctgtttctaaaaaaaaaaaaaaaagcyaacgtcctgagaagtggcatggctcaccagggtggcagggttgaagagggtcagagtcccccccacaggtgtgcccaggttggaaccttcatgtgccaggtgctagctagagtgattaggagaatgagtcaacctgggcgctcagacsactcattcatctgcaaagcacagtgcctggygcatgggagatgcttcacagttagctacttcctgagacttatagaagactgatgatgccttgggaccaggcagggacaatcgtggcgggtccctgagcggagggcgctgcttacggcctgtcgtctccctactgcccagggcatctacagctgcttcagcggggtgcagagcctcgccagcccaccgcggcaggccagcccggacctcacggccagctcggcccaggccagcgtgctcaagatgctgcaggcagcccgcgacatggtgaccacggcgggcgtaagcagctccctggaccgcgccactcgcaccatcgagaattggggtggcggccgccgtgcgcccccaccgtccccctgcccgaccccgcggtctggccccagcccatgcctgcccacccccgacccgcccccagagccgagccccacgggctggggaccgccagacgggggtcgcgcggcgcttgtgcgcagggctccgcagcccccgggccgccccccgacgccggggccgcccctgtccgacgtctcccgagtgtcgcgccgcccagcctgggaggcgcggtggccggtgcggaccgggcactgcgggaggcacctctcggcctccgagcggcccctgtcgcccgcgcgctgtcactacagctcctttcctcgagccgaccgatccggccgccccttcctcccgctcttcccggagctggaggacctgccgctgctcggtccggagcagctggcccggctgggaggccctgctgcacgcggcctgggcccggggctcgcgcccgcgtcacgcttccctgcccagctccgtggccgaggccttcgctcggcccagctcgctgcccgctgggtgcaccggccccgcctgcgcccgccccgacggccactcggcctgcaggcgcttggcgcaggcgcagtcgatgtgcttgccgatctaccgggaggcctgccaggagggcgagcaggcaggggcccccgcctggcagcacagacagcacgtctgcctgcacgcccacgcccacctgccattttgctggggggctgtctgtcctcaccttccaccctgtgccagccacggctcctggctctcyggggcctgggggcctctggggcacaggggcaggactctggggctgggcacaggctacagagacagtgggggactggacgagatcagcagkgtagcccgtgggacgcaaggcttcccgggaccctgcacctggagacggatctccagtctggagtcagaagtgtgagttatcagccactcaggctccgagccagctggattctctgcctgccactgtcagggttaagcggcaggcaggattgggcttttctggcttctrccatgaaatcctggccatgggaccccagtgacagatgatgtcttccatggtcatcagtgacctcagtagcctcaaatcatggtgagggctgggcttttgctgtcctcttctcacgcagagttctgccaggagggtgtgctgtgggggtcagactcctgaggctctcccttccctggggctagccagttactggtcatgsctgctgtgggcatggaggctggaacttgtggttgaggcagggccatcccgatccttgctctacctggctagagtttcttctcatcagagcactgggacattaaaccaaccttttacaacacactggtcctggctgcttcattctgcattctggaaggggcacagcacaggccatagacaacagggcatcatgagagtatcccaggtgggatgtttgcctaaagcaggtaggcaggtccctcttggggaggcggagccttgggagtgtctgggagggatgtgggaaggaggtgaggctgagagggggctctgggcagcagaagccacttggtattcagggccagctcccacccatcctggcactggatgtaacacgtgtgctcagcacgggggctctggtgatgatggatggcgttcatccctcagtctccttgaaaagggaggcttgtgtcaggggtagtggctgtcctgtcctgccctgccagggacgccctggggagcctgacagtgccatggtggcagaggcagaggcagagaaaggtgtggagcttgtaggcttgctaaaccctggctggccgcattctctccgtggctgacacacgaggctcggaactgcctgggctctggaatcctggggcaggtggctgccagggtcaggcacagcttggcctcgctggtgccaggactcctgtggtgggagaatctgcctgcggtctcatcctcttctccctctggggcttctagcccacttcctttttctatcacacatctttgcctctggcccatctgaaaagatggcttgtgcttaccattttcaatgttttcacatctgcaatcacacttatcccccctacaatgactgtggagcaagcaggcattccttctatccgttccacaaacagtgagcactattgattctgtcagacccttttctaacggctgaagatgtaaaggccaagccctggctgtcctgacaagttgggtggaggcaggccagaggctaattccacgtgacagagaggaagctgcgaggggcggtgctggctgtctctgccagtgccctcccccgtagctccttgctggttcccaggaagccaggctgcctctttagtctctgaagaccccactgtttgggttggggccatgagaactggactttttttgggttagttttaggggtgaaggcagctgaaacggtagggggagatacacctccattcttggtaggagagtaccccaagagtgggtggccctgtccacacaatttcacgctctctaccctatgggtttttatgggctggatccaggttcaggacagcaggctgggagtgtgtctaggtgagtgctggaggccagcactctggaagggagcttgaccttggttgcagccactagtagtgagagggttaactgttggccaccagcccctggaaccgagcccctcctcctcccagagtcagggtctgcctttggccctgggaggaaggctgtggcaggtgaggcatcctggaggagctgtgaggacagggctgctctgctctctgcccaagatcattaataaccaagaactggaaagatcattaagagctgagcctccaatgtgaagccgagcctgctgctggctctgaggagggccgctcctgctcctgggccaggcactggctgccttgttccttctctaggcatatatttgtggcggggtgggggggggggggcaggagatatgagtctgggggacagggtagcaggaaggctgcatcctgagttcagaactagcttggcctggcttcctgcaccaccaagggaaggaaagaaagcgtggcaggggagaggagagagaagtaaggctatagatgtgaaagcatcataaacaagggcctggcgacccacatgctcaaataccattgtttttctttgggtgaggtacagaaagagggaggcccttgtggctggcctcagagcaggaaaatcttactaactggggtcccttctgttgctgctgtagctgtttttccttgtgtctagctgagcggcttgtggtccaagccagctttctgcagggagccaggtgtgtgtgggggaggagggcagagcttgcaaaagggcaggctgatgtcttcagccaggaccctccagcctagcctgtcctgctctttgaaaggggaggactgtcctcaagtttcctaagggactggggaaccagagtcaacccctatccccaaagccctctagactccagagaattcagaccaattttctgtttctgaattgcaacccggcgacaactcattagaaggctatgaaaccaggtaggtgtcttgagtcctaatgagtcaggggtccctggctacaagtagttatggctggtgagtgatgtgggaaacaggtatcactgaatagctttattgagcattttgggctgggcactaagctcagcactttaatccccacaactggccagtgacatagctgttaccccactttacaaatgagggaggacaggtcacggaggctcgctgcctcaaatggcaggcccggctgcctggtcccaatgcagaaagtacccaatgccatgcctggcacataatgaccctcagcggaggttacccctccagtctgcaatcaacaccattggccccaggtggaagggatcccaagctctctccagctttccagtggcccttaaccatgggtcacccttgcttgggaatctgcccccagacaggacgcttccacttcccccaggcctggcactgccagccactgcccctctgcagtggctttccaggagcggggcagcagcccctgtcctccccaccactctgactctggcctttgcctgttgccgaggctgctccctgccccgtagtgaggacagctgtgtggctaggggcccgtcatggtgccactgcccacctccaccacccagcagtgcttcccagtctatcacctgccatccgccccatctataagctggcagctgctgctctagcctcaggtgaggaacagccaggagctgctggcatgaggctctggggctcaggtgggtctggtgcttctgtggggagggaggcaaagaaagtttactcccaccttgacctggcctgcaccgggggcatctggggccatgcaggtggcagatgttgggtagaggctgttgagtttaagctttcctccacaacgacacctgctcctgggccaggctgggctggcatcctcttctgctcttcccatcactgaccccgggggcccatctgcaaaatggaaaccacaagctgagcttgcctactttgccaagttgatgatggctgcagtgaaacgtgccggatgcacgtggagagccagcatcacctggggctctcttgctgttggggttctctgcccctggccccaagccccattggccgtcagcggcagaagcctggcatcgatggagaggaaggtgacctcatctgacttacagcaggaggacactgaggagcaaagcagctagacaacggcagtggtgagggtccccacttggcatcagcgatgtggtcactgctggccagttccctccagggcagggaacacggccaccgactccatggctgggcggttccagactgtcacataaatcaacctgggctttatgaagctaatgaatttgcgtccaagatttggtttggagcctcgggtggcaggatgatttaattagctttgtctttaagcaagagggaacgtaattggagaagggtagttccagatgttttgagttttcagccacagtggggcagccaggtcttccttgctcttggcctgaccactgcaggcccctgctctacccaacctgagaggcctcctgggaggaagtcgcaatgatagatggagaaggggcatttgtttttcccgtggatggaaagtgacacgtggggacaagctatgagaaacactgaggtgcgacggcacagagaaagcgggctgaggccaattacaccacgcagggactctcccaggcttcagctgccagggcagaggtggcgcagcccgtgggctccccgagttccctgcaaatcccacccctgaccctgagaccaccttgggccccgggagaccctacatcgtcgctctgtcagaggtctgaagacgctgagatacaggggaggggctgagcaaggcactgaactcaaaagagggaggggtggggcctgagacccaccccagagaggcagctccaggccaggggctctgggctccaggacaggtggggccaggcccagggctgggggcaagccagtgagggtcagggggacccccaggtcctgaagcagtagaaggcacgttgaaaatgcagagttcattcgagtcacctgtgtttcccaggaggccagcccagcaagtgcgtgcatggctgagtgggaggtggctggggacctggcctccttccatgggaatggaagtgggggccccatccaaccccacattgcccaagggatatagcgtgaacactgagcacccacgctcagcccctaagggagccgcttttagtgttggagtgggagcacgggcagcctgaccattgtcagggtgggaacctcagagccctcccactgccatgtcactgccaagccgctgaggtgccaggtggggatggcttccctctagtaggaccacctgcactgtaggaggccctgagggctccagtggggcagcgagggcagcagacggtccctttcagagacaagctccagactttaggcccagctggcaggcggctgtgtccctgtagaagggatgctccatccagcctgctactccggagctcgcgcccacagcgagggccctcgcagctctatctggggactctggtaccagttagcacttcttgttcttgtcatggggccagccaggccctctctgaggtggcacctaccgcctcccaggcctggtgggagggtgggccctgccgtcacaggcagacctggctaggatacttccagcctgggattcgcctctgaagaggcagcagctgctagtggaggtttcttagacaaggacgcaggatggggcaggagaggggaggggcatgggtctgggacaaatgatggcagtgccagcactgcatctcccattgtgcagggagtagcccgccctggaagtagggttgggggtgaagcgtgttggaagatgtgggagaggtgtgattccagtaatgagtcttagaacttgggagcagccacgcgtcacccaggcagaaggacctggtgggagagctgcccgggggagtgaggacaggtgcagactgggtggaaggtgggtggggagaacaaccccagctggacagggggtttcccctagagccacagtcccacctgccccatgaagacctgggagcaactaaatctgggctctgcgggcgaggggtggggctggggcccctatgcctcctgtcactagacctgcctgtcctgccatcagagcttggtctcgctgaggatgatattggccgtgacgaaaatgaagcaggagaaagcccagagcagcacgaagcccacccagaaggtgtggcggaaaggggacctgtgcttgttgctgaccccacagccaaaggccagctgggtgtccctgcggcagtggtacaccaggaaggcggggatgacgtactggatgccggtgcccgcgtaggcccctgtgatgcccaccagggactccaggtcgtgggtgcagaaggccaccagcacaggcggcaccagggtgatggtgggaaacacgacgcggtccaccacccacgggtacgtgccgccctcgcggtggaagagtgtcttccagttgttgcgcagggtcacggcaatgatggggaagttggtgctgatggtgaagacggggaagaggcccaggaaaaagcgcacagcggccaggcccacgacgtcacagcgcgcgaagttgagggtgtacatgtccatgaggctgtcgccgcggaagcagaagatggcggtgaaggagaggaggccgtagaaggccaggatcagcacgtagtccaggaacaccagccttgtgaggtggcgcttggaggagacgggggtaatgagggatggcagagagtgctggcacatgaaggagtagacgcacaccccaaacaggtt

SEQ ID NO: 97928 - DNA, 18696 bp, Homo sapiens
ttaatagacacggggttttaccatgttgcccatgctggtcttgaactcctaacttcaggtgacccactcgtcttggcctcccaaagtgctgggattacagatgtgagccaccacacctggcctatttttatttttagtagagacgaggtgttgctatgttatccaggctgtgtcttttggttttattgcatttcttttttatatatgtatttctttttttcttttttctttttttttttttttgagagggagttttgctgttgttgcccaggctggagtgcaatggcacgatctcagctcatcacaacctcccgggttcaagcgattctcctgcctcagcctcctcagtggctggaattacaggcatgtgccaccacgcctggctaatttcgtacttttagtagagatggggtttctccatgttggtcaggctggtctcgaactcccaacctcagatgatctgcccacctcggcctcccaaagtgttgggattataggcgtgagccactgcacccagcctatatatgtctggtttttttttttgttttttttttttctgagacaagtctcactctgtcgcccaagctggagtgcagtggctcgatctccgctcactgcaagctccgcctcccgggttcacgccattctcctgcctcagcctcccgagtagctgggactacaggcacctgccaccacgcccggctaattttttaaatatttttagtagagacggggtttcactgtgttagccaggatggtctcgatcttctgaccttgtgatctgcccgcctcggcctcccaaagtgctgggattacaggcgtgagccaccacgcccggctttatatatgtatttctatatccaatttttatttatggcaactgatagcagtatttaactatttctgacaagaattattaggatcaaagtccacaagtttgaggattaagtcacagagctgggagttacagttcgaatcttggtcctgccacagccttggaaaaataaattttctgaacctcagcttttcctctgtaaaagtgagatgctgacttaaaccaacacctgttcaacccactgattatgaatgcaagggtcaaatgccaaaatttgaaagtagcaaacacacaaaaacaagtatcacaaacaaagatagttgttttaccacctggttttattaacttgccacaggcccctgaggtagcatcactcccttaatacttcagttttatgttatttattttttctctttttttttttttgtgtgacggagtctcactctgttgcccagactggaacgcagtggcgtgatctcggctcactgcaacctccacctcccgggttcaagtgattctcctgcctcagtctcccaagtagctgggattacaggcgtgcgccaccacgcccagctaatttttgttagacggggtttcaccatgttggccaggatggtcttgagctcttgaccttgtgatccacccacctcagcctcccaaagtgctgggatcacatgcgtgagccaccgcatccagccttattaattttttgagacggggcttgctctgtcacctaggctggagtgcagtgatgcagtcttggctcactgcagcctcaacctcccaagctcaagcaattcttccacctcagcctcctgaatagttggtagtacaggtgtgtaccatacccgattaatttttgtgtattttgtaattttgtgtattttgtagagacaggatttcaccatgtcgcctaggctggtctcgaactcctggactcaagcgatcctcccaccttggcctcccaaagtgttgtagttacaggtgtgagccactgcgccggccataaattacacttaaaaaaaataaaaagtattgaggccgggtgtggtggctcacgcctattatcccagcactttgggaggccaaggcaggtggatcacaaagagttcaagaccagcctggccaagatagtgaaatcccgtctctactaaaaatacaacaattagccggacgcagtgccagatgcctgtaatcccagctacttgggaggctgaggcaggagaatcgcttgaacccaggtggcagaggctgcagtgagccgagatcatgccactgtactccagcctaggcaatagagtgaaactctgtctcaaaaaaaaaaaaaaaaaaaaaaaaatattggccgggcgcagtggctcacacctataatcccagcactttgggaggccgaggtgggaggatcacttgaggtcaggagtttgagaccagcttggccaacatggtgaaaccccatctctactaaaaatacaaaaactagctgggcatcatggcatatgcctgtaatcccagctacccaggaggctgaggcaagagaatcacttgaacctgggaggcagaggttgcagtgagccgaaatcgtgccactgcactccagcctgggtgtcagagtgagactctgtctcaacaacaacaacaacaacaaaaatacaatttaccataacctagctaagtaccagctgtgtacactaacttacttcttttcatagaattctgtttcagggttactgaagtacaacataaccagaatctatgattccatatagatttccagaccagaaaatgctttatccttccaagccacctccagtaacttacaatgctcatctggtaaacaggttgttttacaaaaaacttccctgtaacatcccaatagtcatgacactgtcaattgcctggttttgtatttttaatagggaacgagggccgggcacggtggctcacgtctgcaatcccagcactttgggaggctgaggcaggcggatcacctgaggtcaggagtttgaggccagcctgaccaacatgatgaaatctcatctctactaaaaaatacaaaaattagccgggcgtggtggcatgcgcctgtaatcccagctacttgggaggctgagacaggagaaacgcttgaacccaggaggcggtggttggggcgagtgccactgcactccagcctgggcaacaagagcgaaactctgtctcaaaaaaaaacttaaaaaaatcaaaacaaaaatgttacttatttatttatttttttgagctggagtctcactatgttgcccaggctggagtgcagtggtgcaatctctgcttgctgcaagctccacctcccgggttcacgctattctcctgcctcagcctcctgagtagctgggactacagatgcctgccaccacgcccagctattttttttttttttttttttttgagacggagtcttgttctgtcgcccaggctggagtgcagtggcgcaatctcggctcactgcaagctccgcctcccaggttcatgccattctcctgcctcagcctcctgagtagctgggactataggtgcccgccaccacgccccggtaattttttgtatttttagtagagacggggtttcaccatgttagccaggatggtctcgatctcctgacctcgtgatccacctgactgggcctcccaaagtgctgggattacaggcgtgagccaccgcgcccggccaatttttttgaatttttagtagagatggggtttcaccgtgttagctaggatggtctccatctcctgacgtcgtgatccacctgcctcggcctcccaaagtgctgggattacaggcttgagccaccgggcccatccacttattttactttttgagacagtctcactctgttgtccaagatggagtgcagtggcacgatcgtggctcactgcagcgttgaactcccaggctcaggtgatcctcccatctcagccttcctgaatagctgggactacagacatggtccaacatgtctggctaatttttctatgtatacatattttcaattctcattcaacacctttggtaaatttttgtactttttgtagagacggggttttgccatattgcccaggctggtgttgaactcctaagctcaaatgatttgcctgctttacccttccaaatattttagtttttgagaaagctctcactattttacctaaactggtcttgaactcctgatctcaagcaatcctcctacctcagccttccaaagagctgggaatggcaaaaatgttacttatcaaaatgaaaggccaggtgtggtggttcactcctataatcccagcactttggaaatgcgaggcaggcggatcacctgaggtcaggagttcaagaccagcctggccaatatggtgaaaccccatctctattaaaaatacaacaatttgccaggcatgttggcacaggcctgtaatcccagctactgaggaggctgaggcaggagaatcacttgaacctgggaggcagaggttgcagtgagccgagattgcaccactgcactccagcaggcaaaacagagcaagaccctgtctcaaaaaaaaaaaaaaaaaaaacgagagagaataggtcatagaataaaaacatttcagctcaaattttatttagttaattactattattattcttttttgtagcatcggagtcttgctatgtcactctagctggcctcaaactcctggcctcaagcgattctcttgcctcagtttgcaaactgctgggattacagacatcaccatgccaggccacaacccaaacttgaaaaagaaaatctaagtggccttagaagagtttgcaagtcagctgaccaatgtggtacctccttaaggagggcctctgaggcccgatgaaaaaggcttatataaaaggctcatgaccagctctgccagtgatgaacatgtgtcaagtcgttctgctgtccccaactcccggacccaggtggctctgaattagcttcagctaataaagaacaaagacggggggcagaaaggctccccaaacttgtgcaaatccagtgagaaaacactttgcacatcatctgtctcagctgttctgcaggtgaggcacactcagaactgcaccaccccaggcaagcagtttgccaggactcgggggcctcagggtttcatctcggggcctccgcctgcaccagcgagtgggcctggctcagggcgagcctgtccttcttctccttctgcaagacctgctcctcccacagcgcctggtccacctgatcgtcggtgagcacgacaggcttgtacttctcatcgaagagccgctcgttggtctcggaatgcagctgctggggcccgaccacccgcaaatgcgccggcaggtgcaggaattcgtcgtcgttgatgtcgcagtcgcgcatccaggcccccagcacccaccagcgacccacgaagcccacgtccaggacccggccggggaagtcggtccagcggggctgcaggtagcggcaacgcgcctggtagaggctggcctgggcgtcgaagggcgcctcgtacaccagcgagcagagccccaggttgacgtagcgcaggcggccacggccccgcagccagagcagcctctgcacgaaggcttcggactcgcggttgcgggtggccggcgccagcagcaggagggtccccgacgcctccagcagcgcctcctcgaaggcaccctcgctgggcgccagcgtgaagcaggccgccgcgccgcccagcagacccacatacacagcggcgcgccccggccgggccctagcctccgccgaagcgtccctgcaggcctcggcgtagtcccggagcagcgcgcgggcccaggaccctgaggggagaggagcgcggtaagagtgatccggccgcggcggccacccaccctgtcgcggcggccacccaccctgccgccttccgccgctactcacccagccgcgcccacactcccggcttcgccactaccgcgtcgcccgcctctgcgcggcgccgggaccaaaatctcctcagagccgccgcggccatcctcttccgtcttgggggtccttgctccgggaagaaactcctgatacccgacgttaagagcccgggagtctcttctgcgcaagcgccaactttaccggaagtggcttcccaacgggagaggatagaaagaggacaggcgccggatgttgctgtcaggtctgagtcggttggagtctgacgggtaggcgagacgcgcaggcgcagagagccccagccacgccggcccaggtggcctcaggtgagggggggcggagcgcacctgtggggacgggacgacgagttcaagcctccgtgggtgcagttggtcgccaggtagggctgggggccgagggaccggctcgggggcgggggggaagtgtgcctgaccggtctctgtcctcagcgagggatgcggagacgcccctgaacgaccatggcatcggccgacgagctgaccttccatggtgagtgcggccccgacgtggccggatctcccactcccgccccgggccagaacctccccccgatacggcttccaatttctctaccccgaagcctaggcggctgtgaaccctgacccaggagtgagacccatctctgactcgaaccccgcccccgccctgaactcagacctcaaacccgagcctctcgtccccagaccctgaccccatcccagsgtcaaccctaagttgcagttccactttaggaggaagggaacagatgtcctccggatgcctccaaactgaggaagttgggccccaccttgggggagatcaatggctcagcagagcctccgcccccagatgagcatcggtttagcttgggcccagtcgagttctttccacccctcaaacgtgcgtgtgtcccatatacctcctccacagaattcgaggaggccactaatcttctggctgacaccccagatgcagccaccaccagcagaagcgatcagctgaccccacaagggcacgtggctgtggccgtgggctcaggtggcagctatggagccgaggatgaggtggaggaggagagtgacaaggccgcggtgagtccctgtgtcctgcctccttgcagcccccagctgacccaggctctccgggcaggcactgaatgcccgcaatgtgcagctcctgcaggagcagcagcagcagcagcagccgggattctggaccttcagctactatcagagcttctttgacgtggacacctcacaggtcaggctggggaggcaggtgggatggggctcagagttatgctcagggttcagccactcttcccctgggcagggtgctggtgatggtgggtgctggtgaacgaactgtggtgctctcaaagggttatggtgggactggttatggatcgggactatgggaacacaggggacacacacaatctggtgggttagagaaaggcctcctgggggaggtgaggaattggctgagacctaaaggagacagaaggcttccctggggaatagggtagggaagcaggagtatatgttccaggcacagggaacagcatatgcagaagaccaaagatggactgggcgcagtggctcctgcctgtaatcccagcacttaagggggccgaggtgggcagataacctgaggagttcaagaccagcctggctaacatggggaaaccccgtctctaccaaaaatacaaaaactgccgggtgcggggtggctcatgcctgtaatcccagcactttgagaggcctgggtgggtggatcacctgaggtcaggagtttgagaccagcctggccaaacatggtgaaaccccgtctctactaaaaatacaacaaaattagccgggctttgtggtgggcgcctgtaatcccagctactctggaggctgaggcaggagaatcgcttgaatccgccaggcggaggttgcagtgagccaagatcgtgccagtgcactccagcctgggcaaaaagaatgagactctgtctcaaaaataaaataagataaataaaataaaattaaataaaaaataaaataaaatagaaaaattagccaagtgcagtggtcggcgcctgtaatcctagcactttgggatgccgaggcggtggatcacttgaggtcaggagttggagaccagcctggccaacgcggtgaaaccccatctctactaaaaatacaaaaattagccaggcatggtggcacacacctgtagtcccagctactcaggagtctgaggctcgagaatcacttgaacctgggaggcggaggtggtagtgagccaagatcgtgccactgcactccagcctgaacagagtgagactctgtctcaaaaagaaaaagggggtgctgaggccgggtgcggtggctcacgcctgtaatcccagcactttgggaggccaaggtgggaggatcatgaggtcaggagatcgagaccatcctggctaacacggtgaaaccccatctctactaaaaatacaaaaaattagccgggggtggtggtgggcgcctgtagtccctgctctttgggaggctgaggcaggagaatggtgtgaacccaggaggcggagcttgcagtgagccgagatggcaccactgcactccagcctgggtgacagagcgagactccgtctcaaaacaaaaaaaaaaagagggaaaaaaaagagggggctgggaacggtggctcacgcctgtaatcccagtactttgggaggccgaggtgggtggattacctgaggtcaggagttcgagaccagcctggccaacatggtgaaatcccgtctctattaaaaatacaactattagccaggcgtggtggcacacgcctgtaatcccagctactcgggtggctgaggtaggagaattgcttgagctcgggaggcagaggttgcagtgagccgagatcatgccactactccatccagcctggccgacagagcaagactctgtctcaaaaaaaaaaaaaaaaaaaaagagagggaaaggctgagttctttcaggtggggcatggaaagagaagggtggaggtcagcagggaaggagcctctcaggacaagggagaagctcctggcagacttccatccttgaccttggccttgcccccaggtcctggaccggatcaaaggctcactgctgycccggcctggccacaactttgtgcggcaccatctgcggaatcggccggatctgtatggtgagtgaggttgtgcatttggytccttgatggatcactcaacaagtgtggcctgagttgcagatgccagtgtatagctgcggacaaatcagtcactcagacagtgtgacttacctgctgttcagggagacagagacatgaaggactgcagagggtggcgggtagagagcagcagagcagacaggaggagtggccctgcagttctgcagggtgcagcagggcaggcctccctgaggagggtgagggaatgagccttgttggcaacaggaggggtgggggagacctaggaaaagaggcttccagaaacgacgtaagcttcatggcaggaacttgcatgaactgcagggcggcattaccactggagcgagtgagctgcagggaggtcacaggcgaggggacagatcacacaagcctcccatgctgtggcaagaagagatcttttttttttttttttgagacagagtctcactctgtcacccaggctggagtgcagtgatgtgatctcagctcactgcaatcttcccctcccgcattcaagcgattctcctgcttcagcctcctgagtggctgggattacaggcacgtgccaccatgcccggctgatttttatatttttattagggacggagtttcaccgtgttagccaggctggtctcaaactcctgacctcaggtgatccacccgcctcggcctcctaagtgctggaattacaggtgtgagtcactgttatctggccgagaatggatctttaagtgttytcggggtccctctcgccatcatgagtggcgagggcggaagccaggaggctggggtggaggcggccacatggtggggactgtggatgtggagagtggcactggattctggaacgtgctggggaagtagaagagactggctttgtggctagataggtgggggtggggggagtgggaggttaggagcggaggcaggctctagggatttctgcctggactaacgggatggatagagttgccacgtatccacgggaccagcttggcagtgagggcagagggcaagggtgtggatgaagccggagatgcccacccgggagcttgaactggagcctgcagtgctcagggcagagccctgggctctagaggaggcataaggccctgggcttgaaggaggtcatactatgggtgaacgcagacatggaaggggccaagaactgggcctggctgctccccatggctgaaggggtcagagagtcaaagaggaggtgacaggggttgaggaattggcaccaatgaggtgagacacaggccaagggtktgcagtcctgagtgtttcggggagggggatgaactgacagccagcactgggctcagccaccaggaggcccccggtgtcctggtgagtcaggcaaggtgcttaggaagaggctggggtctcagcacagctcagtcaggatacatgtctgcttgtcctgggagtgcagggcccgggaccctgactgtgccccctacccccaggccccttctggatctgtgccacrttggccttygtcctggccgtcactggcaacctgacgctggtgctggcccagaggagggacccctccatccactacagcccccagttccacaagggtaagcagacgggcaggcccaatgcctggcagggccctggggtacagggggtgactgctcaccttgccccccccagtgaccgtggcaggcatcagcatctactgctatgcgtggctggtgcccctggccctgtggggcttcctgcggtggcgcaagggtgtccaggagcgcatggggccctacaccttcctggagactgtgtgcatctacggctactccctctttgtcttcatccccatggtggtgagtgtggcctggcgcggagtgggtggtggctgtgtggggacactggcatggtcacctgccgcctcattcccatggtggtgagggtggcctggtgcrgagtgggtggtggctggggggactggcatggtcacctgccgccgtgttgctcccaggtcctgtggctcatccctgtgccttggctgcagtggctctttggggcgctggccctgggcctgtcagccgccgggctggtattcaccctctggcccgtggtccgtgaggacaccaggctggtggccacagtgctgctgtccgtggtcgtgctgctccacgccctcctggccatgggctgtaaggtacgggtctggggtggccacaggtggggccgaggggctaggggggcatgggctggccctgcctctgaccccaggggtcttgtgcagttgtacttcttccagtcgctgcctccggagaacgtggctcctccaccccaaatcacatctctgccctcaaacatcgcgctgtcccctaccttgccgcagtccctggccccctcctaggaaggcccgggtcccacaggtaaggactattcccagctgggctaagggggctgccctcccactcccagtcaaggcgagaggttctggggccactcccagacaattctttctttcaggcaacacctaagtggaccaacccctctgcctgtcctgccccccagacgatgactgaaggctcctttgacaccttgagatgattctgctactttccagacttttcttacaaagcaaacacttttattttctatgcaaaggtgattcagagaatttatataaaggcgggcgaggggcagccgagcagggagctttgggacagggctggggcccccatatcccccccgggccacctgctttccctcctatggctcccctggaacaggagggagagccaagggggcggcccagcctggacagcgcccgctcctgcctgggtgcacacacggcgggcctgagctccagcatctgagtttgggggtatgagaaacaggggagcagaaggagaagaaaactgcctgtgctgcaacacgtttcctcatttattttttctttctttttctttttttctttttttggagggagaggtccctgcaaggtcccttcccgggcaggggagggatggaaatgccgtcacagtagtagggactggagcgtctacaaggatggaggggagctactcaggcctaacgttagctacaaggaaaaaggacgccttccgtgacagatccttgaggtgtctgtgtctgccccaagtggccggcagtggccttccctccgggcccaaggcctgcagccacctgctctaactcttgagtgggggggcggggggggacctgcaggggctcggggacaggacagcagcaagaggcaggggccgaggacggaggccttcccgacagtggggtgggttgtacattcaagtgtgaggtgaaccctttggtggggagggggcccctgaagcctcggcggggccacccctccccgcggcgcctctgagtctagggagaggggctgctggctcggcccggccggcctggcttcacagagggtctgcggattgacactggttcttttcataaaaaaataaaattaaaaaaagcagcatgtcacgtccgttgtgaccgaggcctggtcgtcgaaggggaggccccgcctggccaggctaccttcccactggagacaggcagggggacaggtgctaagggacctggcaggcagggctggcaggccccatggcgcctgttccagcagatgacaagcccaggtcagggtagagcgggcaggaggggggacgagggctcccacaacatgattttgtgtaaaatatggcagcgacacacgctcagggccgggaggtgggggttagggtggggacggcggcaacatcgtgtaaaaaagtgtcccagttcccatagcaaagagagctgtgaccgggtgttcgagcttctccagtacaagggggaaagccgcccggcgggggcggcgggcagggacatcatttggtttcctggtgctgtcagtccgcggggcgggcccctagctcccgtagtgcatggtgttggtcgggatggacatgggcgacgccatggagatggcggggccgcccatggtgaactggctgttgactgcatagtgggcactcgtgctgccaccaccactgccctgggcgccggaggaccctgtggagcaggcaatggcagtgaggggctgccctggcccgcccagcccccaggcagagtcacagagagagagaaagggcaggcaagagggcaggcgggcggccggacagaggatggcgactcacacgctagctcggcccccacgggccctgcccccgccaccctcgttaccttggacaatccccgtgctcattatggagcccatccgggagtgggtgtgattgacaatccccgtgttggctgcgcagcgagagggaggaaagaaggaagggagacggcgtcaccgcccccagccacccagcccatgcacagcagcaggctgcagagcgaggcagagaggacggagagcctcggccgagagcccccaggaagaggaaaaggtgaaaggaccaagcagaggccgaccctggtcaccacaggcccttcccggcccctgggcagtcctgggcatggctccctgctgcccctggccctgggggacactcacctaaaggaatcaggttgttgtggcccacgctggagccactggcaataacactgctcaagtcataggcggtcggcatccctgtgtccagagagggagacgtcagggctggaggcagaggggccaggcctgcggcgagggcggcctcccgggttggctgggcattggggtgggccctgctcacctgccacggccatcccgctgctgaggttgtaggtgctgcccgtgttccacatgttttccgagggagatgtgtagtgggagccgggtgggggtgagggcgttgtgcccgtgtatctatggcagagacagagccatgggcaggggcaagggggttgcagggccggggcgcccccctgtgcaggcaaggggcccctcctacctaaagaaggggtttttcagatccaggaggttactggacttggagccggtctggtccacctgggccacaatactgatgtcgtagctctgtctgcggacagggtgcaggccgtggcatgagctgctgggcagatggacccctgcccaccaccaccagccccagggagcagtcgcaccttttgttggcaataagcagacatgtccctgagagcgtgtcccctgccttggcgaacagtggtgactggaacaggcaccgcacctggtaccagtgggtcaggggctctgtcggggctgtggacagccacacggtcattctgtggagcagggacaggcacatacttgactgggccggcgccaccactggagccaccaccttgtatgccttgagtcctccccaagcacctgccccctctgccagggacccctgggaccctggagcagagacaggctggcccccaggcagtcccagacacaaacatgagcaggcatacatgtacacacgaggggcccgcaaccacgagatccctactcaccctgacatgtgccaagagacagacacagacccatgagggacagacactgggaacacaggacacacacacacatacacacacacacacacaccccacccacaacagtctcttgctccgagacaggctctcactcccattggaagggatggtggaacctggagccatgttccacccccccagccaggttgcagctgcaggaagccctgggagtggggaggaggcagcatgggctgctctgcggcactcacatggagccgatgaaagcaacgtcaaaccagaaagccaggccgtggaccagccctgaatgcagcatgtggaatttgaatgggatttctatcctggaaggcaaagggcagtggctgctggggaagccagacaggcgctgccgagagagaagagggggtgccaggtgcagaggcctggggcccccgcccaccatctgccctgggacggcaggatgccggcgggagccaggggtggccctgaccttcggcctgagccaggcctgggaggatggagtgtgggtgccagtacctgtgcaaatctccttctttggcttctaagaagttcaccgtgtacttgacagacttggccatcaggatccggatgtcaaatgtgtcctgggagagaccacaggtgtgacgtggcatctgacgccagggccagcatgggaggggagagccctgccccttcccccaggtctgcccacggcttctaggctgtgcagctaaaacgagcttgctcttcccagacacgccgtgaggaggggaccggcacaacgccaccgagggcaatcaggtgacagctctccaaatgacaagtgtttatccacataaaagatttggcactacaggagtttaacctccagatacatgaacacatcaacaaacttacatgtataattagattgtccgtggtagcgacacactggaaaccatctaattaaaccagtgatggctctcccatcaaagaccatgcggacgtgagaaagaatgaagaggctctttatgaacagatgaggaaagatctccaagctaaatcattaagcaagttaaccaaaaaagcaagttaaagaactaggtgctagctgggtgtggaattgtatgcctgtaactccagctactcaggaggctgaggcaggaggatcgcttaagcccgagagtgtgaatcaagcctgggaaacacagggagaccctgtctcttaaaaacaacaacaacactagtgctgctgtccactcccagcaatgtttatatccgactaacacacctgccatgaactatgtaaaccgaataaaatccaaagaaaagaataaaccagttgttggaagcactggtgaccaaccagagcggccaggattttggggatcaagctcctggaaaggagggaaatgccctttctggagggagccctttctggcctctaccttttccccatggggagggcagaaaacggccacctcgacctttcagcagcttccttgggtggggaaagcaaaatgggagctcagggttaccaaggcagctcggattcaaggggctgtgatgtcaaagcaaagggaaataagtgcaggagggcaaggtgggcggtgcacactcagtgcgcttgtgaaattggccaactcctgagctttgagcgaggcagggcatcagaggctaagacaccaagcagaaagccgctaataagaggctcaacgccaggtgcagtggcttatgcctataatcccagcactttgggaggccgaggcggacggatcacctgaggtcaggagttcaagaccagcctgagtaacacagtgaggccccatatctacaaaaaaataaattagccgggcatggtggcacactcctatagttccagctacttgggaagctgaggcaggaggatcacttgcgtctgggagatcgaggctgaagtaagccatgaagtgattgagccactgtactccagcctggggaacagagtgagatcctgtttcaaaaaacaataaaagctaacgggtggttcagcagcatattggtaatgaggctaaccactggacttgcattaacattaccaaaggctgtaccataaagcagcaccttctcaaactgtggcctcttccaaggcaccctcatcataatacaaaatttgcataataccaccaaaatatttcctgcttttttcactcattcactccccagtgatatcacaaaagactgaacacgctgggcatggtggctcacgcctgtaatcccagcactttgggaggccgaggcaggcggatcacctaaggtcaggagtttcagaccagcctggccaacatggcgaaaccccatctctactaaaattacaaaaaactagctgggagtggtggcaagcgcctgtactcccagctactcaggagtctgagaatcgcttgagcccggaaagtggaggttgcagtgagctgacatcatgccacagcactccagcctgggcaacagagcaagactccgtctcaaaaaaaaaaaaaaaaagaaaaagaaaatgagagaaaaaaatggatggaaaagacagaaaagagtataacaatcatctgagatatggtgaaaaggttcactgtacacgtaattggaatcccagaaggagaaagaatggggcagacgtagtgtttaaagagatagtatccaagatagtccaagagtctcccaaaacgaatgaaaaacatcaagagcagggggaaaacagaataaaatggaacctttttttctttttttttgagacggagtctcactctgtcgcccaggctggagtgcagtggtgcgatctcggctcactgcaagctctgcctcccgggttcacgccattctcctgcctcagcctcctgagtagctgggactacaggcgcccgccaccacgtctggctaattttttgtatttttagtagagatggggtttcaccgtgttggtctcaatctcctaacctcgtgatctgcccgccttggcctcccaaagtgctgggattacaggtgtgacccactgcacctagcttttttttccttttgatttttaaatcatggatctatgtatcaaaaatctcaagtaaaatcaatcaataaatcacatcagctcaccaaggataaattcatctagtaatggttcttttttatttttattatttatttattttaattttaaaaatagcgatggcgtctctgtgttgcccaggctgatcttgaactcctgagcctaaatgccccctctgccttagcctcacctaataatgttccacatgtattgcatgtgtgctgtgtgctaagtgtctacatgcattgacacttttggcccaaatctctgtgagagcgctgtgcagggcagaggagagggctcagagaggggctgtagcttcctgagggctgcacagctgcacagcaatggcaagtgatcactgcagcagtaccctggaggccctactcaccaccacaggctgccggaaatactcatccaccgcggcacctcggagggccgacaggtccactccatggaaagatggctggtacctgtggacaggccccacccccacagcaaggtcagggctgcagaagaggcaggtggggtagccctgccttctctcccagtcagccctcatctagcccaagtctttcagaaaaagaggagtgcaggctctctggggagctggggctgtccctgagaaggcaggctgtggggcccaggcgggacacccagggcacactcaccagaagttggccttggtgaactgctccatgtagagctgttcatccgtgaagggtgcaaggtggacgtcaccaatggtaggaaacatgtttcctgggagtggggcagggaggggtgctggcgtcaggtgacacatcccacactgcctggcagagcttccaaaggaccccaagacccccaaccctgggtgctcccagcctgtcatccattcgttcctgcactcctgtgacagtggcaccgagcgcctattctgatcagtgtttcatcaccaccacgggtacctgacctgcaccagctcacgaattccacctgagactgggaggctggtggctcatctttatgtcctattactagacctggcaggtgtgagggacctgccaaagactcacggggaagcaggcagtgcccgggatgtggccaggcgctgcctctcaggccctgccgtctgtgcatgtgtgcagccgggaaagcatagcaaagttgctctggacagagggagggtggtgggcc

SEQ ID NO: 97929 - DNA, 20468 bp, Homo sapiens
cgggagttcgagactagcctggccaacgtgaagaaaccctgtctctactaaaaaatacaaaattagccaggcgtggtgacgcatgcctgtaatcccagttactctggaagctgaggcaggagaattgcttgaacccggaaggcggaggttgcagtgagccgagatcacgccactgcactccagcctgggcaaaaagagcgaaactctgtctcaaataaataaataaatatacaaaaattagccgagcatggtggtgcacacctgtaatcccaactacttgggaggctgaggcaggagaatcgcttgaacccaggaggtggaggttgcagtgagccgagatcgcgccactgcactccagcctagacgatggagtgagactctgtctcaaaaaaaaaaaaaaaaaaaattaaaaaataaatgaggctgggcacagtgtctgatgcctgtaatcccagccctttgggaggctgaggcaggaggattccttgagctcaggagttcaaggccagcctaggcaacatagagatcccaactctacaaaaaatttttttgaaaattagctggccacaaaaaaaaaaaaaaaaaaaaaaagaaaaagaaaaaaagaaaaaagaaaaaaaaattagctgaccatgggggcacatacatgtagtcttagctactccggaggctgaggcagggggattgcttgagcctgggagagagagaggcttcagtaggttatgactgtgccactgcactccagcctaggtgacagggcaagactttatctctaaataaagaaagttaaagtgggttggatccctttgtgaaatacccaggttttgctggtgttggaatcccagcaattccaccttactcaatttgctgaacttctctgagcccccactgcctcgtgggaacaaaagtagctgcctcaagagctgccacgtggatgaatgaggatgaagtgcattagttaggaagggctgggttatgcttagtaacaagcactcccaaagacttcacggccccaacagctaaggtttggttcccatgatggttgttttgtgaagtgaaaatgcagcaaattatgtactgttttgtaatacttctccttggaagggacacatgccacctctgctcacatttcattggccaaagcaagtcacatggccacccccaatgtcagtagggtgggaaatatgattgtcctctaggatcagaaccatctgggcctggtggctggcgcccgtagtccgagctactttggaggctgaggtgggaggattgcttgagtccaggagttggaggctgcaatgagctatcatcacgccacttcactccagcttgggtgacagagcaagaccctgtcaaaaacaagacaaaacaggctgggcgtggtggctcacgcctgtaatcccagcactttgggaggccgaagcgagcagatggcctcaggtcgggaattcaaggccagcctggccagcacagtgaaactccgtctctactaaaaataacaaaaattagatgggcgtggtggcaggtgtctgtaatcccagctactcaggaagctgaggcagaataatcgcttgaacccgggaggcggagattgcagtgagccaaggtcatgccattgcactccagcctgggcaacagagcaagactctgtctcaaaaaaaaaaaaaaaaaaaagacaaaacagccaggcatggtggctcatgcctgtaatcctagcactttgagaggccaaggcgggtggatcacctgaggtcgggagttcaagaccagcctgaccaacatggagaaaccctgtctctagtaaaaatacaaaaaattagccaggcatggtggcggatgcctgtaatcccatctactcaggaggctgaggcaggagaatcgcttgaacccagaggcagaggttgtagggagctgagatcgcaccactgcactccagcctggacaacaagagtgaaactccgtctcaaaacagaacaaaacaaaacaaaacaaaacaaataatacatgatatgtcagtggttaacaacatgtctggtatacagcaggtgctcaataaatgggcatcattataggagaggcttacaggataaaatggctgacactccaaaccatcatgcttcatgaatggggaaactgaggctcttggctctacccttgcctgcccctccccctgcttctcatgggggaaaaaaaaaagacagcagccatttctgaagaagcatttattagcatgcagggcccatgctagaggctccttatttccagggcaaggccagcgagacagagcccattgctcaggacgcagcccagattgcaaagagaggacagcccatggtagcggaagaaattctggcggagagcactgtacttggggtccttctctcgcagctggcggtagggatcgggaccctggtggctgcctggtacctccccacccaggcctcgctccttctccacggtttgcagggcccacatggcagctgtggtgcggggttccagccagcgggcgttgacagtggccagcgtaaggctcaggaacagcaggtaaagctggcagggagagcagaggagaaggtgagccatgcctgggaggccagaggggccctagggagggtctttctgcatcctcaacagcacaggggtgggggtggggacagcactggatcaaaaaacctgcctccccctctttccttgaacccagactgagggacccaaagcagaactccagctcttctactctgaaactggcagctctgaaggaaaggctccatccccacctcctctatccccccgcaaaacctcccgagcctcttctcctctgatactcagactggaagtccccagagcaggatctctttcctcagtggccacagcccagacgcctgaagctgacattggacccacagagggtgaataaaaagtctttgagtggctgggcgcagtggctcatgcctatagtcccagcactttgggaggctgaggtgagtggatcacttgaggccaggagttcaaggacagcctgggcaacatgggcaaaaccccgtctctactaaaaatacaaaaattagccaggtgtgggggctgtccccctgtaatcccagctactcaggaggctgaggcatgaggattgcttgaacccgggaaggagaggttgcagtgagccaagattgcaccactgcactgcagcctgggcgacagagcaagaccctgtctcaaaaacaaacaaaacaaaacaaaaagtctttgaaggcaggcatggtggctcatgcctgtaatctgtaatcccggtgctttcagagatgggggtgggagcatcacttgaagccaggagttcaagaccagcctgaacaacacagcaaagaccctcatctttttttttttttttttttttgagactgagtttcactcttgttgcccaggctggagtgcaatggcgtgaccttggcccactgcaatctccgcctcctgggttcaagcaattctcctgcctcagcctcccaaatagctgggattacaggcgcacaccaccacacccagctaatttttgtatttttagtagagacggggtttcaccatgttagccaggatggtctcgcgctcctgacctcgtgatccacccacctcagcctcccaaagtgctgggattacaggcatgagccactgcgcccagcctattttttttaattaggaaaaatgtttttgccattctcacattgctataacaccatctctatctgttttaagtatttgaataccttctgagcctgtttcattaaaataaataaataaaaggaaaaaaaaacagtctgtgaagttctagttacccataatcccctcctgtctgtgagattattcttgaaacacctgtcaggtctcacttacccacgtctatgaaacataatgcaggcaagggaaggccagagtaaatagagaaatctgagatgcagagatagtttcttgccttgtggccagaaaaatgtgtggaaggggataggaaaccataaattcccagtcgggctggtttttaaacaataagctggggtcaatgtgccagctcagctgagtcaccacagcttggcagcaggcccagccagcgggaggagagggaacagcagctagcagggagatgctgggggatagacagggctgctggggactgttgtacaggctgtgcactgctcaagggtatccagagcccagctttgtatctaccaggaagaaggggctcccctcccctcccttcctcttccctcccctctcctttcctctcctctcctttcctttcctttttttttttttttttgagatggagtcttgctttgtcgccctggctggagtgcaatggcatgatctcggctcactgcaacctctgcctcctcggttcaagcaattctcctgcctcagcctcctgagtagctggaattacaggtgcacaccaccacgcctggctaatttttttgtatttttagtagagacggggtttcaccatgttggtcaggctggtcttgaactcctgacctcgtgatccgcccacctcggcctcccaaagtgttgggattacaggcgtgagccaccatgcctagcctttttttttccccccctggaaaaggtgtagccataggcgctgactgaggtcctgggaacaagtctccagagggcagtggcactcaaacccacgtacctggctggcctcccagaatgtgagctgagcccaagcatgctgtgaagccaagatgcagaggttgatgaaggcacagcccatggagatgtggaagtagaaggggaagagtttgctctgcactagtccgaaggtatgtcggggaaggcttcggaaaagcaggaagcctgcagggtatggggaccacaggggtgttagggcacttcccggttcccctcttatttccatccccaccccaggtacccatgacatccaagctgagggtccctacctgagacgaaggtcacccacatttgcatgccccaggcacctgacaagaccagtagatggaccatcttaatcaggcctcctaggttcccgccttcctccatcttgcagtcctgggaaggaggcaccgggtggctcagaactttacctttgcctcatgcgtggccttcagaccctgtgagcccgctcggggacagggttacggccaatccagcagagattctggcaaagcatcccgggaatgagagtgagaaaggcccaaagcagtcaaggcccaaagacaaccctcgaccccatctctccaaatgtcagccctcaagatctcaggctctctggacctcaatctccatgccacttcagaggccccaaatttcagccacagcagctccagatcatagccctaggtcttcagagatcactccactaattcccaaatatcaccccagggatccagttctgacagccaagaccactcctctcataaaataataccggatattaggtgaagatcccgaaagccccgaggaaaccctaaatctcatcctgaggacaccgatcccaccaaagccccgaggaaacgccaaatctcatcccgaggacaccgatcccaccgttaggaaccgggacctcaatccgcagcacccggattccgagaacagaggcgtcggggccaaatgggctgaatctggtacctcactcccacgcccccgggtggacagcgaccctcctcggccgcgtcccctcgtgggtttcccccaaccaataattcgtcccgcctcccagctgagcccgaagccaatcgggtcgtagatctgcacctttctatcccgccctcctgggtattgactaatcgtagaaacccccctgggatcccgccccctccacgggcttttatccaattacgccgcggctactaagcgcagctgaagcgtgaaggcgccaatgaggccttcggctactccggcaggggcggaactaaaatgccggccacacccctctctgtgactcagtctctgagcgttttaatacgatggtgtccccgcgggatcaaacttcagcgtcacagctgaggactggcttcgtggtccctgatgggagagcatgaacaggtggtatgtggtaggtggggttctggagcctggcgggtgtagatttcacaacccagggggcggagccaggatgatgaccccgccccctccctaaataattctcccgggagggacacggaagcagcaaccgggatgggacggggagagaggaggcactactggggacctaagctggttctcaaatgcctctccttttcccctccaagcctcccaggcttcctatggtccctaagtcccgggttctcagcgtgacattccagagcaaacacagctcccyattactctataccaggcactggcatggattaatttatctaatcacaacatcccagtaaggtgactattatgacatctcgtttttatagttggggacactgaggcatggagaggttcagtaacgcgaccagtattacacagctggaagggacagagctaggatttgaacccaggccatctagctggagagtttscctgcttaaccgtcatactctgctgtccctggaagtgaggacctccctgaggcagtgactctcggaggggcagcttaggacatttcaggcagaagaaaaacgtgtacatcacagggtgggtgtgaagatccagtgaatgcttaggggatgcccggcactcaattaggtgctcagaaaataggagcctaaaaaaggattaaggaagattttactgaagatatgctgaatagtttttgtttgtctgtttgtgtttgagacggagtttcgctctcgttgcccgggctggagcacagtggcatgatatcggctcactgcaacctccgcctctgaggttcaagcgactctcctgcctcacccttccaagtagctgrgattacaggcatgcgccaccacgcctggctaattttgtatttttagtagagatggggtttctccatgttggccaggctggtctcgaactcctgacctcaggtgatccacctgccttggcctcccaaagtgctaggattacaggtgttagccaccgtgcccagcctgagtagttctgaagagcgtgtaggagtcttccaggtcgactgaatcaggcagagggcctggcaagggtgacagagagaaaggtctagaggatttgggggaagaggctgagtgtgactcagggcaaggtgcctttcacctagaagtttctccaggcagacctgccccagatatctccatctgtgccatatgtggctatactggagggggaggggagttgaatgtgagacccagagctcagctgtttcctgtttccagcctcttctagcacgggtctgggccccaattcagctaacatttattgaacagatatgccctgcctctcctgctcacactctatggctggcattcacctgtggggccaggtcgaaactcctggcttggccgtcaatgccttactggagctgctctgctaacctcctgctgcttcctctcggacctcgattcagccatcatgaatttaccagcatagagcatgtgattccacacctccaagcttttgcacatgctgctccctgccaggaaaggccttcctttaagccaatgtcaaggtcccttttttctttggactcttctgaggcctgattttttttctttggggccttctgggtccttctcactgcccagcccaaaccttggggctgggataatcttttttgttgttgttttttatttttggagactgagtctcactctgttgctgaggctggagtgcagtggtgcaatctcggctcactgccacctccgcctcccgggttcaagtgattctcctgcctcagcctcccgagtagctgggattacaggcgcccaccaccatgcccagctagtttttgtatttttagtagagacggggtttcaccatattggccacgctggtctcgaactcctgacctcaagtgatcctcccgccttggcctcccaaagtgctaggattacaggcgtgagccaccattgcyggccgcgtctggccttgggatcatcttttatccagctttggctcctaccataactgagaagccttgagtttagggctgaggcctctctggcatgtcagggagggtctgggggcactggggacatggggacttatctcaaagcagcccctgcttccctactcacagcgaccctcttttggccggcctaccccgggaccctgactactctgtgtcctgcctctactcacctccctcaccctccagcatgtgtttgcctgctaacatgaagtgtgacaagtactggggttagttagggggctcccatagggctggggacactgggaggggctgggaatgtgaggagtgccctgcactgtccctcaaggaagccctcacccctaggctcttcctcggacaaggctctggagcgtacagctcactggtccaggactccagagccagagaccttgggatgccctgcttctggggacacagtgaggactgcagactgcaggccagggtggggctcagggccttcgccacatgaggctgccccctcccccagtccagacctgcagaagcagtgctgtaatgaccaggacattttgaagaggcatcacaacgtagctaaggtcacccccacccgggaaaccccttcaatgcagaaaaccactgcaatctactgctgtggggcttagggaaggggctgtaaggcagagagactcccatgaatgcacccactgtgtttcttcakcacctagaacagcacctggcactcagcaggccctggctaagcaagtcttaaatgaatggatgaaggaatgaatggaaggaaagagtgtggttgtgtgtcttccatggggatttggctgtgatcgtctctcagccacataagtgcacttctgagcatatgtagcccaagggggaggtgcatgaatatgcctggagtgcagctttgcctgcacttacggtttgggacacctagaactgaggagatccaactcttgtccagccctcaaaactgggttgaggtgagcaaggaggcagctcagggacaaatttctactcccatctcatctctcttccttagaagcccttggagaccagctcttccaaagtcaaaggtgagaaatctcctttccaacaaaactgtgtggggaagacctgctggtttctacctctaccctctgccccagcatcagctgtccccctgccatggtcacccattcactcctgcccaaggctgagtgggcccctgttctatatcttatcccctgtccctactgctactctgagcctttgctgacctctgccctgcccttgccccagaccccaccccttacagccctggctcaccctcttctctgcccacagccaagaccattgtgatgattcccgactcccagaagctcctgcgatgtgaacttgagtcactcaagagccagttacaggcccagaccaaggtgaaccaccttggccctgcccccagcaacctctgtttctccttgccctcccctccttcctcccaccccaaggctgacctctttcccccaggctttcgagttcctgaaccactcagtgaccatgttggagaaggagagctgcttgcagmaaatcaagattcagcagcttgaaggtgaggactgaccagagatcaaggtcaggctaggccaggcgtggtggctcacgcctgtaatcccagcatttggggaggccaaagaggttggatcacttgaggtcaggagtttgagaccagcctggacaacatggtgaaaccccatatctacttaaaaaaaaaaaaaaaaaaagccaggtgctgtcactcatggctgtaatcccagcactttgggaggctgaggcaggtggatcacctgaggtcaggagttcgagaccagcctggccaatatggtgaaaccccatctctactaacaatacaaaaattagccaggcgtggtggtatgcacctgtagtcccagccactcaggaggctgagaaaggagaattgctttctgggaggcagaggttgcagtgagccgagatcacgccactgcactccagcctgggcaacaaagcaagacttcatctcaaaagaaaaaaagtcaggctggaagctggtcctgttgggatcagctgggccaggccagggtgagggaaattgggagagtctgggttctgggtcaagattaggacaagctgggttcagggtgggatcagggctcagtcaaggtcccacactctctgcagagktgctgagccccacaggccgccagggagagaaggaggagcacaagtggggcatggagcagggccggcaggagctgtatggggccctgacccaaggccttcaggggctggagaagaccctgcgtgacagtgaggagatgcagcgggcccgcaccactcgctgcctgcagctgctggcccaggagatccgggacaggtcggggatggcgggagggcagcttggagtccacaggagggaagggagacccagaactggggaatggaggcaggatgggggaaatggcagatgcctgggggagggggactgagggatggtggaaagcctgagggacaagaagagggaatgaggccgggtgtggtggctcatgcctgtaatcccagcactttgggaagccgagatgggcggatcacctgaggtcaggagttcgagaccagcctggccaacatggtgaaaccccatctctactaaaaatacaagaattagtcaggcatggcggcgggtgcctgtaatcccagctactagggaagctgaagcaggagaatcactggaacccaggaggcagaggttgcagtgagctgagatcgcaccactgcactccagcctgggcgcctgggcgcctgggcggcagagcgagactctgtctaaaaaaaaaaaaatgaggaggggatgagaggctcaggggagacaggtggctggtgggggcgggggagtgggaaactgagaggccagaaggcagggaagacagaaagctggaggtgggatggaaaaggaggccaggggatcagaaagggggatggcagggaagactgagaggacaggagactgggggtatagaaagtcgggggacaggaggtggggaggtggaggccaggtgataggaggctgagtggggtgggagagactgagagaatgggaggctggggatcagaaggagaggagggggatgagggtagggggattgtagaaggggaggggaaaagggcagggaagtgtggggaggggacagagcttgcggggatgggtggaggcacagataggggcatgggaggtcaggggccaggcagggagtgcaggtctaggctgcactgtcccctcagcaagaagttcctgtgggaggagctggaactggtgcgggaggaggtgaccttcatctatcagaagctccgtgagttcctggagcccmcagccggtgtgtggggagggggtccttcttcagcctttgtccgcctgagccccctccctccacagaagcgcaggaggatgagatctcagagaacttggtgaacattcagaaaatgcagaaaacgcaggtgaaatgccgcaaagtgagtggaggagatggggaccctggggaggagtgggagagggagggatggggattttggccagcctccaccatgagattggagcctgggttcaaatctcagctctgccactcactgctgtgtgactgtgggcaagtcacttgacctctctgagcctcagtttcctcatctgtataatggatgtaataataactcatcttggctgggcgcggtggctcacgcctgtaatcccagcactttgggaggctgaggtgggtggatcagaagttcgagaccagcctggccaacatgatgaaaccccgtctatactaaaaatacaaaaattagctgggtgtggtggcaggcacctgtaatcccagctactcaggagactgaggatggagaatggcttgaacctaggaggcagaggttacagcgagccgaaatcgtgccattgcactccaccctgggcgacaagagcaaaactcccatcttaaaaaaaaaaaagaaaaaagaaaaagaaaaagaaaactcatcctgttgggtgctgtggcatgcctgttatctcagcactttgggaggctgaggtggttggattgcttgaggccagaagttcaagaccagcctaggcaacatggcaaaaccctgtctctacaaaaaacaaaaaaaacaagagggtgtggtggcacatgcctgtagacttagctactcagaaggctgaggtagggggatcacttgagccttggaggttcagggtgcgttgagccctgatagtaccattgcactctagcctgggcgacagactgagaccctgtctcaaaaaagaaacaaacaccaaaaacaaaaacaaaaaacaaaacaaaaaaaaacactcctccctacctgatcaggtgtctgtattagctgagtactgtgcacttgaatgcagtctggcatataacaagtgctatataacagtcaccttttactattatcattattattatttattttgttttcttttttgagacggagtttccctcttgttgcccaggctggagtgcaatggcgcgatctcaactcactgcaacctstgcctcctgggttcaagcaaytctcctgcctcagcctctcgagtagctgggacaacaggcgcccgccaccacgcccggctaactttttgtatttttagtagagatgcggtttcactgtgttagccaggatggtctcaatctsctgacctcgtgatctgcccgcctcggcctcccaaagtgctgggattacaggtgtgagccaccgcgcctggcactattgtcattattattatgactgctgttctctcatccctccccaccccagatcctgaccaagatgaagcagcagggtcatgagacagccgcctgtccggagactgaagagataccgcagggagccagtggctgctggaaggatgacctccagaaggaactgagtgatatatggtgatgcccagcctgcagtctgacccctgaccctcctctgaacccgttcccccaacgggatctggcagtgaccaccagaacctggagcccacctgagtccagacttccctcaccccctaggactcaccccaccacggcccccaaccttagctgtactgctgtctacaccctgagcagtgtggagtctcccagcgcccccagctccttgtcttcttgcaggtctgctgtgcacgtgctgcagaactccatagacagcctcactttgtgctcgggggcctgtcccaaggcctcgagcctaagaggtgagggaggctgagaattgctcaggggtgggaggtcattgtctagcttcacagggaggmtatgttcagagagcctatttgggagtcacatctgatgggtgttattctatggtcacattaagtagtgttctggggtcacattaaggagtcactggaggtttcatccaggagtcattcatggtcacattcagagtcacttggatcttatatgagtccatggggactccacacagtggctcatgcctgtaatcctaatattttgggaggctgaggtgggaggattacttgagtctaggagtttgagaccagcctgggcaacacagtgagaccccatctctccaaaaaatttaaaaactagctgggtgatggtgcacctgtggctgagcacacctgtagtctcagctactcaggaggctgagacaggaggatcgcttgagcctgcgaggttgaggctgcagtgagccataatcgtgccactgcactccagtctgggcaacagagcgagaccccatctctaaaaaaaaaagtgtcaattgggtaaaatgcaagggtcattgaagtcataatttggtgtcacaytggatcacattcaagggaattgggggtcatggtttaagtatcaatgaggtatactatgaagggacacagggcctatatttgggggttacttgagggtcacattcagggaacctgtccctcctgcaggccacaaggggcaccagtgcctgagccctccactcccctcctgggactctgactccgactstgaccaggacctctcccagccacctttcagcaagagcggccgctccttcccacccggtgcagatcctccccagtccccccctccacccatttccctcctgacctgcccttgactcccacagtctagaccctcagaacaggcccagatcctgatctgggcatgcggtccctgacctgcagccccggagtcccctggacctggccaggccctgacccaycctctctctccacagcttgagcagccgggactgctctccctgaagacccctccagagagaaaataaactagcccagaccctcctctagccccgactgttagtcttgctgcttcctgtgcctaggaatccccctgccctcctagtttacccctcattgttgggggggaggggtgtagagaccccaggggtcattcgggatgtgtgggcttggaatcaggggacatctgaagccagatttaatatatgacaaggcaaggagtcattctgtccagacacgagcagccagacagacttccacactggccacagagccttcctttctggggggccctggcgaatggggaaactgaggcccagagagggagaggcgcggcccagggacatactctgaagcccctccctcctattaccctcggagccccgcccaccccagggtcctccctctctacttccattcttggttccttcctacaatcgatgctaacacgccccgcctccaagatcacggaggccccgccccacggggctatgcaaatgagacgcccggaggccccgcccctccctccacctcggagtctgcgcggcgcggccaggcccggccgaccgcgtctcggtcttcgcgtctgccagcctggctggcagtccgtctgtccatcccgccgcgccggggcagtctaggcggagcgggggctcaggcggcggcggcctcgacgcggtgagaggagggggtgggggcgcccctcatcccctcccgtgggcttcccacccccggtgtcggtctccggttcctgagggttgggtccctctgggtccagcgcggggaggggcgggggaggggaggcggcgagctgggggaggggaccgggctgggggaggggaccccgggccgaggagccagcaccggtggtgagggcggctgtgggtaactgtgattgtgtggttgtcattgtgtgtctgtgtgtggttgtgtaactgtcatcgtgtggctgcatgactgggattgtgtggtttcgggaggtccgcgggtgtgtgtgtgtgtgtgtcactgtcattgtgcggctgtcgttgtgggtgtcactctgatggtttgtgtgtgtgtgtctggctatgctgtgactgccattggccccccgtgtggctgctgtctctgtgtgtgactgtcttggtgttcgtgtggttgtgtgcataggactgtcattgtgtggctgctgttgtgtgttcattctgatggtgtgtatgtgtgtgtggctgtggtcgtgcgctgtgcacctttcttgtgtggcattgtgagtctgtgtcatggtccatggatgtggccatgtggttgtagatggcaccttgtctctcccctgtgactgttggtgtgaataagagactgttagtgtgtgtgtggctgtcgctgagtgccttgtaattgggggtgtgacgctgtgatgagttctgtgacccccattgtgtgcggtgactcttttctgtgactcttaagtgtgttgcaggcctgactgtgtgtccctgactgtagcggtgtgggggcttgtgtgggactgtgatgtgtgtagggtctcctgacatgtctctctctgtttggcctggggtgggggtggggacttgtttgatctgtttggtgtctctgacaggctatgagcccactgtgtgtgagtatgcagtgacatgtgttgtgtgtgttggacacctgtctgaacaagggggcccctcttgtttactgcaaagtggcgcccagcacagcgcctggaagtcggcaggtgctcggtcttcactgtgggatgggtgaacgctatgccatggttgtgtgtgtgtgtgtgtgtgtgtgtgtgtgtgtgtggtgccaggatggaggctgcggctgggttgtgcttcctaagggtgacagcatgggtgactctgggtatctaggacctctggcaaccatcaccccatatcacactgcagagtgagtgtcgtggttggggtgctggacccagagtgcctaccctcgcctgcctgggcctcagtttccacatctgcacaatgggggtgaccatccctgccctgctggctgccaggagcggctgtgagtcttcaggcgtggatgcagcctgggggaagccatagggcgctttcacaggtgagatggggctgggagaatggatgcaagcaggtgtgactgtgttgagccctaaagcgctggggactgggggtagccttgggggagggaagaggagaactgggaggcagaccggctgggaagagggggaaggagggagaggcagttggcagagaaggagggcttggctatcagcccaaccagacaccaacaccacagcccatggggacagagagaggggcccctgcagaggccatggaggaagcgactcaggggaagggtctggtagggatgggggccccttgggaaagaggatggtgtcccctaaaaactagtggggacccttctaagtgccatgggggaggggttcccatgaggctggggagtctcttctaaaggcccacctcctaaagggcattgggtcagagcctcccatgtaggctgtaaaggaagggacccccgtagactcttggggagtggtgtcagaggaggcaggtgtccccagtagggtcaggaccaacagggcaggacctggattgcagaggcatggccagaaggttcaagggacagagtcagggcctccccgggtcttcagggccaggggtgtggccaaaggactcaggggatgaagccagggtcccggtgacctgagccttcccctaggcacaccccctgggactcccactccctccccacctctgcaggcctggccttcaccatggcgggagggagaccgcatctgaagaggagtttctccatcatcccctgctttgtcttcgtggaggtgaggacccccgtacctctcccagagacggcgtgcctatctctgtctctgtccaacctcagtctccttatctgtacccacttttccatctctgggatctcccttgctgtcccctttctcttgagaaatggttatgagcttagattcagaagtgccactccccggggtccaatccctctctgccccatccacactgcagggtgctggacaccacaggtaccctcctgagccacagtttcctcattcataaaatggacatcaccagagtcccaactcatagggctgttctctgtgtgtgtgtgtgtgtgtacgtgtgtgtttgagatagggtctcactctgtcacccaggctggagtgcagtggcataatctcggtttactgccacctccacctcctgggctcaagcaattctcctacctcagcgtcccgagtagctgagactacaggtgtgtgccatcatgcccagctaatttttgtactttttggtagaggtgggatttcaacatgttggccaggatggtctggaactcctgacctcaagcaatcctcctgcctcagcctcccaaagtgctgggattacaggcgtgagccaccacgcccggcctcctagggctgttctaaaggtaaaatatattaattcatggacaaagcttggtacgaccccctgcccacagtgagggttacacctgtggtagctgctagcacccctacttctctgatttctttccatgtgggagagtctctccacctccccctgtctgtctgtctctcatttgagccttggccctaatctcactctccccatgcccatctcttctctccctctctctacaactcccttcccttttcctttcccttctctttcctcttgctttctcctcttctcccctcctttcctggctttcctctctctctgttttttttttttcacttcttccttttctttctttccctccctccctctctctctttctttcttttgtgatggagtcttgctccgctgcccaggctggagtgcagtggcacgatcttggctcactgcaaactccgcctcccgggttcaagtgattctcctgcctcagcctcccgagtagttgggagtacaggcgtctgccaccatacccagctaatttttgtatttttagtagagacagggttttgtcatgttgtccaggctggtctcaaactcctgatctcaggtaatccacctgcctcagcctcccaaagtgctgggattacaagcatgagccacgttttaattttttttctttctttttgtctttcagccattccttttcctttcttttttttctgagacagggtctccctctgtcacccaggctggagtgcagtggtgccatcatggctcactgcagccttaatcctctgggtgaagcaatcttccttcctcagcctcccaagtagctgggactatagttgtacagagataaggtcatgcgatctcaaactcctgagctcaagggatcctcttgcctatgcctcccaaagtgctggaattacaggcacgagccgctgcacacggcccctctgtttctgtctccttctccttctgtttctcctaagccctgacccttctctcacctcctttccccatttctctcagtctctctcccccttgtctctgtctctctccatcttctagtttctgtctctaacccatgtttctccatctctgtatctctgcctctgtggcctcagctggagtcctgacctctctcttctctctccgccacctctccccgccctggcttggtggcagtcggtgctgctgggcattgtgatcctgcttgcttaccgcctggagttcacggacaccttccctgtgcacacccagggattcttctgctatgacagtacctacgccaagccctacccagggcctgaggctgccagccgagtgcctcctgctcttgtctacgcactggtcactgccgggcccaccctcacggtgagacaatgaagacctcctaggaggcaggtgggccggtaagggtgggtgaggggatgggctggaaggccagaagactccatcttggtcttgcccacagatcctgctgggagagctggcgcgtgcctttttccctgcaccaccttcagccgtcccagtcatcggggagagcaccatcgtgtctggggcctgctgccgcttcagccccccagtgcggaggctggtccgcttcctgggtgagagacatggcctggggtcagccccatggtaatggtggggaggtgggtatagaagaaaagagtcatgggcctgacagtcataataattccaggctgggtgtggtggctcacgcctgtaatctcagcactgtgggaggccaagtgggcgatcacctgaggtcaggagttcaggaccagcctggccaacatggcgaaaccctgtctgtactaaaaacaaaaaattagctgggcgtgtggcaggtgcctgtaatccttgaacccgggaggcagaggttgcagtgagccaagattgtgccagcctgggcaacaagagcaaaactccgtctcaaaaaaaaaaaaaaaaagaagaattccagggaaaagctgggcatggtggtacatgcctgtagccccagctacttgggaggctgaggcagagactcagctacttgggattactagctacttgggagactgaacaagatcccacctctttaaaaaaaagggaattccaggggggaaggaagaggacctggaattgccatgatggggatgttaggaagcaacaagggacttaggctcagaccagatgtaatggaggttctagggacatgggtggggcctaacccaaccatgatggcaactgtcggaagagggtcccagaatgccataaggagagtctcaggcacaaaagagagacacaggcacaggacaaacaccctggggcccctgggtgagactctggctgtgctttaaatggggtcccagcctcaagtagtggctgtgggaaagggggaggggcagaccttacctataatgatggtcccagggcagagggcgggagacccagctctaacttattagtggccccaggaggagagtgttgaactcagtagtagccagtttaggggcaggcaggaagagccccaggtatgccattagggttttccctagccgtcctaggcatggggtggatcctgatgtaatggtgttggggcgggggtccaagcccagctataatggggctccaagggaggatccgcccctgacatagtggtaatcctagaaagacaggggccagataatgagggtccctgggggcagga

SEQ ID NO: 97930 - DNA, 54602 bp, Homo sapiens
ggggcagggagagccattaggcaaatacctaatgcatgtggggcttaaaacctagatgacaggttgataggtgcagcaaaccaccatggcacatgtatacctatgtaacaaaactgcacgttctgcacatgtatcccagaacttaaagtaaaatttaaaaaaacaaaaataattttaaaaaaggtatttcaccaaaagtgcaagatttctgcacccactggcatagctgcagcaatggctttacaacattccttttctttttttacaatgatccttatgctggattcatttatcttgaaatggagggcaaccacagctgcagatcatgatctacagtacatattatcaaacaatccaacgttttcttgtaatgtcatgacttttctctgcttcttgggagcatttccagcatcactaatggcattttgaatgggtctcatgatgttatccacggtttatggtattgcactaaacacgacaagaaatacatgagaactgtgagaaatcactttttactgtaacacccaatttactggagaaatgaattgctcttgtgaagatgattttatgcagttataattatgatttaatactcattctttatgtctacatttctttcaacttcaaatggcataatgtgcggtctgcgtgtgtgcataagttttgataaattttaactttctttaatagatttgtgtatattttgttgcagtaaatgatagactagtatcaacatacattttatgcatgcatgacatgcctagcttttccttaatttttttcaatatttctagtctacagggtttatttgtgagtcttttcaagttgccataaaacttcaaaaaaattccaatatatttattgaaaaaaattcacatataagtggccttgctcagttcaaactcatgttgttcaagggtcaactgtaaatctttgaaagtttttctctttatcctcctacaagcaacatttgggaaaaataagctaataataatttctttaagagataggttgcatagaatgtctataactgaaatatacatgaataaataagtacatatggatatacactcactcataagcttccgtgagcttcagtttccttatctgtaaaatacaaccaaccatagaaccaaaaggtttcagtaaagattcaatgagattgtgcacagtgtaaataaagcacttagcttagtttcagacacacagtaagcactcaaaattgttatttcttattaagtttcatacttttgtagcacttagattttatatttcagtaatattaaatgaagccattttcacatttttggtttgaagtagcagcttttttgatattgcttgaagattctcacacacaatatctcagaaactgttgatggatgcaaattattttctctcactatatgtggacattgatcattcatcctttgactttcaaaatccacacattcttatcaagaatcaggaaaagtgacaatgctttcttgaaaaatgttatattcttcacaaatgttttaaaacttttttaaaaaaacaagcttgatacattttatcttgtctgcttgtcctttttccaaaatgtaaaggtaatagtgaaaatagccttcccaggccgggcgcggtggctcacgcctgtaatcccaacactttgggaggccaaggtgggcagatcacgaggtcaggagttcaacaccagcctggccatcatggtgaaaccctgtctgtactaaaaatacaaaaattagctgggtatggtggtacatgcctgtaatcccagctactcgggaggctgaggctagagaattgctcaaaccaggacccaggaggcagaggttgcagtgaggcaagatcacaccactgcactccagcctgggctacagagcgagattctgtctcaaaaaaaaaaaaaaaaaaaaaaaaaaaaaagggcttccctttttcccactttttaccgtcagtgacccagaacaaacagctttcatttctgatttgcaaagtattcctttaaattgagtatatgttttatgtgaatctatagttttactgataaaaaaggagccaaaactattttttaaagttctttttttcttccggaattagctgcattgagcatgtgcatattaacagtcttttaaattgttattaatatgaagacattacccttcctctgtcggaaggacataacgctgagccatttggagtgagttctgacagatttgccccaaatcacccatatcatcttcttacatcttttttgtggccagaatatagtttaatgctacaactatttcagatattgctgtcaaataaggttttcctttgtttgacattgaaagtcctgaatgggatcaagacaggtgacccaaacctgtgcttctcaaatttgaatgtgcatataaattacattttcagaaacttgttaaacatggattctgattctgtaggggctgattagggctgtggcccaggattctgcatatctagcaagttcccaggtgatgccgacactgctagtctggaccacatttcagcagcacagatctaaagcgatggttctcagcgtgtcgtcttgggaccagcagcccaggcatcacctggaaacttatccaaaaatgcaaattctcagggcacacccctgacattctgaatgagaaactttgggttaaggcccagtaatctgtgtttgcactagacagcctgaggattcagatgcacaaaatgtttgagaaccactgctctgaaaaattaacaccctgctctaaagtaaatttcctgccaacatggaccgattttattgtttactattaagacagaaatcaaggctctcttgggtctgagacatccaggacagtctggccatggctaagttaactgcaggaaaggagcacttaacaaatctgcccacactggtgagtgggccctggaaaagcagaccctgccaccagctctggctgaaatttcatcaggcaggagcattccctacatctgagcatatggatgtcattgaaaccagcagtcagcaggagggaagtctgacaggggttagtagagcagtgctggattgcccaacacagagataggcatgtgcttaaggtacccactaaacagggacactaaaataatgagaaaaaaatttgtgaagaatataacatttttcaagaaaacatgaaaatagatatcatgttgaaaatcacattattcgggttcttcatattaatgttattggttagtatgacttggtgtaatctctagagccagactgcctgtctctaagtcctggctctaccatgtaacagctagataactttggaatttactcatcttgcattgcctcagttttatcatctataaaatggggataatggattttttgttagaattaaatattacatcagatttgcaaagctcttagaataatgccttctatatagtaagtgcttaataaatatttttattacaagtgtggggaaagaaaataagggttccatatttctttcagtgcttagggttttgaaagaattaactgaacaaattaaccaataaaccaaagaagtttaacacaacttgtgagagattagacaaaagtcagaaatgcaagcagataagaggagccatctgaagagatctatgggtcctagagaaagaccaagcaagagtaggatagaactagggaaagggcaggactctgcccaaagtcaggtacgtatcagaaaaaaggaacacaccttaaatctctggggtacacattaggagatgtgtgtgtgctggccacccacaaggatgtatcatcatcagtaactctcagaacttaaggccgcaccactggctctcaccttagctgcaaatggaatcacctggggagctttctaaaataccggtacctgggttctacccccagagtctgtttcattggtctggggcattacctaggcatcagagttccaaaatctcctcaaagtgagtttattagtgtccagggttgagtgtcttgcatcttttaagtttgtcagcattgatcctggaagttgtgatgggcccaactgcaggtaaatgagaaactcaaggataggaaaacacagtccgtgcttattcatcatctccacattcttttttttttttttttttttttttggaaatggagtcccactctatcgcccaagctgaagtacagtggcacgatctcagctcactacaacttctgcctcttgggttcaagtgattctcctgcctcagcctcccaagtaggtgggattacaggtgtgcaccaccacacctggctaatggattttatttttttggtggaaacagggttttaccatgttgcccaggctggtctagagctcctaacctcaagtgatcttcccacctcggcctcctagagtgctgggattacaggcgtgagccatcgtgcctggcccaggttctttattcttcatatttatgctctagacttagttccttccaagctgttgctagtacatagggtgcctttgtgcaattcagaagcacattttccttcttcaggatgctttgtcaagaactgagaacggtctgagatgttgccctacgtgcaagctaacgggtaagcctatcgcagtttcatggatggtggcagaagacttgagacttcttgctttcggacttgttttatttttttaatcatctcattcctcagatgatttcctattcgtacttcaactttttactaattatttacccgaagattttgatactttaagacatgatcaactccatatactactgggcctaatccttgttattggcacattgaagcaacataagccacctcagaactgagaaatacagattaaactagccaaatccatgacaatgactgagttgtgtacaaatgacccataccaagtattagatgaaacaagagacttccaagaattggcatggcctcagggagacacaatgtgccactatgtctgaagatgtgccataactgttaagctgccatcttaccagttacaagaactcaagtttaatctcttgcaagaactatactgaaaagatggcctaacaactatgtgctgtcacgtgtctgagtgttgcaacaacaggtgaatgattagtatggaattttaaaaggggaacaaagacaaagaaggaacagaagctaactagcataaactggggagaatttgtatctggcaaataccaacagagaagtatctgctatgttggggcagggacttccaactggctttcccaaggccttggtaaatgtccctccaatcctgtgacggttaattttatgtatcaacttgactgagctaagggatgcccagatagctggtaaaacattatttctgagtgtgtttgtgggggtgtttctagaagagatgagcatttgaatcagtagactgagcaaagaagatccgccctcaccaatgtgggagggcatcatccaagccattgagggcctaaatagaacaaaatgtcaaaggaagagcaaatttgctctcttccttcttgagctggcacttgcatcttctcctgccctaggatgttggagcttctgcttttcaggccttcagacttggactgaattacaccatcttttagttctccaacttacatatggcagattgtgggacttcttggcctccataatcatgtgagccaatccccataataaatctcttatatatttacatatatcctattagttctatttctctggagaaccatgactaatacaccctcccactgcttcattccagttccacatttggcaagcaacattccatgactcatctggcttcccagccatgttgctatagggaaggaccccagataatgaaagaaactagccttgcaatataaaggaactaaaatgatacgttggcattctgatctatgcatcagactctcaccagtttgttagtgagactgtcatttccccggtggcagattgcctgtaaatcctcagtactaaagctggatccagccatggacatgcagctgacgacatgaaggcattttcccaagaaggccacctggcctctctaaactccccctcattactccctgatagcaactggtcccaccccaggtttcatcctatcctaaggtgagtgcctgagctgaaactsgtccctaaaattccagaagtctttggagacagggcaattctaaacccttcagggaagtccctgttgtccaatttaggacatgcaagcagaatgtcactctcaagactgaaatattacttctcaactgtttaaagaccagaatgggatgaggacttggaactgccatatgcacccaggatccatatttattcattcagcacccagaatgtggtagataatagatactatagatacagaggaaaatgagatggaacattaaccatgggctgatattgtcacaggactagttatcagctttgcagggcttgagtcaatcagtggacccaaagttgaccaggatcttggggactmactctcactaacccaagttacatgagaatgaagagtcaagcagaattccaatttgttaatttatattgatcagaattttatcatttctagtgtctataaggagtctgctattagaccgttctctgtatcaaggtgcctggaaaggcaagttatcaatgttcactcggttagttaaaggaagaatggatgctgagggccacctcacacacaacacgggaatgcctaactttgatgggtgcctccatgttgaaaaactactatctttatagcaatcctgtcaccatgatatgaaatttgtttttctctagaaaattagctaatacagatggtcaccctaattatcaagtaaagttagaatgagctgtgtgacaaatggtgctgtcatgtcttcttgagaactagttattgtttatcttgacmacaygcaggtagtgggttgtatctgcttggttatataaaaggatgagacttctgtctttgccatctcatagaggattgcctgtgatgtgcattacattctggtttaacgcttattgaataataaatgtgttttctttctctgctttctcaatagagaggatttctgggctgggaggagattttgtttttaactgtatttccctaccatcttattcttccacatgcacagtccttagmagtgtttctcatgtataaaagaytttctgttgatttctaccattccttttcctattttcacacatctaagagcaagamggatttttttttttttttttagtttgtggggaaaaaggtaatactaattcaaaatataaagccatagtcagaaagtttgaaaatctttgcaaactagattttattaataatgttaaacggtgagggtggggaaatatgttcttagtggataccaargggtaaaaaagaagggaaggaggaagggagctacatgaagtaggaattctggaaggcagaacccaagtagtcatacggaaggtaccaagccttcgaaacatcacaagaggctacattaattctaactcttttcctaaaatttggaggaagtattaagatgttgaaatgcatagctaatttgcatactttgaatgagtcatgacaaatatttcaactgacaagaatttttcacattgaaacatgatgatagtgagctttttgtattagctgtcatccctataatattcagagacggtgttattttgtgtaattcacttggagggtacagatctcacttacccactcacaaaacaagggtaatgtgttggggtataaatttaaaatccaggaatgtgtgattgcattgtgctgtaagttcatgctatgttttcacaaaggctaaaaggttagcaaaataaagataatttatgagaagcaaaataagaaattggaaaagtacatatagcagagaatcttgtggacccatatgttttgggcaccagggagatagacgatatcatggcttctcagtgatctgtgtgagggagccctcagcactcattctttccctactaaccaagwgagcattgttaacttgccttcccaggcaccttgatatagagaagggcctcaagaacacactcctgtacatattagaaatgataaaattctgatcaatgtaaattaataaattggaattctgattgattcttcattctcatgtgacttggattactagagtcagtccccaagattctagtcaactttgggattgaatcaatccctgcaaagctgataactagtcctgtgaatatgtggtcactcgccaagataagcccatgggtaatgtttccatggagtccagactcagcaatcagctgatggctctttgtgattctctctctctcctgccccttctctctctcccttccttactccctctcctctaatttcacaaagccatttttagaattctcatttatcacccaggtgatccctctttcccatcataaaggttgtagccaatacacctataacaaatgagaaattagcaagagaaaagcataacaagtacacttgatcataggtttatgtgacatggaagttttcaggatggaggcctaaaaatacaagggaaactgttcatttttacgcttaggttctatgacgtagggacaaccatttagaaaggggattggacaaaaagggtatgagctaatgggaatagactcagtgggggaaacccagagaggcctgcatgcccagattcttcttggcttctctgtgcagcactcctttctcctgggtagaaccgctgtgaatgaaagtctttttttttttttgagacaggttctcactctgtcacccaggctggagtgcagtggcacgatctcagctcactgcaacctctgcctccctggctcaagcaattctcccacctcagcatcccgagtagctaggactacaggtgtgtgtcaccacccaattaacttttgtattttttgtagagatgggatttcacgatgttgcccaggctggtcttgaactcctgcgctcgagcaatctgcctgccttggcctcccaaagtgctgagattacaggcatgagccactgtgcccagcctgaaacaagagtcttratttctttatggccagttgttacacagaaatgtgggggaaggttagaggaatatttttaggctctatggctggctttagggaaaagaggttctaatttctatgctttgcctcagggagaatgaggggcgagagacaggagggcaaaaggttggagacagactttgcttctgaggctgcttctgaggctttcatttgaaggtattgttttctgagccccaacaaccataaaaatacaaatggagaaggggataaaatcaccaagatagcaacaaaatatcttgcttaatgatctatgatttactaaatgggacagtcaaagccacatgaaaaaatatgaaaagcaggccgggcacagtggctcatgcctgtaattctagcactctgggaggccaagctcaggaaattctagcactttgggaggccgagctcaggagttcgagacctgagctcaggagtttgagaccagcctgggcaacacggtgaaaccccgtctctaactaacatacaaaagaaattagctgggtgtggtggcacatgcctgtagtcctagctactcaggaggctgaggcaggagaattgcttgaacccgggaggcagaggttgcagtgatccgagatcgcaccattgcactccaggcctggcaacagagcaaaactctgtctctaaaaaaaagaaagaaagaaaagaaaagcagatgatgacagttcttaagggaatatcatcataactgaagagccaagcccaataatgcgtggcatgccaccgtcccctctgaaaacgaagtgaccacggaagtcccacgagactccagcagccctgaccacagccgattggacccacagcagacacggaatattctaacgtttagtgtaatccaaaatgagatgacagaggcagggtgagaggctcacacctataatcccagctacttgggaggctgacgtggtaggatcacttaagcccaggagtttggagttacagcgagctatgactgtgccactgcactccagcctgggagaaaaagactctgtctcaaaaataaattaattaattaaaaagagataatagtgagtaaacctgaagmtctctctgtaggtctgtgacctgcatattttttaaatgttaacactgtaatatgaaagcgtggctgaacagttagccttgctcttttggcaccctgaccagtgcctctcactttagctgagtttaagagcttccttaagaaatgaccagcaaactccatgatctccaagcctaagggtggtcattttagcttggggaattgaggacacagaggcaggtcgacagcagtcagagaaatcctgcagttgagggtcatgtcccaacactacaatctgacttaatctgtatttgtcaatatatgaaagaacaatgcagaatcactggacatgaataaaaccaacagcatgaaagagaggtgccaagatgaagaagccttgtaaaaggtcccagaagaaaacttgtatttaatatttgaagtaattttctcaaagacactgagaagttacaagattcataaaacaagayattaccggccatgccaatggatatgttaattaagttcacacttacgggcactaactccaacagaagcttccactttcacaatgtctcaatagccaattacatgtgatcaaattcactgtttatacagaggacttcacacaccaccaaccatgcaattaatatcaacgcacagggartaatcagaggcaggtaacaaaccrcagcaaccgtgctggtgaccaatggttaacacaccagtcaagtgggtcctgagtccttggtagggtcactgcttctctctgctgacatccaccaagacaggagaaggtctcagacttaccccgggcagagtctccaaaggcatctctgagaaggcctggtctttgctgcttttataatcctcagccacttttcactttctattgggttcagtccaggtcttcggtggtacctggtgacaacaggtgctattacctctgtccattacatgtatgtttatcacattgaggcaggtgcagcttcactgtgggcttaatgcagcttgacatgagtgactcccttttgagacattaggatcacaaaccattatgacatatcataagaaaacactgctatgtaaaatgttcatcagagaacaagagttagtataaaagaaaaacatggttgccaaaataagaaacatattaggagctgaaaagccaaatgagcacaactgaggaacaaattagtgattagaagaccaagtcatacaattctaccagaacactgaatggaaattctatgcaaaactatggagattataaaactcaagtggagacaaggagaaaaaatccagagtcataataatctatattcagaaagagaaataaagaagaaatggaatccagaaaattgtagaaaattgctctgagatgaaaaaaaagacttgatattccaatagagtctctggtttgaaatgggaatatcaaaagaatgtaacyagatttctgctgttgagatatttaactatattgcttttaaagtctgggataattctatatttaagtttaaaagagcacaaactacctcaattccattctgtctgctaaatgtgcataaacaatttctgcatggaatattttttaaagtctgctggatttattcaaataaggcatcaatccatcttactctgtttttagcagacatttggtacagggcaatacagcccatggataatcactcaatgtttgctagttaactaagaaacactaacagtctatttgatgcttatgagaaagcaacaaacaatagttttcttcaaggtagaatgatttggagaatgcatcataaccatgctgagctttcacaaatgtaaagatttcttcacaataaaatatgttgagacagtcatatttaagcaatgcttttacagccacacagccattcaattgtactgattcctcactttatagtccctgcaacttaatcccytcctgtacgcttaaaaaattccatacaaagtttaataaaacaaaggcacaatgtacatatacatacaaaataaacactgactctatgaggcattctcctaaatattcgtttttaaatatagtttcttaatattttacaccttccttgttaaaatgtgatgctgtcgaccagcctggccaacacggtgaaaccccatctctactaaaaatacaaaaattagccaggcgtggtggtgcgggcctgtattcccaactactccagaggctgaggcaggagaatcacttgaacccaggaggtggaagaggttacagtgagtcaagatggtgccattgcactccagcctgggcgacgagagcgaaactctgacaaaaaaaaaaaaaaaaaaaaaagaggaagaaaagcaaagaagagaagagaagagaaaggaagagaagaaaagaaaaatgtgatgctgtcctaagggctgggaaaaatggaaccagmacaatggcatatagataatggcctaaggtggaaacaattttggtaattgttgataattgttgctgttgttattttaaagaaattaaacacaatttgccccaagtttcatcttttataaaaccattctcatggtaagtacgtttcaatgacccaaatgaattaacaaaaaattaatcggggaaatgaaccctgattgctaccgctgtattttctcctaaaacattggcttacaatcaaatgaaacttaatcataacaatccagagattgactcatccgatgttgcccaatagtggcaaagaagggcaagtcagaaaaaaaggaaactgaaattcaaagactgtaatcagctattttggacaaaattaaacaaattaaatggcttttcttttttcaaaatagtctctattctcacattcctgatttgttgtttcaaatatttccagtttactctgacagttcacattctcccacaagcatcccttataggggagctgctgttatcaggatgaagataaagatctattcattgtattctatttgctggcagaccagcactccagaacaggataaaagccacagccattaaaaaatagattctcggctcggtgtggtggttcacacctgtaatcccagcactctgggaggccgaggtgggcagatcacctgaggtcaggagttcaaaaccagcttggccaacatggcaaaaccctgtctctactaaaaatataaaaattatccaggtgtggtggtgggttcctgtaatcccaggtactcaggaggctggggcacaagaattgcttgaactgggaggcagaggttgcagtgagccgagattgtgccactccactcctgcctgggtgacagagcaagactttgtctcaaaaaaaataaacaatagattctcctgacacatttctgttggggatgagggcatgagttaatatgactgactaattgaaagcatcaggtttgcattaattcattcaacatttactgagcaccacctatgtgtgaagttgtgtgtgagaccctgggatattgtgatcaacagggtagatcagttccctgcctaaaaagaatgttcctatctaacaaagggtacaaagaggggaaacttatatcccctgggaacatacaggtagggcacataacctaaacttaggatgttgtggtgggctcttcgatgtagttcttcctttttttttttttgtagagacagtgtttctggaccaaactgagggtcgggctgcttattctcatggcccaataatgagatgcagatgaactgggaaagaagcgaggtttttatttctgtaaccagttacagggagaaggcctggaaattatcaccagaccaactcaaaattacaaagtttcccagagcttatataccttttaagcgatatgtctgtgtgtaagtgtgcattcatctaaagacayacatgattaacttcttctaatctatgactaagatctgagtcctgaagaccttcctctggagcctcagtaaatttacttaatctaaatgcattcaggtgctggagtgattacccttaatttgtctgatggaggcaagatcatggaagtctggagagttcctctagtccccagtaaagcttgtttgtgaaggtctgaggagttccttcagacccacaagaaaacttgtttaatcctaaatgggtcctgttaagacttccttcattattttgtcatgctataagacccgggaaaagcctaggcaaaactcttggtgggcttttgttgcattctagcctttgtatgagggcactgcctctatcagcttttaacatttaacctaaccactcagtcagtgctgaaacagttgttatgtaggcctgggttagtgagacctggcctgccacaatggagtctcattatgctgcccaggctggtctcaaactcctgggctcatgtgattctcctgccttagcctcccaaagtgctgggactacaagcatgagcccagccctagatgtaacttcctaaagtaaaaattgtgtaaaactttagacagggttttctcaactttggtgctgttaacattttgggcctggtaattcttttgttgttggggttgtactgtacattgtagaatgtttagcaacatacctggactctacccataagatgccacaatttggtgacaaccaaaatatctccagacattgcccaatgtcctctgggaacaaactcatccccagttaagaccactagcttagatgaaagataagaaaagggaagttgtagagtgaaggagaagaaaaaggtagaagggtagggagagaagacataagaagtaagagggaatcgttgctacaaaggtcccttagacaataaaaatcatggccccataatgggtggtgggtggcagacgctaagcttgatttgagcatgaagagataactacagtcttataagggcccttataagtcatattatcagcttggagctttattaactatctattgctatgtgtgatggttatgtcaacttaactgggccacatggtgcccagatagctggtccaacattactctgggtgtttctgtgataatgttttggatgagtctaacatttaaatcaatagattgagtaaaacagattttcctccctaaggtgaatgggcttcatttaaccagttgaagacctgaataaaacaaaaaggctgacccatcccaggataagagggaattccccccacccacaagaaagatgggcttttgcatttttacacagagcattttaactcctttgtcccaaactcttccctaataggattgaaatggaacctcaaggctcatggagatttcctccataatttaaaygctgtcttctccaaagacaaattctgccaccatatctagaacaacaggttcagatttgaaatcacttgtttttggtacccactgtaagtgcaaaccaattggccagaagtaggcaatccaggggaagtggcaattgcccagaggagcagagttaattccaggcaagccatatcatagtgatcgataataggcaaagaggcctggacaagctgtgttgaagcagactccagcaatagcaggatggcagggaggaaggcactacattccagaagccaggcagaggatcaagaatcagagatgtacaaatatggaaagagccattcaggaatgagcaagggtacaagctggggaaaagttcattaacccccaatgcccttccaggttcttaatctcaagttgccagaaacttctggatggcacatttgtctctagacaatggtgaccaacagggtgaagtggaaggggaaaatgggtgtgtacattaaatattgcacatgtcacattttacctaaccgatttgagggcatttgattgttttcttttctttttttttttttttttttttgaagggtcacgctctgtcacccaagctggagtgcagtcgtgtgatcatagctcattgcagcctcaatctcctgggctcaagtgatccccctgcctcagcctcccaagtagttatgactgcaggcacacgccaccacacctggctatttttttttttttttattttttgtagaggcaaggtcttgttttgttgcccaggccggtctcaaactcctggcctcaagtaatcctcccaccttggcctcccaaagcactaggattataggtgtgagccaatgcacccagtcatgtttccaatttttgatcttataagcaagggtatgaattttgtttgtgtgcaggtggagttttttcccaaaaattktccatacatccatgcttacttccttaggataaattttgagaagtagaatacctagttaaaagagtgtgactattcttctagtattgacataagctatgtaggcacaaaaggcaatcctagttttactataaattyactttttctgatgcctgtgagtaatcatatgatcacgattactgtacatcctagcctcattgaattcttcatccacgtaagagttaaacaattccttaaagaggaagttaaagtgagtctagtcaggaggtgttgaaatgacagaaattctagggttagaacaaaatgaagggaaatgggtttgagaggagtgaagggtataaaggcagtcagacatccagcaaacaaattactcctctggttcactcctcctgaactgaacctcttctttacaacgaaatgatgctcaaggtattgtagcattttatgtgacttacttaaattgcttttctagcagacttcttccttcctcaatttcttcagttgccctctccttttaagaactacctgcttctgctttaacttttctttcaacctgtgggctacctaattaactgcatggtggctttcattactgttttacaaatgagatacatgattctattgtacaaagttaggaagggaatgaatyatgacaagttcattgaattttaaccccctagttttatgtgtccattatgacgctgccagattgcatttctgttaatctatttactgtcaccaccttctgtataagataagctttttgaggcaggaaccatccagtattgacttggcagtcttgagagcttagaacagtgctggactcatagtaagaacttgtgggccgggcacagtggctcaggcctgtaatcccagcactttgggaggccgaggcggatggatcaygagatcaggggagatcgasaccatgctcgctaactcggtaaaacccggtctctactaagaatacaaaaaattagctgggcgtggtggcaggcgcccgtagtcccagctactcgggaggctgaggcaggagaatggcgtgaacccgggaggtggagcttgcagtgagccgagatcgtgtcactgtactccagcctagcgacagagcgagactccgtcttgaaaaaaaaaaattgtgaaattgatttgttcagtggctttatgttattctttaacttaaataatcactgtatttaactaaacagagatgcaaatgccatgagaaggtcaagcagatcagaagatattttggaaatagatgaacgcaaggaccacagacagctgagcagctgtgtgtttattcccctcacgtttcgttccttcaggggccagggacagccatgtgttctttggcacacagggtgctgttcaggacttccagaggattccagggctccaccttcctgtatcaccagcagcacggtctcatatggatggatggtgcaagtacctccagggctccatgtcaccaccccacctcccccactgctccccagtctcacattcctccataagacacccctgggtcagatctagccctgaagagatgaatgatcaatcactacatgcccccagctgtggggtttgtgggggtgagaagagaggtttaaaagaggtagttttgcttagagtcagggatccaatcaatatttgaaactcttaagtttaaaccctttcttcctctctctttctgcccctaaaaatattttaactgcaatttctagcagcgtgaaaatcaacattattgttattcttccaccctaatctgaaacctttgtgccaccatcctttctctctcccagccatcttctctcctgctttygcccaccccatacacccctccacctttctatcaaagccctcagagacataaaaaatagcccatccttttgaaaatggcaagtgttccttgacttgataaacctgacatgaggctctgtaaatgggactagtcagtgtccaggttgaaggacgttcagctaggcacgggttccatctctgtagctctgtcctggcactgagctcagtatcaaagaaccccagataccccaggtcccctaatccaatagcccctcaccctacagctaagatttaaaaatgaagtatctgatgttgagagagacaaattaagttgtgcaatgatgtagtaaccagaacaagaaagggaagcaatccaatattcactaggtggtgagcagatagtgaaacctgacttaagagtggatgtttttaactctacataatagatgctctcttgtgaaaatgtgtagaaaacaaaataacagtctacatattgaagaatttgaattttaaaagaattgcagagtactccactgcttatgaaattcaagtaatcttacatgtttttcttatctagcttatgggtagaagcagaatgagcttctccagtgggatgaacacagacacttcatattcaacaagttcacactgagcccatcatcattgcttggaaggctgctcctcttcctgtgttctctctcttggccaatggcactgccatttccccatccagaacctgggatactgcagcagtcttttcactgcccctgtctacccctctccaakccattctctacacaactgcctacaggaatctttccaaaacattagttctgaccataactctacttttcttaagacagcactttggctccccattgacatcacagtctttagagtgatgtaatgttcatcattcggtcataagctgcaaatccattctccttctcacctctgtctcctgcatgcaactccacagctgaarggagccaaactccctccactctctcacacctcccagccttggcccttgcttccacttctacctttaccctccattctcatcaccctacactattatctgatgactactcttaagttttcataaccagatcaagtatcgatgtctccaccaacagggaagagcaggcagtggttctcaagtcacatatgtaatttaaaattttctagtattttaaattttagaaaatgtttagaagaaactgatcaattaataacatgttttatttacaccatatcccatatattattatgttgatatcaatatattgaattttttttattaagatgagaggagtctcactctgttgcccaggcgggagtgcggtggcatgatctcagctcactgcaacctccgcctcccaggttcaagcaattctcccacctcagcttcctgagtagctgggattacaggtacccaccaccacacccggctaatttttgtatttttagtagagatggggttttgccacyttggccaggctgttcttgaactgctgacctcaagtgatccatctgccttggtctcccaaagtgctgggattacgggcatgagccaccacacctggtcaatgaatagaacattgattcagcatgcaatcaatatttttaaattattgagatgctttatatcctttttttcctactaagctttcaaaaatcagtctttattttactcttatgacacatctcaatttgctgcatttcaagtgctcagtagccacattagggagtagctgccatattgtacgtaagagcaccagagcacttgagagcctcctagagatcctaatgaaaacagaatcctgtgctatgcttccagaggttccatttctggggagagtctaattttggtggtctggagtggggaccagaaatgttccttttcagcaagaaccccaggcagttctgaggtacatgttcrtctgaccatttgggacttgatagctagatgcactgattgtcgagttacacctataggggtttatgttcagattccaccacctaaaagctgtgaaaattagtaacttcagttctctaggtctcagtctcctcacctgcaaaaataactacctagagacttgtggrtattaaaagggtaatatatttgagacattcagcacagtgcctggcaggtgtctcataatagcagctgtgcactgcacccgcagaaatctctatcacacagacgaggtgtcccttgcatcctcctcccacaactctctgtgcttccctccaccaccacccatcacgcaatgctgtgtcctgtgcttgctatgctgcccctcaactcaactgagaagataaactggctgctgtgtgctcccacattactctgcctcacacatagtaggtgcttagtacacatctttttttttttagaaattaaactaaatctgagcaactgggtttcttgtagtggagcaaaactctttatgcaaaagtgcctcaaggtgtcttatagaacagaagtgtgtaagtaaagtgggrtgtatccctgtcctaacactcttccctttaaagtctatcacagaaagctttgccacagcaatccatggcttgaaagtgggacacctgacagatcgtgttattcagaggagcaagaggatgattctagacactctgggtgctgggttcctgggaaccactacggaagtgtttcacatagccagccaatatagcaaggtaagaagctcaaggtctacattagagataaaacccagtrcatacatatgtgttacatttactctatacttcgttttatagacagcacttgatgtacatagcactgttctatatcatttttataatttccyatgttccattatctgagttttaatagtcatccatattctttactaagtcactgtcttaaaaccatacacagtgaggcacagtggctcatatctgtaatcccagcactaccagaggccaaggtgggcagacggtttgagcctaggaatttgagaccagccttggcaacatggcaaagacccatttctacaaaaacaaaaaacataaaaattagccaggtgtgatagcacacgcctatagtcccagctactcgggaggctgagaggtgggaggatcacttgagcctgagaggttggggttgtagtaagtcaagatcatgccactgcactccagccaaggcaacagagcatgaccttgtcttaaaaacaaacaaacaaataaacagaaaaaaaatatgctaataatatctcacagtttattattattattctctggagaaaagcctggtcaagtactctgagcagagtggggatgtatgtgagagctcctgctctccctagggtgtattagagataaacagttagtccatcttccctggtatttaccccaaggagtaaataagagtaacttcagatgtgcttccttggagcacttccggatcatgatctaggatcaagcaacgacatctcctccccctttcacaggggagagctgtgtattctacaaggatgagaggtattcaatgactagggcttctatctgtggcaaaggttcaagtaagaactatgaataatgcctccaaagatgaagaataactcttgaaatggtgacttggtatactgtattcacactatcactggttgatttgcttttgttccagatctacagttccaacatatccagcactgtttggggtcagccagacatcaggctccckcccacatatgctgcttttgtgaacggtgtggctgtaaggaggttttcacgtcttttcaactattagataatcataataattttagagtcaggaaatatctcagaaattgcccaaattctatattttacagatgaaagaactgaaagtcagacagataaagtggcttaccctctctcctatgtagtaattcagttttcatgtttttacagtaaattgatgcttttcaaacagattgtgtagcagaggaaagaagatggaaggatttagataaaaacaccctaaggtatcccaattcaaaaccttgaatataaatagcaaaaaaatataaaacccatatccagacctaatatcttctgtttttcctgttgtggggccagtttctctcaagtaatgtgttctttattcattcactcattcatccattcaacagatagttattgagaaaggaacaatggccttatagtgtctgtattttctgaaccaaaaatctgtacttctcatctgacagatgatttttatgctttttctgtgtgtcacgggaaatattctacaagatgtaacttggaaacagacatgttgggatttccgagatatttttatgatttatgggtacaatagctcaggagattgaaagttaaagccaacggtgcattccaaagcaatgtcctgaaagcagtgggaaatgcaccagtgacagcaaatagatataaaaatctatttttaaatgaacttctggatattactgttttaatataaagaaaaagaaaatggctaggagaaagaggaataagatcttaaagcagaarataatgatttttaaaatatatagctgaaaagttaatctgagtttgacagttattgtgctattcttacaacttctctaaaagtttgaaattatttcataataaaaaggtacaaaaacgtatggcctcatatggaataaatgacattaaacttgcagtgcaacttatttaaagggtggaggaggaattgccagccacctgattctgcagctttgtttttaaaagggaatatagatctttccaggggccacagcagagggagctcaggccaccagggcaagacccaagctccttggggctcacaagctgctctccaaggtactcccttcctctggcagaggaacagcatttcccagtgcccggccatgtgattaataatcacagccaggccaggtgtggtggctcacgcctgtaatcctagcactttgggaggctgaggcgggcggataacgaggtcaggagtttgagaccaccctggccaacatagtgaaactccgtctctactaaaaatacaaaaattagccaggtgcggtggtgggcacctgttatcccagctgctccagaggctgaggcaggagaattgcttgaacccaggaggcagaggttgcagtgagccaggatcatgccactgcactccagcctaggtgacagagcaagactctgtctcaaaaaaaaaaaaamaaaaaaaaaaagaaaaaaaatcacagacatttctcagattttcttttctgagaatcagatcaaaagaatctcacataaaacaaggttattactaaactaagtccttagtggtccaaaagccattgcattaagggaaaatttaaggctttttgttgctgtttgtgtctgtttatacagattcactccatggattttgatgacacgtggcaccctgccacccacccttctggggctgtccttcctgtcctcacagctttagcagaagccctgccaaggagtccaaagttttctggccttgacctgctgctggctttcaatgttggtattgaagtgcaaggccgattactgcatttcgccaaggaggccartgacatgccaaagaggtatggagagaatttgccccatcaaaaggtagtcacatycccttcatctatcaatcattatctccgtagagctttctgacttagaggccrgttcagaggaagatgttaacattagcacaggtagataagtcaatacaccagtcacatacgaaaccctctatccacatttaaagaagtgacttcaagagtgcaacctggaccgtgagattaattgggcctctcgttgcaaggtgattcatgtcattctggcattcatgggtgtactgagtattccttatttcattctcaaagcagaatctattctgagactagctagcgtccctcagactaatgaggacattcagaatatccttactctgactgttcatcctgcagataaaaaatggtcaaatgtcggccacatcatatggctcagtctcagatttatgttgccacttgctccagcctgccaggagagaagtaaattgaaatactaggtagtgaagtttcagtttcttcaaggcccacaattctcacagtgacttagatgagatctcagcaatcaatagctgttgcctttctggcaataattgtaatggtaccatttataaagaactcactatgtgctagcactattgtaaacatgttaatttattcaaagctcctaaaactctaagaggtagatgttattattatcaccattttattttattttttgagatggagtctcgctctgttgccaggctggagtgcagtggtgtaatcttggctcattgcaacctccgcctcctgggttcaagtgattctcctgcctcagcctcccaagtagctgggactacaggcatgcaccaccatgcccagctaatttttgtatttttagtagagacggggtttcgtcatgttggccaggatggtctcgagctcttgaccttgtgatctgcctgcctcagcctcccaaagtgctgggattacaggcgtgagccatcgtgcccggccttattattattatttttattattatatttttttgagacagtctcactctgtcacctaggctggagtgcagcagcatgatctcagctcactgcagcgtctgcctcccaggttcaagggattctcctgcctcagtctcccaagtagctgggactgcaggcacccaccaccacatccggcaaatttttgtatttttagtagagtcagtgttttgccatgttggccaacctagtctcaaactcctgacctcagatgaccctcccaccttggcctcccaaagtcctgggattacaggcatgaaccaccacacctcgcctatcaccattttgtgtaagaaaaactctacagagaagttgaataattttccccagatcatatagctaataaagtaatggagctgagatctgaacccagacagtgtgactccattatcaatgttcttgatgactacgctatcctgcctcctggtggttacggtttgtayatctccaactctgcttctttgcttttcagattccatcccccttccgtggtaggaacgttgggtagtgctgctgctgcatccaagtttttaggacttagctcgacaaagtgccgagaagctctggccattgctgtttcccatgctggggcacccatggccaatgctgccacccagaccaagcccctccacattggcaatgctgccaagcatgggatagaagctgcatttttggcaatgttgggtctycaaggaaacaagcaggtcttggacttggaggcaggatttggggccttttatgccaactattccccaaaagtccttccaagcatagcttcctacagttggctgctggaccagcaggacgtggcctttaagcrttttcctgcacatttatctacccactgggtggcagacgcagctgcatctgtgagaaagcaccttgtagcagagagagccctgcttccaactgactacattaagagaattgtgctcaggataccaaatgtccagtatgtaaacaggccctttccagtttcrgagcatgaagcccgtcattcattccagtatgtggcctgtgccatgctgcttgatggtggcatcactgtcccctcattccatgaatgccagatcaacaggccacaggtgagagagctgctcagtaaggtggagctggagtaccctccggacaacttgccaagcttcaacatactgtactgtgaaataagtgtcaccctcaaggatggagccaccttcacagatcgctctgataccttctatgggcactggagaaaaccactgagccaggaggacctagaggaaaagttcagagccaatgcctccaagatgctgtcctgggacacagtggaaagccttataaagatagtcaaaaatctagaagacctagaagactgttctgtgttaactacacttctcaaaggaccctctccaccagaggtagcttcaaactctccagcatgtaataattctatcacaaatctctcctgaggcttaccaacatctaaatgactttgcatttggggagattcaatgatttggtttgtaaagcaagggtctgctgcttggttttcccaggaaaaatgaacaaagatggagagagtccagaaacagaactacatatatctggaaggagccttctcctgaaaattttgcaggacagttccacttacctaaatcaagatgaaacacacacacaaaaatgagtttgtaagcattcacaagggtgaaattcaactcacctgtgatttacttataaaattaatctcttcataggaattatgtgtggacttcatgagcctcaaggttttagagggatgtgaacctgcatgtatattttctgacagtggagagggctctggtgcattgtgtcaccaacagatctcctagaccatggcttattaccaagccctccacagtgcaaggggtgctactggggaatgggtgggtttaaatcctgcctctgccattcactagatgtagccttgagcatgttaccattagccctctgcctcagtttccctatttgtcaagccgaagtaaaaagcagtctggaaaaatcgcattttggctctagaacccatggtcttaagcactgcaatatatcacctttcagtataaaaatatttgaatcagagttgcaataaagaatgaaaaggaaaaaagagaagtaaatacgtgagtaattatataaatactaaactgtattaaaataatagaagtgtcatgggggttaaaaatgcaacactaacaatcatagttaatgtgttacaaatccctggtattgttcaataaaagggcaacctattaactctagatgttgattaataagtatgctgtattagtccgttctcatgctgctataatgaactgcccaagactgggtaatttayaaaggaaagaggtttaattgactcacagttccacatgacagaggaggcctcaagaaacttagaatcatgccagaaggagaagcaaacacgtccttcttcatatgaaggagaagtgcttccttcataggaaggagaagtgctgagcagaaggcaggaaagctccctataaaccgtcagatttcaggagaacttactatcataagaatagaagcatgaaagtaactggcaccatggttcaattacctcccaccaggtccctcccacaacacatggggattatggaaactataattcaagatgacatttgggtggggacacggtcataccawatcattctgcctctggcccctcccaaacatcatgtcttcacatttcaaagcacaatcatgccttccctacagtccctgaaagtcttaactcattccagcatcaaggcaaaagtctaactccaaagtctcatctgagacaaggcaagtcccttctgcctatggacctgtaaaatcaaaagcaagttagttacttcctagatacaatgggggtaaaagcactgggtaaatacatccattccaaatgggagaaattggccaaaacaaaggggctacagcccccatgcaaatccaaaacccagcggggcagtcaaatcttaaagctccaaaatgacatcctttgactccatgtctcacatccaggtcattctgatacaagaggtgggactcccatggycttgggcagctgtgtccctgtggttttgcagggtacagccccctcctcccagcttccttcacaggctggcattgagtgtccacagcttttccaggcacatattgcaagccgtcggtggatctaccattctggagtctggaggacagtggccctcttctcacagctccactaggcagtgccccagtggggactttctgtgggggctgcagtcccacatttcccttctgcactgcccaagcagaggttctacatgagggctccacccctgctgcaaacttctgcctggacatccaggcatttccatacatcctctgaaatctagaaggaggttctcaaacctcaattcttgacttctgtgcacccacaggctcaaaaccacatggaagctgccaagacttggggcttacaccccttgaagccatggcctgagctgtaccttggcccattttagcctcatctgggatgcagggaaccaagtaagccctgagactgtagaaagcagcaaggccctgggcccagccaatgaaactatttttctctcctaggcctctgggcctgtgttgggaggcactgctgtgaagagttctcacatgtcctgcagacattttccccattgtcttggtgatcaacatttggctccgtgttacttatgtgaatttctactgatggcttgaatttcttctcagaaaatgggtttttctcttccatcacatcatcaagatgcaaattttctgaactttcatgctctgcttctcttttaaacacaagtttcaattccaaaccatatctttgtgaatacataaaataggatgcttttaacagcacctaagtcacctcttgaatgctttgctgcttagaaatttctcccaccagataccctaaatcttccctcaagttcaaagttccacagatctctatggcaggggcaaaacgccaccagtctctttgctaaaacgtagcaacagtcacctttattctagttcccaacaagttcctcatctccatctgagacctggattccattgtccatatcactatcatcattttggtcaatgccattcaacatgtctctgggaagttccaaactttcccatatctttctgtcttctgagcccttcagacttttccaacctctgcctgttacccagttccaaagtctcttccacatgttggggtatctttatagcagtaccccactcctagtaccaatttactgtattagtccattctcacactgctataaagaactgcccgagactgggtaatttataaaggaaggggtttaactgactcacagttccgcttgactggggaggtctcaagaacttacaatcacggcagaaggagaagcaaacatgtccttcttcacatgatagcaggaagaagaaaagccaagcagaagggagaaaagccccttataaaatcatcagatctcaggagaatgcactcactaacataagaacagcagcatgaaagtaaattgcatcataattcaattatctcccacagggtccctcccacaacacatggggattatgggaactgcagttcaagatgagatgtgggtggggaacacagccaaaccatattatatgtccactgaaatttctaggataaccattcgagaacagcagtagaatgtaccacttccaggttaatagaaggagaaaaattgaattagaaaaatataatctggccaggcatggtggttcatgcctgtaatcccaacactctgggaggccaaggtaggagtactgcttgagcccaggagtttgatgagacagtctggacaacatagtgatatttcatctctacaaaaaaaatcaaaaaaattagccaaacatggtgacacacacttgtagtccctgctactcaggaggttgaagttggaggattgcttgagccccagaggcataggctacagtgagccatgatcatgctgctgtactccagcgtaggcaacagagcaagaccctcaaaaaaaaatccaaaggaaggcaaaaaatgagggggaaagaaatataaaaaaggacatataaaaagcacaaaataaaatggtaggaaaaattcaaatatatctataattacaaaaagagtaaatggactaaatgttccagtttaaaaagaccaagatttcctgaacatattttttaaatgtttaacaactttattgatgtttaatttacatattaattcatccattttaagtgtacggttcagtaagttttagtaaatttatagagttgtgcatgcatcaccacaattcagttttggaatacttccttttactccaagaaattttctcatattatctgggatcaatccccattcccacctccagcccatagtaaccagtgatgtatctctataattctgttgtttctagacatttcggacaaatcaaataatataataagcagtcatatgtgtttgccttctttcactggcataatggttttgagattcttccacatatgtgtcagcacttttttgcttttcattgctggacagctttccattgtagggatatgccaatgtttgtttacccattcactaattaatagacagttgggttgcctccagtttgggctattatgaatagtgtttctatgagcatttacgtacaggtctttgtgtgaacatatgtttccatttctttttgatagatacctaggagtgactctgggtcactgggtaaatatatttttaactttataaaaaacgattttccaaagtagctctatcatgttacgttttctccaacaatatatgagggttccagtttctcctcatacttaccaaaccttagaattgtcagtcatttttatttcagccattctagtgagtgtgtaatgttatctcattgtggttttaatttgcatttccctaatgactcattctcctccatttttccagttctttttattgtgtggtcttcttatggtatggacgtatacctggaatatataagagctctttatatattctgggtataaatcctttatcagatacatgttttgtaaaaattttctcccactctgtggtttgtcttttcattttttwaaaaaaatttatcattctggctttggatgtcatcagaagactttctaaaatccaattatatactttatgcaagacaaataaaaaatgcagaagggttgacggtawaaaagatgggggatatacggatggaatattaacaaaagaaaactggacaaataaatgttagtattggaccaagcattactataaatagtgtcactatgtaacgataaaaaattcaaatcaccagctaactgaaataatcctaaccctacatgcacctaaatcatattgaactgcaagaagaaatccatctaccaccatactgagagatttttaacattcctctcctattaattgatattcaaggaaaccaaaaataaatgggctacataatatttaaacacaatcaacatgtttatacaacaggaattctgtacccaacaactagagatttcacaatcttttagraatctcatagaacatttacaaaagtggactaacactgagccayaatgcmagtctcaacaacttttcaaagtactggatcatacagttattttctctaatcacaatgcaattaagttaaagatcaatattttwaaaaagataattagaaaagctgccagccgcagtggcacrcatgttcgtgcagtcctggctactcaggaggctgaggcaggaggatcacttgaccccaggagattgtggctacaatgagatatgatggcaccattgcactccatcctgggcaacaaagtaagaccctgtctggccatcagagaaatgcaaatcaaaaccacaatgagataccatctcacaccagttagaatggcaatcattaaaaagtcaggaaacaacaggtgctggagaggatgtggagaaataggaacacttttacactgttggtgggactgtaaactagttcaacccttgtggaagtcagtgtggcgattcctcagggatctagaactggaaatagcatttgactcagccatcccattactgggtatatacccaaaggactataaatcatgctgctataaagacacatgcacacgtatgtttattgcagcattattcacaatagcaaagacttggaaccaacccaaatgtccaacaatgatagactggattaagaaaatgtggcacatatacaccatggaatactatgcagccataaaaaatgatgagttcatgtcctttgtagggacatggatgaaattggaaatcatcattctcagtaaactatcgcaagaacaaaaaaccaaacaccgcatattctcactcataggtgggaattgaacaatgagatcacatggacacaggaaggggaatatcacactctggggactgttgtggggtagggggagggaggagggatagcatcaggagatatacctaatgctagatgacgagttagtgggtgcagcacaccagcatgcacatgtatacatatgtaactaacctgcacaatgtgcacatgtaccctaaaacttaaagtataataaaaaaaaagaaaaataaataaataaaataaaataataaaataaaatgtaatccaaaaaataaaaaagcctgaagtatttgtaaatgaagacacacaaattttttttattttatattttgcatcacaaaataaataatgaaaattataaaatatttgggactaaccaatgacaaaaatactacaaatcagaactggtaagatgtaactgaagcagtactttgaaattacatgtagaatcgctggctctctattattacttggattatgctgttccacaggacacatcacaaatccctgatgaatttgtctgaacacagctgatcaaagaaaaggtaaaagaggtttctttaattgtagccctgaggtaaatttaattgtactttcttgatgcattgcagacgtttctaggggcaacatctaaggactattaataatatcctcagataagacctgacagatgcctcagaccaccagcaggggttggggaagccactctctcctgagggggacaagagtactcagggtgaccttgatgttggtcattatgcccactgagtaaactgaaggcaggagaatacatcagggaaatgttggcctatagagagagctgaaggctcctcttcactggcaggccacacatataaatgggagagacagagaggaagagaggggagagagatccactctccacatcctttccaggtgatgatttctttctttttttcttttctgtttttttttttttttttttttgagatggagtctcactctgttgcccaggctggagtgcaaaggcacaatctcatctcactgcaacgtctgcctcctgggttcaagtgattctcctgcctcagcctcccgagtagctgtgattacaggcatgtgccaccatgcctggctaattttctgtatttttttagtagagatggggtttcgccatkttggccaggctggtctcgaacycctgacctcaggtgatccacccaccttggcctcccaaagtgctgggattacaagcaagagccaccgtgcccggctttttttttttccccagacagggttttgccctgttgcccaggctagagtgcagtggcatgatcatggctcactacagcctcagcttcccaggctcaaacaatcctcctacctcagcctcctgagtagctgggactacaggtatgcaccatcatgcccagccaatttttttaatttgttttttgcagagacagggcctcactatatttcctgggctggtcttcaacttacaaagggcgagtggagaccttgcattggaatgctggagttagacctgagccctcttktctcttccttccatgaggctggagaacaagcactgtttctgagctgccctgccctgagaaagcctgagatggggctagaattttgatttaaagtctaggaattgatctgacgtctaggaattgtggcaaatgcttgcgttttccctctcattcccttagggagaayaaccaaagatgctgctcagtccatttttattgttatagggcttaggtacaagcaaattagccctccacatggatcaggccagatcaccagggagaaacccaccctgagcctgggacaaaggcttcaggctcacagagaaagtttccatttcagctccctccctgtacttctgcatccttggcacacatccatggccccgagtcaaactgcctcagtcagcagaaacatttttgccatctttaaagagccctagtgctggctattgcatatgtttcagggatgcctgaggccatgcacacatttggtgattcatgagaaggacccagcatttagtagccccgtggctagggtttactacagtgcaaggatacatgacacgataagcaacagaaaaacacacakgcaaagtctggaaaaatccaagcacaggcttttaatgctctctccctcccctgaggagactcatgaagcaggctccttttgtcagcagcgaaaaattcagtaatgtgtgtgcaatgtttctgccctagaaagagactcagcattcaaagattttacatggttggttatgtaggcaccctctccctagaaataatcagaattccaaactcaaagaagaaaagcgggtattcagcataaaccaagttgcttgcgcagtctagatacaatgaatcattcttatcagctagagagtgggttaaagtgctatgttcctagacaccagccaagggccagcctggtaagcaagtgtttcctaaagcagcagcctcaggtctgctatgttatttcttttctgcgtggcttttaaacctgaaaccccttcctttcctgtttgtgcagctttgyagggtaggaaaatgttatataaaagttggacctcacctccactttaggcattgccactgctctgttgcacttgagccctgtaagctgtgtgttctatcacagtattaactaaagctgatatccccagtaggcttaaaactgtaggatttctgcacagagatccgctgttggtctgatgggcttccctttgtaggtgacctgtcctttctctctggctgcccttaacattttttccttcattttgaccttggagaatctgatgattatgtgtcttggggttgatctactcgtggagtgtcttagtggtgttttctgtatttcctgaatttgcatgttggcctgtcttgctaggttggggaagttctcctggataatatcctgaagtgtgttttccaagttggttccgttctccccatcttcttcgggtactccagtcaatcataggttgagtctttttacatagtcccatatttctcggaggttttgtttgttccttttcattcttttttctctaatcttgtctgtgtgccttatttcagcaagatggtcttccaactctgataccctttcttctgcttggtcgcttcggctattgatacttgtgtatgtgttacaaagttctcatgctgtgtttctcagctccatcaggtcatttatgttcctctctaaactggttattctagttaacagctcctgcaaccttttatcaaagttcttatcttctttgcattgggttagaacacgcccctttagctcagcagagtttgttattacccatcttctgaagcctacttctgtcacttcatccatctcatcctctgttcagttctgtgcccctgctggagaggtgttgcgatcatttggagaagagccattctggcctttcaggttttcagtgttttttcgttgattctttctcgtcttcatgagtttcaatctttgaggctgctgacccttgaatgaggtttttgtggagacttttttgttcatgctgttgttgttgctttctgtttgtttttctttcaatggtcaggtccctcttctgtagggctgccgcagtttgctggggcttcacttcaggccctattcatctaatttgctcccactcctgaagatgtcactcaaggaggctggagaacagcaagatgggtgactcctccttcctctgggatctctaacctcaaggagcactgacctgatgccagtaggaatgctcctgtatagggtatctggcaacccctgttggaaggtctcaggtctcacccagttgggtggcacagagaacaggacccgtttaatatagcactttgaatatcccttggtggagggggtgtgcttygctggggggaaatgcactcgtctgggctgtctgggttcctcagaactagcaggaggaaagactaagtcagctagtccgtggagactatggctaccccttcccctaggggctcagacccagggagatcagggttcagtccctgagcccctggctggagttgttggagttcctgcagggaggccccacccagtgaggagggatggrtcagggtcaggcctgaagaggcactatggctgcatctgccacagccagtgtattgggctgtggggaatacctcttgggaccaacccgtccaacctccctggcttcagcggggagaaaagcatggcctggagctatagtgatggctgccacccttcccccaccctgggagcttagtgtgttaggcagctagcagtcccagtgttggctgctgcccctctcccaaggagctcaaatggcttagacagcaggcagygacagctgtggtgctcgccactcctcagctgggaacttggcaggcttaagcagattctagctgagtggctgttgagaatctccatggctccgtggctgagaccctaggtcccagtggagtgggctcacgagtgggatcttcccatccgtgggttgcacagttccatggaaaaagcacgatttcccaggctaggtagcaygctcactcatcacctcccttggctggggtgtgggggctcccctgacccacgtggctctcgggtgggccaccrcaccacactgctcttccttgctctccatggatcatgccagcctcctagtcagttctgataacagaatctggacacctcagttgctggcgcaggattcacacactgttatggtttttgctgggagcctccgatctctgttgcatagtttcacatggctggggaggcctcacaatcatggcagaagatgaagaccaaagrgatgttttacatggcagcaggcaaaaaagctctcattctctttatggctgcacagtattccatagtgtatatgtaccacattttctttatctagtctatcattgatgggcatttaggttgattccatgtctttgcattgtgagtagtattgcaatgaacgtacatatgcatatgtctttataatagaatgatttatattcctttgggtatatacccagtaatgagattgctgagtcaaatggtatatttgtctttaggtctttgaggaatcaccacactgtcttccacaatgtttgaactaattcacaccaacagtgtataagcgttcctttttctccacaacctcgctggcatctgttatttattgactttttagtaatagccattctgactggtgtgagatggtatctcattgtggttttgatttgcatttctctaatgaagatctgtgattattttaagccagctgcttataatgagaacatgtgagttttaaaggaatgtttataaattatattttataacaacttcgcttggaaggttttatctaaaaaacatcacactcagagaactcccgtgtgataggccccagggaccaccgttaagtactgtgatagcttgtgtaaaggaaactctttgggggatactgggtaaataatgggctttcattcaatttaacacgtgtgtattgagggcttactatctgccaggggatattctcagtgcaggtaatagagcaatggacaaaataggcaaaacctcctgttctcatgagcttacgatctattatgggtagagagacaacaagcaaaataattgaataagatgaggaaagtgctctgtgcctgttctgggcagcctctgcttgctttgttcctcccctggtaggaatgtaagcttctggtgctgagttaggttcagggactagaagagtccaaagaatgtgagcctccctttaatggaattaaaagcttccagttctttctgggccatgatataacctatgactgcaaaagaccagtggtaccatacaaaggtagcttccttgtcgattctagcaagacttccctgcacagagcaaagctatagggaatcaaggtagggggcaaaggggcaaagtcatgacaaaatgtgctgcttttcattccagcagagttgtgcaagtatgtacatgtgtgtgcaatctcttctcccaacaaaagatctacctgcaatacttcgcttatttaaaaaaattattcattagtaaaattactcatcctctgttctctgaccataaaaaaaaatagcaccgtaatagttcacagaaagtaataattcaagacattcaaagcaggtgagtatgtcataggcaactactcaggctcttgcttaaaccctgggtgcccagtagtttgcagctgtgtggcacatcaaaagaatttatgatacatggtaactttcttaaagcttcatggctcagctgggaatggtgactcatgcctgtaatcccagcactttgggaggccgtggcaggaggactgcttgagcccaggtgttcaaaaacagcttaggcaatatagggagaagctgtttctacaaaaaagtaaaaaattagccaagcatggtggcgtacacctgtaaccctagcttacttgggaggctgaggtgggaggatcattagagactgggaggcagaggttgcagtgagctgagatctcaccactgcattccagcctgggcaacacagcaagaccctgtctcaaaaaaaggaggtgggggggggtcatagttttattggaatcataaagaacagaacaggccaggcacggtggctcacgtctgtaatcccagcactttgggaggcagaggcgggtggctcatctgaggtcgggagtttgagaccagcctgaccaacatagagaaaccctgtctctactaaaaatccaaaattagctgggcttggtggcacatgcccataatcccagctacttgggagactgaggcaggagaatcagttggaaccgggaggtggaggttgyggtgagccgagatcacaccattgcactccagcctgggcaacaagagcaaaactccgtctcaaaaacataaaaaataaaaagaacaaaataaacaccttccaagaaataactaaaattagtttagtcttccagcgcagttgtaaatgcagaattcaacattccgatattaccatctcatttaaaaagttatcctttttgtgcagttattacaaacaagtcaaccaaccccagttacrgctggcacctatgaaggagccaacctggaggttcaataaaaactttaaaacagcccaatgcccatctttcagaagcatggcatgatagtgttgcttctgactctaaaaaataaaaaatgtacttttttagaaaccatgtatgtcagtataattgctacttacttatgagtcaagatcacaattaaagtacctaccatcaagtgaaagagtatgtaattcatctggtaggagctaaactatttttacctgaacaatttcttctaaatattatacgtcaagcactatatctcaagcctgctgtaaaacatgtcctaccatttttactaatccaccagaaatatcatgcaaagagccaggtgcagtggtgtgtggctatagccccagctactcgygaggctgaggcaggaagctggcttaaacccaaaagttcaagactgtagtgcacaatgatcacatcagtgaatagccactgtactccagcctgggcaacatagtgagactttatgcctaaaaaaaaaaccatgcagaagggccatgccatgaatgcacatgtcagtgccattttgttggtaacatccccataggatttactcacatccatgtttacagctagggccctgtacagcagtgtctctgtcatcaccagaaaacatatcatgaagagaagttataactgagtggggaaaaaaatgttccttaggcacctggcaacatgaccgtgaaaaaggttaaaattactggcttacactggcctctcaaacactgccaagttcagaaaaaaagctcacagatattatgcacccaagaaatcggtcccaacatgaggcttcacttaaatacccagttagtaagataaatgaagggtaaatgtactaggatcaatatgaaataattaaagcaagcgccacttgattcttacagctgaatgatatgataacagaattgccacgttgaatttttttctttcagagtaagycaatgtattaatagtttgaaagaatatattttccatatgattcaagccatctagtcttatcaccttaaaccacagccccttatcacctccacctccaccctaatgccaatcaccaaatgctgcagccccgtaatgaatgataatttgtctagcaccctgggaggccgaggccgggggatcacttgagcccaggagttcaagaccagcctgggcaacatggcaaaaccccatctctacaaaaaatacaaaattagccaggtgtgttggtgcatacctrtggtcctagctactcgagaggccaaggtgggaggrtcryttgatcccaggaggtcgaggttgcagtgagtcatgatcacgccactgcagtgcactgcactgccagcctrggtgacagagcaagactctgttwcaaaaaaaaaagataatttgtcaagctattagaaaagtggtcacgtctatatttatctgcaggaaggaaaataggaaagcgccgtaggacctgcttactcggcaggcagctttctatccttttctttccctctgtccacattattatcctgacccgctgtgacttcaccagcaggaaggtttcggctgccaagccaggggaaatgcagcagcagtagcgatgggcttcctcccacaggggaaggcttgaagtgtccttcacagaactgccgacagagcagtctttcccatccagggcagctctgagctactccaaagccaccagcaaagacgacgacccaggattatttaaggcagctgacaagaagaatggatgaacaaatcttgggcaaagaatgagggtatagaagagcaacacataacacacgtggttaggatgtaaaaatagtatttctttaatgtcttctagaattgatagtgactttgaattaattcattaactttgtttttttctttcccattaactttttttaaaaagtcagtaccgcagctgggcgtggtagctcatgcctgtaatcccagcactttgggaggccaaggcaggcagatcaagaggacagaagtttgagaccagcctggccaatatggtgaaaccccgtctctactaaaaatacaaaaattagctgggtgtggtggcgtgcgccctactcgggaggctgaggcaggagaattgcttgaaaccgggaggcagaggttgcagtgagccaagattgcaccactgcactccagcctgggtgacacagcgagagtctgtctcaaaaaaaaaagactctgtctcagtatcacaacctataatcgtcaagataccttggagatctttttgtaaaaaactgatgacaaattctgaaacacactcaaatcattaaagacattacatagcttcaatgtagccttatagcaagtggactcaatagacataaagggcttatattaacctaataataataaataatcattttgmatcaacagtatgaaattctgaagattcaagctgggacacctatcatgatgctaatttttgctaaatatttcaagtttggtacgaagtagaactatatctattaaaaagcttttgagataactccatacattttaaaaacataaacctatccttatgtgctaaaatawttttttaagtagcagtaattttgacattaatttgctagtaatactaccttagatgtgaaaayactaatattagcaccagacttcaggagcaataacccttacaaacgtctctcgggttaaccgtattagcagtagaagaaaagagtgaattctcaaaacacccacaactcaaataaaatgaatctccctagccctttctctctctggggatttgtagatagatttaaacttacattttattcataatgtgtagcatgtctccaaagacagttatccaatatccatgcctcctggtattgatgcccttttggggtcccctctccttgaatcgaatctcacttttgatccattgaaagctgcagaagtgatgcagagagacttcttggctacattgtaagaggaaagcccaagtctcttgtgctaaaattcttaattgggaggacattaggttgagagagctcagcactctgggttcctacaaaagcaacctgaaacccaactcagagtgaacggtcacggtcatcccaggaaaacaacacttaagcttaaccaatcagaaaccaccaaccaacctctaactagagactttaccaawcagaaattgccaatgaacctcaaactagtgacttttcactttaaccactcaaatggttttttgtggggtttttcttttttttgccttgcttccaagaacatctagagctgcccaattcatgagctgtctattcaaataaactggttaaaatttgaatgtgcctaagtttgtcttttcacacttagaatccttgttctggggaatgccaaattcgcatggaaaaagcctaaccaccctgaggcctacgagttatgcggaagcccaggattgccacagggaatggtcacatggctgcatggccagccttcagctcttcagccatcctagcccaggcaccagacatgagagtgaagacactgttgtggatatccagccaagccaagcctttagatagctgcagccccagcctctacctcaatgcaacattattagacaccccaagcaaagcccagctaccccagctagtactggggctcctttttctgcctaagatccagacccaccaaaaggtttcctccccctctctctaagaccaagaatgtcaccatacctgatcagactctttcacaagataacgtgcaagttaatctctgttccctgatccattcattcattgtccctagaaatcccctcaatggaattcttccaccccttcctgcaacctgtttcgccaggatgatgtataagcttttgaacccccttaggggatgggtaatcactctgtgattcgcctggtgtacaccttaattaaatttgtatgccttttctccaattaatctgccttatgtgggctgacttttctgagaatcttcagagggcaaagagaaagctttcctttgacctctacgttactcaacccacagaaccaagaaagataataaattattgattaagccatgaaatgtaagcaataaatgtctggaacactatatatgtaaaatagcagtaagcaacctatttggtagatgtatagatagcaacaagcaacacacactcctgatccaatacaatgattcccaattctcactgtgggacatctccaaagtgtctccaaaagctttagaaacattgtgaatgaactgatataatctgacaataaaactaactttgtttagtttgaaaaatataaacataggacatactattccttatgaagggaattaaaaagaagtcaaagaaaaatatctgagaaaattgtactcataaatgaatcttttatttaagtaaataaatcttttttttttttttttttttttttgaggcagagtctcaatctgtcacccaggctggagtgcggttgtgcaatcttggctcattgcaacctctgcctcccgggttcaagcaattctcctgcctcagcctcctgagtagctgggattacaggcacgtgccaccacacccaggtaattgtttgtatttttagtagagatggggttgcaccatgttggccaggctgatctcaaactcctgacctcaagtgatctgcccacctcgggctcccaaattgctgggattacaggtgtgagccaccatgcccagcctagtaaatcaatcttttatttcaatttatttatttcaataaaagattgatttatgttttattgatcacaaatcaaattaaagtctaattttaaatcttttatttgaaaagggagcgttatcaatctaaaactgatttctgccctgaaaaggtccagaaacaggcaaaacctctactgtaattttcaaagtctgaaggcctcaaagggtggtctgcctgcaacaccccacctgttgcctagaagccgaatcagaatctgcattgtaacaagatctccaggtgagtcatgcgtccattgaagttgaagaagtactggcagagagcagcagttcccaaacttgtctgcacatgagaatcatctgggaatctttttaaaattccgaaatccaggccataccctagaccaacgaaatcatgggacacaggcgttgatggttttgaaggctaccaggtgattccaatgtgcagccaacttcgagacctagtggtcaccctagatagggcactgggaaatcacttggggagcataaacactaatattggtttccacccccggagagtctcatgtcgctggtctcaggtatgacctatgcatctggagtttttaaaagctccaggtaattctcatgtacagcacagtttgtacagccacagacctggagccaggcacagaagatttcaaaatggcagctgagcctgcaccactccttggcgaagaagggtttaaagtcagtgaaccttaattaaaatgaacagttggcctcacagttttcagctaactcaccaggtagaatgacagcatcaagcttgctcgagttcaggtctgccaagtcttggacgtccctccgggctctcctggcactttcctccagcacatttctcttctttctgttgggctccctttcaagtgattaacgatgagcatctgctcgacattaggcgcaaataccttcaccttcaaaaatagaaagaaaaacacatgatgtcattacctctatgaaaacaatcaagcaacactatctcagaatctaaaccaggaagccaagaccaaaagccgcgaagtgattctgtatgccttcagggccaacatcagctagamatattatagctcaaccacaaagaagaaagtgcaggggccttctaaaagggggaaaaaaagagctgtaaattagcttccaaaaggaagggagatcaagtagattacagagaggtggcttttcagataaatatatatatatatttctttaaatagatgaaagagaggatgtaattttatagataggaacatacaggactcaaaaaattggaggattaaatcagcccttgagatccttcaaagcagtgcttctcaagctagctacacattagaatcacctggagagcttgggcaccaacgaggccaattcagtggaaatctctgggagtgaagagccagcctgagccttgctccagcttaaaatctccccaggcgattctgtttgtcagggctggcaaccactaatctaaagcaaatgggagataaaactcagggctcagagttaaaaccccggagtcttcaatgccaagaccccgcagcagggcatttggtagctctcgcttgatccacctccatgcctccagccccaccaagctctgggtcacccccggttcatcctcagaaacactcgagaggggaggacatcactctagtttccctgtctccaaccctgggatcctgtaggggccctgatctggggaaacatgaggacgtggaggcaagggaggaagctcaggggagacacttgtatattgggggttgcctttsagccacaccttcttcactggcttctattccaacctaaaacacacaggtcagcttcaccaggaggtacacgaggctggtctgaatcaaatgtcccttgactctctgaaaggatggcattagggctgggaggcataaaaatcaagagtctcagcctcttgttactaaactttgtatttcactaaagtatatgctaagattctaaacattctctcttcgtatgttgttttataaaattgaataatagctcctatctgatataccatatatacatacatatatgagcttagaatctcatatatatatatatatatatatatatatatatatatatgagaaaagactttgaatattctgaagggcaagaaagatgcagatrcasatacaggctgggcatggtggctcatacctgtaatagcagcagtttggaaggccaaggtgggagaattgcttgaggccaggaatttgagacgagcctgggcaacatagwgagacccctgtctctacaaaaattaaaactaaaaaattagccaggaatggaggtgtgtgctgcagtcctacctactcaggaggcagaggtgagagaattgccygagcccaagagtttgaagttacartgagctttgatcatgccactgcactccagtttgggtgacagagcaagaccccgtttaaaaaaaaaatgctaaaaacatggatttgattttaaagaattccccaaacaagttggccttcagttgtttcacggaataatcagatgaacatgctcaaggagtgaaacacgttttcaacatgtgcacgtcctttggaactgataagaaagcactgaggcatttactgggttgtaatctagactcaataagtccatgtacctctcccggacttcatctcaagcacagagacctgagttcattaaatactcacaaacccyagtgtgtaggacatcgcccttcacccattaggaaatcagtaactacttgttgaaaggatgaatgaataacacccacattaatcttaatacccttcaagtgaaagaggtgctagatatttcctttcctaagttttagagaaaagagaattggcttctaggactgactttgtcactgcctagtgatgaccttaaagaagtcatttttcctcccagggaaactcagccaggagattgaacagagatgtcctccagcttcaaacttcaaatcctgcagacaaagaaattaatgaattgtatattttaacttattaaaaagaaaggtgcagcagctgtggcggttcctcacaaagttaaagagaactaccatgattccacttctaggtatatacacaaaagaattaaaagtagggactcaaacaggtatttgtacacccatgttcatagcagcattattcactacagccaacaacccaaatgtccatcaacagatgaatggtacacaaaatgtggtgttctacatacaagggaatattattccttccttaaaaaggaaggaaattttgacaagtgctaccacatggatgaaccctaaggacataggccaagtgaaataaggcagtaacacaaagacaaatattatatgattccacttgtagtaagtacctagagtagacaaagtcttagagatagaaagtagaatgtaatagaggctacctggagctgggagaaaggagaatgaggaattagtgtttcacggttgcggttgcagtttgggatgatgaatatggtctggggacggacagtggagatggctccacagcattgtgaatgcacttaatgccagtcgatcacacactacttaaaaatggttaaaatggtaaagttcatgttacatatgttttactccctccccctcccctccaaaaaacaaaacastattggcaaaggggtagcaggtgaggggcaggctggtctggtccttgtgactgcgaacatccctgctgcccgttttttgtctgaagcccggctgggtcgctggagatccagcggagtgtgcggagggaggcgtgttggataccttttaaaaatgagaagccccaggccgggcgcggtgactcacgactgtaagtcgcggcccaaccctttgggaggccgaggcaggtggatcacttgaggtcaggagttcgagacaagcctggccaaaatggtgaactcctgtttaaaaaaaaaaaaaaaaaaaaaaattagcagggcgtggtggcaggagcctgtaatcccagctactcgggaggctgagacagaagaatcgcttgaacccgggaggcggaggttgcagtgagcccagatcgtgccaatgcactccagcctgggcgacaagagcgagactccgtctcaacaacaacaacaaaaaaaaattagaagcccctggggacggagagcattaggacaaatacctaatgcatatggggcttaaaacctagatgatgggttgataggtgcagcaaaccaccagggcacatgcatacatatgtaacaaacctgcacgttctgcacatgtatcttggaacttaaagtaacaaaataaaataaaataaaataaaaataaaaattagaagcccgagagagggaaaacagcttaggaaggggttgcccccgccactccgcaggctgcagagggaagagaaagcgcccccgtggcgcccccagggccgtgcagcccagacctagccccgcagccccacataccccagcacctccgaagctgcgtgcagagccgctcgctcccacctccggctgcacccgcgcgcccccttgcggcggattccgctctggcgcatagccccactggagcgctggcgcgttggcgatggggtcccaggtgggagagagatctgtccgctgaacctgcgcatcccggcccctgcggaggctgcagagattctgccctttctgttcggagggaagagagagggcgccagggagacataagctagatttttattaatagataactttatttgaaaattatctttaaacgaaagagcaaggggaaaaatggattctatcctttgccgcactactaaaaagtaacttccattcaacttatttcaaaagagaacgtcgatattgatatgcaatacttttaattgttttaaaatatttaattgtgtgcaataatttttttaactgctcagttccaaagctggaagttgaagtgatgtttttgacagggaagactgaagaagagaccccattgcatcttcatcggagctggaggacaaaaaaaaaattcttaggacacttaacatggagagtttgagatccggatacagcgtgggctgtaactaagggcagtggaagcaggcagccttggctaggatgccgctgctcctcatgacattttgtctcacaaacttagcaagttcttagaaagtccaaaacgccatatgtgttgcctaattttcttatatgatcacaggaaataaataggaaaaatgcagataatttgcattttatttgataatttttaaataaaagttacttgttaataaaatttcaggtaggatgctccctgagtttcttctgtacaatatcattcattgaccagatatttgaagaaaagttattctttgtttttttgagagcaggtactgtttattaactgaccagcttagaaaaataatcatggtagacaccttagttcattattctaataagctgttgatctggtcctccctgttgccagcatctccaccttctacaaaatgggtggtctttttcttctttccacctcatggagaagataatttgaaggaccacaggaagttatttgcttcttcgaagcattttccaacagtatagatctcatgaatcagatcttccgtgcagatgatgccatatttaccaagcgttcgagcaatcaaagcgttatctgtcaaagcaattcgcttcttattgattttgccataaccccgcttgtagattagtttatttactgacttcagatttgggtaccccctgcaatatatggttctacaatccccagcatgttaattgaaaccttgttaagcttcacaaagtttccactgaagatttgacgaaggcgaagaagctgcaacacctttcggacctttgggctcacaccactgatacctctgatcctgatgacaaatgccaatttgggttctgcaggtacatagaagttgccggctttgcttgccatccttgccattcaaatttaagttccgtatatctgtctatattccttgtgatagtgcttcgctttttcatagataagcttcctccttgcctttcgaagcatcttttgggcaaacttctttctcaggcatttgatcttcagctctgtgaaatttcttcgctttttcttaagggtttctggtacagcaggaaactttttcttcttctctttgacactctccatggttccagcgggaaaagaggaactattcctttattattaaaagatgaaatctgcaatatccagcaaacattactttccctactggatctttaaattattagtcccatgttcctctgataaaaattcactaagcctttatgtcctgggtgctgaataaaccctgcatttactttcaagaagaaacctacctttcttaacctggaggtagattgctgctcataagtgacagatggagtactgtaaatccccgagggtgattctagctcttgacccagtaggatatttactgtcaacgatgcctagatttagaaagaggatgtaaacgtggtgtgacaccagacagggcaaagagcaactgcttgtggaaaacacacatgcatccgtcatcactgcagatgaggaggaaaaggaggacaaggagtgaatttgaaaagcaggataacttagtgtaggtctgagtgcccaagatcaaacctgactccaccctcactgccttatgtgatcccgagaaattactcaaaatatctgtaccaacgtttcctcaggctgaaagtaggaagtagcacctttttcatagagttgttggaaagattaaaaatagtaaatgtcatctctgtcaaaaccttgatactagtgtatttctgttcactgaatggtttgtacccctttagtttccttgatatacgttgattaaaaaaaaaaaaaaatttgactgggcccggtggctcacgcctgtaatcccagcactttgggaggtagaggcaggcagatcacctgaggccaggagtttcagaccagcctggctaatgtggcgaaaccccgtctctactaaaactacaaaaattatgtgggcctggtggcacatgcctgtaatcccagctactcgggaagctgaggcagggaggcagaggttgcagtgagccgagattgcatcactacactccagcctggcctacagagcaagactctgtctcaaaaaaagaaaaaaaaaatcaacaaaattgattaaaatgtctaattggcttttattagtgactcataaaacaggcagttgctaatcaaaatagagggagcttcaatgagcctggcagaccagttggttttcctaaggtagcttgaacagaaatagggaaacaggaatacaaaaagtgaattggttaacatcagtttacttcaggttactttacttataaagggttaaagcagagaggacttccttaacatgctgacttaggctgactgggccctttctgattgcttgctgtgaatctcttgtttttacgaaaagccagtctattttgggaattttcccgtttacgtttcagtttgattacagttcgattacttagcacgagcgaccccattttggttcaatctgttgcgacctaatgcaggggctcagttcaaaaccatggcctctcatacattttatttaacaacacaaagaaaagagtttttgttctgaagccaattttcttgcggctattgataaatcgatcataacagaactaaaaaatatattcaataaacaagtacaagattaaagaattgtctaaacaatgtaatgtaataagcaaaataaatccaaatcacttgatttaggattagggtaaggtgttccttatggctccacagtttgtttttaagtattacctattaagtagatgtctcactctaatctctgccttcagtgaatattataaattttaattttattaaattcacacttaaatgatgcttttaaaattatctttgggtcgggcacagtggctcacgactataattccaacactgtgggaggctgaggcaagaggattacttgagcccaggagcatgggcaacaaagtgagactctgactctaccaaaaacattttatttaattagccaggcatggtagcacaggcctgtagtcccagctactcaggaagtgaggtgggaggatcgcttgagcctgagaggtcaaggctgcagtgagtcatgatcatgccactgcactctaacctggacaacagagcgagaccctgtctcaaaataaaaatgaaaataaaattatctttgaactaaaataaatgatgctttaggcaagtgaaattgtcgaaactctgaaaataggatgtacgtatagttgatgtatttgtttagcccagtttatcatgtaaacaacaggttagtatacccaagtttcagaaacactttgggggttcattaatttttggttacctttaagattttcttaacctcttacatgaatatttgtgtcagggccaggctctgtggctcatgcctttaattccagcactttgggaggccaaagcaggaggatcgcttgagcccaggaattcgagaccagcttgggaacgtagtgagactccttatcactacaaaaaatttaaaattatttgggcatgttggtacattcctgtagtccagctactataggggctgagagatgggaggatcacttgagctaggaggctatggctgcagtgactgtgattgcactactgcactccagcctgggtggcaaagtgagaccctgtctcaaaaagaaaaaaaggagtaggaaattagtgtgtctagggccggagctcttaggcaaactggtgaagccccttctcagaataatgcttttaacgcctaaaataaaaaatgagattgtaaatgagaaactaaaaattagcttggactttaatctgccctcgtattcattagcctggactgataaaaccagcctcaaaattaccagaaaacagtacttctctcaaaccacagtaaatcataaagtgtcataacaacctcctttcttttctacttaattttttttttttttgccaagtcctttatggaagttgttgtgcgtgtctctgttgtctttgtggaaggccagagccacacggtcctaagagctgggaaccaggaagcataggctgatctgaagaagacacttcaatcatgggtgatattaaaaattttctgtatgcctggtgaggcaaaaggaagatgactccatcctatgaaattagagcattggggaacaaaagtaggcagaaattcttgtgtgaggttcaggtggaagggtataattacagtggcataggaaattccaccaataaaaaagatgcacagagcaatgctgccagagactttgttaactatttggttcaaataaatgaagagtgaagaagttccagctttttggggttgcatctctgcccccacttactgatattcctgacactacagcaaatgctgaaggaggtttaccaacaaccatgggaggtcctcttccgccacatctggctctcaaagctgaaaataattctgaggtaggggcctctggctatggtgttcctgggaccaaggagccaacttgaaggattactactcaagaaaggaagaacaagaagtgcaagcgactctagagtcagaagaagtggatttaaatgctgggcttcatggaaactggaccttggaaaatgctaaaactcatctaaaccaatattttcagaaagaaaaaatccaaggagaatataagtacacccaagtgggtcctgatcacaacaggagctttactgcagaaataaccatttacatcaagcagctgggcagaaggatttctgcacatgaacatggatcaaataagaaattggcagcacagtcctgtgccctgtcactagtcagacaactctaccatcttggagtggttgaagcttacttcagacttacaaagaaggaaggagagagagtggaaccttacaaagtaaacctctctcaagatttagagcatcagccacaaaacatcatttgagagctaaattttgagattatgcccccgcctgaagatccttctatgccagttgcactcaacattggcaaattggctcactttgaaccatctcagtgacaaaaccaagtgggtatagttcctcggtcacctccacaatccagatggaatccttggactactagcgacattgctgagggacctctggcttttgcttctccagagcaaataagcttggacctcaagaatgaattggtgtaccagttggaacaggatcatgatttgccagcaatcttgcaggagcgagagttactgcctgtgaagaaatttgaaagtgagattctggaagcaatcagtcaaaattcagttgtcattattagaggggctgctggatgtggtaaaaccacgcaggttccccagttcattctagatgactttatccagaatgactgacagcagagtgtaacattgtagtaactcagcccagaagaatcagtgtagtttccatggcagagtgagttgcatttgagagaggagaagagtctgtaaaaagctgtggttacagtgttcaatttgagtctgtacttccttgtcctcatgccagtataatgctttgtactgtaggtgtgctcctaagaaaattagaagcaggcatttgaggaatcagtcatgtaattgtagatgaaatacatggaagagacattaatactgacttccttttggtagtactgcgtgaagttgtttcagcttaccctgaagttctca

SEQ ID NO: 97931 - DNA, 39088 bp, Homo sapiens
ctatagtcccagatacttgggaggctaaggcacaaggattgcttgagcccagaagtttgaggctgcagtgagctatgatcgcaccactgtgctccagtctgggctacagagtgagagcctgtctcgggaaaaaataaaaaaagaaaagggtcaaggaaggtacacaaagatgtttaagcttggatttgaaggatcataggaatttaacaggcaggcaagggcatcccaggtccaagaagagggaagaaggtgtgcaaagagaaagagatgcgagtcagagggggacttctgggccaacctggaggaggcttcgtttctagtcagggagctggggagatatacctgaaggacataggagggcctcttcctgactaagccctgttgcctaccaaccccccacctcaactcctgcctggggctcttcctgcccggccagccccctccgctcctgcggaggttgggagggagagctaccggaagagtatgctgggaagtggttcgggggagggtttaataagttcccagcaccagccaaggtcaacaggtatacctgtcagcccacttgccagggttgggaacagagaggagaggctgggaagggaggagagaagggaaggggttattttgctttccccaggacaggaaaatgaagggtcagagctgcagcaagtgggcagtgtggctcagcacctggaaggacctccccacctagaggggtgtgtggaagggccccaaagcaggcatgagggacagagtgtcatcttctcaggagagaatttaagaaatccctctccctcccaccttgggctgggtagggagaggctgggtggatgtgaggggaagacctggctcttgactgcaagcatgggcgaacaggccaggatgaagatgttagggccagggtgctaccatgcaccgtgcagtggtcaaaattgtgcaccccctcaactgcccctttaggccacatcttaggagagtccaggtgagtagaggcagggaagaggaaagggatcaggagaggggtggccagtctggggcaaggctggggaccttccaactgaagaaggaagacttgtggtggggggagtttggggccccacagagtggggcagagaaggagacagcctggaaggagtgatggggagaccccagagagcccaggaggcatgagggaggtgggggaagcgagggaggctcacggggcaccagcgcaagcaccgcacacaccttctgttgtcactgtggctcacgaagtgaactctcctcccccgctgggggagaaggaagctgcctgggctgccacctgctctcctgccttacctccccccacagccctcatggatccttctctaccaggagggcactgttttgtaggcttcagtccttttgtgggcaagggaaggtgcccggcagggttggggcttgtcagggaagaatcgagggccctagagagaggggcacagcactaagtcttagcttgaggggttgtgctccaaggctggagctctcacacttggctcaagatgaagctctgccgcgtccccaaggtcagggtagggtgatttattgtgcttttattgcctggatagcttgcccagagccagcaggaggtactgggctgggagctgggggctgggtggggcagcgggcacatacaaagcaccctctgtgcctgtccccgagttggcaggagcatagcaccctgctcactgtgccggaggtttccagcctggccctacccctctgggccttctgaggggaggggccactggcagaccaagaaggaactgcagcaactccccattccccacccccagcccctcctcagcatcttgtctgtggcctgtgaactttgtgtcgcatatgttctaagatcctgccagctcctgcagcctctcctcagtggcccctcaacctctgccatcccccagaacccctggccttggcccctttctctaaccccttgctcctttccatcttttggaaacttgtctccagctgcccacactgttcccttcccagccctatctgagcaggtctttggaggctgggggggttgctttctaggtcaccgcagagggagctgggaacctggggatgtgggtcaagattgtgggggccgcatctgagcatgccgcatcccccggcacagactgcactggctgcagactattatgtcctcagcctcggaattgttctgtcccttggagcccggggcaggagtatgtggattggcatctatgactgggcagtgccagggagtggggactatgcatcgcatgggaggtaggatcagggtaagcagtgagccctcagcaggctgggcacccccaagaaatggaaagtggcaaatccccaggccctggttcctacgccctgtgccttctgcctgggcttgaagctgggagacactgtctcccgtactgggtacttggaaaatcaagctctccagccagggaatgttaagctgctgctgtgcccgcctggtcttgcccagcctagtgccctatggtgtgggggagctgcctgggggctagcatcttaggacagcttaagagccaaacatgatcaaatctacccctggctgcctctgccctggtctgacacccatcaggctgacctgtcaactttggcctttgaacttgggcccctgagggggtattctctgccccaggcctacgggaaggaggctgggggctaggccacaggctatctccagatccatgggctgtgtctagctgacccttgctttcctcggtctcctctgtgccagctgtgcagcgcattgctgagtctcacctgcagtctatcagcaatttgaatgagaaccaggcctcagaggaggaggatgagctgggggagcttcgggagctgggttatccaagagaggaagatgaggaggaagaggaggatgatgaagaagaggaagaagaagaggacagccaggctgaagtcctgaaggtcatcaggcagtctggtaagctgaggggcctgtgacatgtggattaactgtgggtcctccttgagtatacgaggacgtccccttctagttcagtgtctcatacacgcaaactgtagtgacaccacaggggcctccctgtcttctcgctccatggggtgccccgaactcagccctacctgagacatgggtttcctccatccttggctcagtccctctcccaatcaggttttccctaataattcctctcttccctgagaattaaggccaaggccgtttggggtttgaggctagagccaaaagaggacttcccacctatggcagtaagggggcgtgaggacattcagggatggaggaccaggagagtccaacacccctgtcacctgcatttcacctacatttttgaacctaggatgtggtctctgctggggtgcagagggctgcctcatttacttgccccctccaggactgttgtctgtttctcctctttttccttcctaggatggagtgggagggtgccctctagtgtttagatgtagaatttaaaattcaagaaccagcccggcccattaacctttttagtctcattatttatgggaatactgaagagtcaaccacccctactagaagctgtcagctcttccacacaaacaaaaggccttgggcctcctgcctgcatatctggcagtgaagagattggccatgggggcaaaagctgttgctgggcttcagtccctttgtgggcaagagacagctggaagacctgaatcagtcctcactgagacccctccaaaacagtggaagaggggtgagaggagactgttccctcaggaaaagcagcaggtggctgggtgcggtggctcatgcctgtaattccagcactttgggatgccaaggctagcggatcacttgaggtctggagttcaagaccagtccagccaacatggtgaaaccccatctgtaataaaaatacaaaaattagccaggcacagtggcacacacctgtaatcccagctgcttgggaggctgaggcagaagaatcccctgaacctgggaggtggaagttgcagtgagctgagatcgcaccactgcactccagcctgggcaacagagtgagactccatctcaaaaacaaaaacaaaaaaccaaaacaaaacaacaaaaacaaacaaacaaacaaaaaatgcagaagggcaccgggtcaaatgatagtcctatgatggagcaatataaaccaccacgactcctagtggctcctgggtgctggcgctgggctgggcagggtattcactattacatcttgtttaaggtaatctacacaatttccccctttctatttccttcagaaaggtactaactgacttacgtaagccatatggctagttgctgggagagctgttctagcccagttctctctccatgcttccatgatgcccctggaaagcttaacctcagccatcagacacttagctcacactccaggacagccggatggatacgcagagcctgtgttcttatctcttctttcccatccccagctgggcaaaagacaacctgtggccagggtctggaagggccctgggagcgcccaccccctctggatgagtccgagagagatggaggctctgaggaccaagtggaagacccagcactaagtggtaaggcttgggagtgtgaaatggggaggaggggctgggatcttggtgggtggggccaggccctgagtccctctctgcttgcctttcagagcctggggaggaacctcagcgcccttccccctctgagcctggcacataggcacccagcctgcatctcccaggaggaagtggaggggacatcgctgttccccagaaacccactctatcctcaccctgttttgtgctcttcccctcgcctgctagggctgcggcttctgacttctagaagactaaggctggtctgtgtttgcttgtttgcccacctttggctgatacccagagaacctgggcacttgctgcctgatgcccacccctgccagtcattcctccattcacccagcgggaggtgggatgtgagacagcccacattggaaaatccagaaaaccgggaacagggatttgcccttcacaattctactccccagatcctctcccctggacacaggagacccacagggcaggaccctaagatctggggaaaggaggtcctgagaaccttgaggtacccttagatccttttctacccactttcctatggaggattccaagtcaccacttctctcaccggcttctaccagggtccaggactaaggcgtttttctccatagcctcaacattttgggaatcttcccttaatcacccttgctcctcctgggtgcctggaagatggactggcagagacctctttgttgcgttttgtgctttgatgccaggaatgccgcctagtttatgtccccggtggggcacacagcggggggcgccaggttttccttgtcccccagctgctctgcccctttccccttcttccctgactccaggcctgaacccctcccgtgctgtaataaatctttgtaaataactgctgagactcctctttcaggggaagcaggaggaaaagggaggtaatggggcgtcctgatagggaaggccggtggtcaaccaagggttagggttttgaccctactgtccaatcctctagtctaggagtctttctggcagacagcaggctcggggcactcagaggaagaactacagaagttctagctgctgcttgggatggctgaaggaggcaggtggggtggggaagtccttctcgaataactggattcctccaaagatttccccatccccacaggactcccctcgggaaattcccctttttccctcagtgccaggcctgtgtggcctaataacgacggccctggtcttcttcccactcccctacccttaggtaggcccttagactccggcctttgagtccgcttctgcgcagggccggggctggaggcggggcgaaggggcggggccgcaggcgaacgcaagtcccgcttcgctctcgggggcggactcagcggcggaagtggcgctgccggaagatcttcttccgctctgaggcgctactgaggccgcggagccggactgcggttggggcgggaagagccggggccgtggctgacatggagcaggtgggtcccggagcggtcgctgggagcgggtggcgtgcgagggccgtcttccgccggtcgaacccgcttcgccgcccgctgtccgtgctgggttccgtccgacccttcccacacccgctgcgtctcaggttccgcccccttcctctgtctggcctcgcgccgccccgcgcgggttggggtctccagcaatgactcttggcgaccccgcctatcctggggagcccggggaggacgttcgggatctccttccaaagcctccgtcttaactgaggggagaggagagggtgaggtgtctgggtgttatgagcaggggcaggtatggggaggggtsggaatctggggtgagaggaaaacatctacgcattccggtagctctgcgtctcagtgtcatcccgtgtctccccaacttcctttcgaaacggccgtgaataacttcctaattggtattaaaagggccctttgaagtcttgagttcttagaggtgcatagtaccattgacactcatttctaatgacacgttccctcaccccgcatttttgggttagtcaatgtctcctggttttcttcgtaccgctctgacagtcggtcaaagtcccgcttcacgttttcctctgtcgcccaacccctcgctctgtacactgaatctcagtggtcttattttcccccacggcttcagctttacaccaactaaatacccagatccacatcttcagcgcagcccttccctggagctccacgcttgcccatccagcggccattgggacagctctgcttcacatggagctcactgggtccaaacttgaactggtcttttccttgcagattaattcttcctctaccccaacccagccggaagtctggtaattwccttacactttctcctctctttcaagtcccacatcttaaaagtgacctagtactgccaacttcctgaacatccttcaaacctgggccagctccatctcttctgttaccacgctgttgatgtattgtcaattcccaacagtccagccctggcagcttgcaacccagtctccaaactgtaactcttgtgatccttttagaacacaagtcttacggtgcmagttccttgctgataacctttttctggctttctattgcctatgtgctgaacccctagcacaatttacacagctctctgtgatctgacctagcagtctcctgtgtgcaccctaaggtccaataatacggcactgcagcatgcgccatgcctacccttgctgttcgtatcttcatgactttgcacacaccagcccccgctgcttggaaacctcctccttctcttgtctgctgggctaccttctacatgtttttcagcgcaggcagcgctgcctccgcctaacccccaaggttaattgcccttctgtgtcctgtagcaccctgtccataatagcatagtagctgagaatacagactcctggatcagactgcctgggttctgacctgtttggtaaccttgatgaagtcagtgcctcaatttcctcacttgtaaaatggaggtaggaatgtctctacttcatagagttgtgaggattgaatggaatattgtatgtttaggtcttaaaccagtgctaggcacaagaatgctcaataaattaaagtgagttgcctgggtgcagtggctcatgcattaatcctagtactttgggaggcaaggcaggatgatcgcttgaggccaggggtttgcaactagcttgggcaacatagtgagaccccatcgctacaaaaatttaaaaaactagctgagcatggtggtacgtgtgggaggatcctttgagcccaggaatttgaagttacaacgagatatggttgtgccactgcactctagtgtgagggacagagtgagatcctgtttctaaaataaataaataaaaagttattactattatgtaaggacaacatagttcaccagttatgatttttaatttcataagttgcctgaggatggttgaagtggcttactagtcattggatagagcctggctctttgccaataaataaaatgctggagtggaggacactgggggcagggtctggatttattgagtgaagattcaagagtgaaaaaggctcagacctggtctgctcaggaaaaccagtctggaagtgtgtgtgtgttacatggcaagcattaaatctagagaaatgtatagakctgggaactagagggagaaaaagaccaggggcggcttctgaggagctgacagttaatggggcctataaagcgatgggaggattttatcagagggaggcagaggctggagtgggctcakagatcagaaagctgggtcctctgaacagagctccagtagatggtggctgggtgggggaacaggggagacggagctgaggaagacagaggcagcgtcctttgctgacgctggcaattcctttcctgtattggccatgaggaagcatcccttgacttgggagccagcagggaccatgcctgggggcaactatgctccggaggcctagtacctggtgtttgggaccaggccccctgggtagggccattgtgcatgcctttgggctgggccttctttggagctcttttgcctccctgtaatgcccaccctccttgcctccagctgatagatgctgactcttcaaggccagggtcagatggcccctcctccctgtggcttttctgacttcactcattccagcctgggtcagatgatcccttctctgggagcccacggtcctttgttcattcctccctgaaagcgctgatcacagcatggtattatttatctgccagtcttcctcaccagacccagagtccctgatggaccagaacagggtcctgtggccccaggacttgcactgtgtccagcatactgtaggcccttggaacccgcatgttgcattaagttgagctctcacacagctagacttgttaagggagagcggtgcgggggagataaaaaatccggcacatctggcagcttgtgcctgttccactgaatgcgagagcctgttggctccactttacagatgaggaagctgaggttcaggggaggtaaggtcaagatcactcagcagggatttaaagagctgtctcctgactccaggtctgcatgtctcccagaaactgccttggggtcccagcctccaagggggcaggtgccacatcagtgggacaaaagaaaagtgtccctttttctggctgaggagaggctaatcctggctttgtccaggcagggttggtgcctggaggatcctgtgctgaaaccggctcccttccatccccccaacccccccaccccttgtcccttgccctatgggggccttttcttgagagggctgagatctctcctggaagatgactagccgtttccagactaaccttgggaacttgacctcactggtttacatagcagcacgaagagggcaggtggggcctgattcactggccctgagtgggtcaggggtcatggaatcacagaactgggggcatccctgatgattcacagggcctggcacaagggggaagggagggcaagtagatctcagtgtgttagggtcttcctgtacactgcacccgcagagcctccccggctggggggagaagtgtgtggtggtgagtcttgtttctatttggcttaactcttccccttccgcttcctcagaaggaaaggagaaacagagccaggctttggctttgggtcttatttgtcactgtagctgtgtcctcctctccctacactcccacttctccaggggatttcccaaaccctctgtggagggctatagtagggccagtcagccaaccatcccgaggctgatggcatgggccagtaaccctgaatgtgccatcctagccaggcgcagtggtgcacacctgtaggctcaactacttgggaacctactcccaagtttttgactccaggattgatgtccaaccccaaacccacaccctttctcctgttccagggtggacattacggatccacagactagctaacttactagacatgtaccgtggccaggcactgtggctgtgacttggacctcaagggcttaggacagatggccttgaaacatctagctgtgataagggaaatgctgacccagagttacttgggaggctgaggcaggattgcttgagcccaggagtttgagaccacagtgtcctatgatcgcgcctgtgaacagccactgcactccagtctggcaacatagtgagacctgtctcttaaaaaaaaaaaaagtgtcattctgggtcagccccctgaagccagggtctacccttccattctgcagtactgctgggactctcagtttgggcaaagtgctatgctggacctgcctggccagggtcctgcctctaacactgtccccatgggtaatagtagtaatagctgctattaattaagcacagacactgtgcatgtgttgtttctaatcccttcaagctctgtgaagtaggtactatattctccccattttacagaaaaggagactgaagttcagagaaacccagtgatttggtcaagggcacacaatctaataaggaatggccttaggtttttgcctccaggactggtgtccaaccccaaacccacacccttttccctgttccagggtggacattatggatccacaggctaacttactagacatgtatcatggccaggcactgtgactgtgacttggacctcaagggcttgggacagatggcctcgagacatctagctgtgataagggaagtgctgacccagagttctgaaaggtcaggggagtctggagggtgaggagaagctctgccccggaggtgacatttgaactagtctctgaagcgccagagttctccccaaaggaaggaggtcattcaagaatgaggaaacagggcgcccaggcgatgggctgtggtgtgtcctgggagcagccaatgatcagcagagtagaggcagcgagtgttgacccccatagcaaaaaatgagtgctggggtctggagtcctccctcctccttaaccctcctctgttatcaaagactcaaggttaactcaccttacgtcttctccctacaagtcaggctcagggaggggagcagataccctgcttgaggacccccaggaaaccagttcctctttccttcttgtggagggagtgcctgggctctgggcagggaagacccccacagagggtggagtccagctccaggagaggcagcctgggcagggaggggctgctctcccggctgggcgtgagtgtccatgtgcacttgtgcatgtgctgctgtagggaagggtgtaaatggccgttcagtgcatttcctggaaacccactctgagcctggtacagttctggcactgggcatgcagcagggagcaaagcacaggaagtccttactttcatggagttcgcatgccagtgggagacgatgggcagtaaacacagaccagtgaatgtatcatatgtcaggggtgacaagtgctgtgaagaaaaatacagcagggtaagggatggagggtgggggctaaatagaggttcaggaatggtctctacaaagggacatttgcatagggacctcattggaatgagagagcaagtcatgcaaagacctggggaggagctcccgacagagcagcaggtgcaagggccctggggtaggagcatgcttgatgtgtccgtggacagcgagggaccagtgtggctggagtagagggctcaaggggaagaggaaaggggaagaggaggacttgtaggctagggtggggacttacgcctttattctggggaagccattggaggttggggcactggggagatgtgatctggcttttaacaggatccctgtggctgctgtgttgagaacaggctgaaggggtgaagacaagaaagagtggcaggtagaggtgatagcctggacagggtgacatagtggtaggtgagcagtgggcagatactggccagattttgcaggaagagacaacaggatttgctcatggtttggatgtggaagggaggtgtgaccagatgaatgctaagcccaaagagggcctcttgacacactgtcccccagctagcaaggactcttgcaggcagcagcatttgtacttagaaggtcccagcctgtcatgggggaaggtcatgttcctctggggtcggctccgctctgcctcttcctggctaggggactgtgggcagctctccttcccatgagtcatcactacagcttctgggaaggggtgtgatgcattaaggagatggtgtctgcatggtgccaccgcaggccatggccagctggatctgtgtcttctgcaccagcccatctggatgcagtgcaacctgtctggtctgctatcctgcgttcccctaactggcaccctcctgggccagccagcagcaggacatagaccaaggccaacctcctccacacccagggcctctgccttctaccctctgtggagtctccattaacttggcattgacagggctgcttgactcaaaacaaccccagccctgccctgaagccatctcgccagtcagtcagagctcaagactctctctttctctggagaagagcaggaaagtaatcccagctaaccctcatgcagccaccactctgtgtcagaatctcttctaggccattgcattgaataagtcatttaatccatataaacctgcaaggagtaggtgatattgttaaccccattttataggcgaggaaactgaggcatggtgaggttaagtgaccagcaaggtggaaatctgaggtttgacccatctcctggtgtggagtccagttctctcagcttcactgatccttcctgatttgtgctgagttagggaccccttgggaagcccccatgggcagggggtgctggtgctagcatttcctgtggattatgggagggggatgtgtggaggacctgtgtctactgttcctctagcctctgggggatttggagaacccactctgcccagagatgtaagtcatctttggatatagatgagacttgttccccctccccctgaatcccagggcacagctctatggaataagctctagctggaacttgtaaagtttggcccagccctccctgggaggctaggaggtggggaagagccaggagactcgaagtggtggtggtagttaatgtctatgtggttagacgttaaccagttactctgtggtgccaggcactgtcctaggcacgctatagttatcattgtctcctttggtgcccccagacagcccagggtcaagacaggtagcctcagtttacagatgcagcagtggaggcttgcacaatgagtaggtggctttgttcaaatcacagacctaggccaggtataaaagcctaagtgtggtgtaattccagcactttgggaggccaaggcggggagattgcttgagtccaggagtttgacaccagcctgggcaacatagtgagaccctgtctctacaaaaaaaaaaaaaaaaagaagaagaaaagaaaagaaaaattagyctggcatggtggcatctgcctgtagtcccagctactcaggaggctgaggcaggaagatcacttgagccagggaatgtttgaggctgcaatgagctgtaatcacaccactgcactccagcatgggcgacagagtctcaaaaaaaaaaaaaaaaatcgcagacttgccttggctaggaaacgcctactgagagctgccgtcggtcagctgggctttggagccgcctccctgaagaaaggtgtctggagcttctggcctggggtatgacgaagggctagcaaggaaccctgtctgtggctctgcagcctgagatttgtggaaattgaaaattggaggtgggtgagtgggaggcggcttagccatcctgctgtcctcctcttctgtctgcgggaaggggcagccgatgctgttccctgggtgggagcttgcaattgcagaggggccggtctcaagaggaaggagtagagatcagcccctgcactcccctaagagcctctgccaggagccaggacagtcctctacttcctgcccctcccccaacctggaattcacctctgcctgcagctggataacctggcctttctatagatgaaggaaccaggctagagggttagggagcttgctctgagccacacagcaggtgaattgtagagttcagatttgaacccacgccttttggggtgatttttattacatgtcactatagtgtatttaacctccctcgctcacaatttccctcttacttgaaaggtttttgttttgttttgtttttttgagacagagtctcactgtgtcacccgggcgggggtgcaatggtgtgatctcggctcactgcaacctccgcttcccgggttcaaatgattctcctgcctcatactcccaagtagctgcgattacaggcacacgccaccatgcctggctaatttttttgtatgtttagtagagacgaggtttcagcatgttggccaggctggcctcaaactcctgacctcaagggatcctcccacctcagcctcccaaagggctgagccactgctcctagccccatcttacccgaaaagtcttgccagctacttaatctatctcaaccaccactgaccaagcggttaccatactccctcctgacacctacctcaacacccatccctgtgacatagggattcttgcctttttttttttttttttttttttttttgagatggagtctcactctgtcacccagactggaatgcagtggcgggatcttggctcactgcaaccttcgcccctcaggttcaatcaatcctcccacctcagcctcccaagtagttgggactacaggtgcacaccaccacacccggctattttttgtaattttagtagagacagggttttgccatgttggccaggctggtctcaaactcctgacctcaggtgatcacctgcctcagcctcccaaagtgctgagattataggtgtgagccaccgtgtctggcttcttgccttttcttgtcatggtaaaatatacataacataaaacttaccattttaaccttttgtttgttgttttttgttttgagacagggtttctctctgtcacccaggcttgagtgcagtggcacagtctcagcccactgcaacctccacctccccggctcaagtgatccttcctcctcaggctcctgagtagctgggactgcaggtgtgtgttaccacgcctggcaaatttttgtattttttgtagagacggggctttgttgtgttgcccagactgttcttgaactcctgagctcaagcagtccttcctccttggcctcccaaagtgctgggattacaggcctgagctaccacacccagcctattgttgcctgttttaatgcagctgaggaaactgagtctcagaagggttatgctttgccccagagcacacagctaggaaggggacagtctgagatttgaaccatgaccttagagtccattcctttttccatgataccagccacctcctgtttgtcctgagtccaggacaccacccaaaaccctattacaagtggggctggtactattgtatcctagggtgaggaagagaaggcctggaaagcggtgtgggggcgtgtgcccaccccttccctttgcctcatgaataatccgctgttccctggcacctgacttcccccctccccacccgcttccccctctaacccaggatggtaaaacctccacttttgcccggcgtggtggctcacgcctataatcccagcactttgggaggccgaggtgggcggatcacaaggtcaagagatcgagaccatcctggccaacatggtgaaaccccatctctactaaaaatacataaataggcaggcgtggtggcgggcacctgtagtcccctctacttgggaggctgaggcaggagaatcgcttgcacctgggaggcggaggttgcagtgagccgagatcgtgccactgcactccagcctggtgacagagcgagactctgtctcaaaaaagttaaaaaaaaaaaaaccctccactttcccccctacctcccactctcactccctccccaagcagttcagcttctgcagacactcgactgtcaagtctgcagccatcccaggcagactctttcacaccacacgtgctgttcccctcctgacacttctgaaggtgcttgggagaggccagtcacagcaaccagtgggctcttttggcagtgggtggggtgctgctcccagggggctgggctgtctctgaattgtccattcctgcctccccctcatcaggagggtgggtgtggtgggtggaggcctgcgctagctgtgatgcctccagggctaggcagcctacagtcagccagagaatgagcactttggggactgcacagggcagttccacgccacggtgggttttcatcacttagactggcaggtggtctgatggagctcaaaggcctttcaaagtcatctgagtgagccccattttcaaaccctagccaacgaggcctcactcagggtgatgctggagtttgaggaaaggctgacaggtgggattcagtagctgcttttacccatagcagtctggtttttatctgttttatatattgaggttccaagtaaggtattactcttttaaatgtttctcttgctttgcaaaggaggtggtttgtagctgggtgtggtggctcatgcctgtaatcccagtactttgggaggctgaagtgggaggatcgcttaagcccaggagttcaagaccagcctgggcaacatagaccttgtctctacaaaaaatttaaaaattagctgagcatggccggccgcggtggctcacacctgtaatcccagcactttgggaggctgaggcgggcggatcacgagatcaggagattgagaccatcctagctaayacggtgaaaccccatctccactaaaaatacaaaaaattagccaggcgtggtggtgggcgcctgtagtcccagctactcgggaggctgaggcaggagagaatcgcttgaacccaggaggcggagcttgcagtgagcctagatcgcgccactgcactccagcctgggcgacagagtgagactccgtctcaaaaaattaataamaaataaaaaaataaaaattagctgagcataatggcatgtgcctgtggtcccagttactcgggaggctgaggcaggaggatcacttgagcccaggaggtcaaagctacagtgagccatgttcacgcctctggactccagcctggatgacagagtgagatcctctctttaaaaaaaggcagagggagatgattgaaaaaaaccactgactttcccccagataaacagaggcttggtgagaaggacttgcccagagttaggcggaattactggttgcccggagactggggtacaggttccttaactcygggccagtgctctgcctactgtacaggctgtcatttggactttgagctgctttcggtgggagggtgatatcaaaccccctttctttgactcttggccaactgtccccgcccctgccttcgagcccccatgcttggctcccacactccctggcatatttcaactctcccgggctcccgcaacacctctgctctagccccatctgcgtctctcgcttcgacagggacgtctgggcatgtgagtgtcagtgtggttgccactccaagtgcgtctcacacccaagctgctgccatccaagtcctgtccccaaggagagagaaagtcagagggaaagacagacagacacagaagtagactggagtaggcgagcgacagcacctggaagtgaggcaaggaccaaggagggagggagggaggagagaggcagatagagaagagagagagaaatgtggagaaagtgggagagactgatgggagtggagagaaagactcataaatgggagatagattgagaggaagacccagatggggaaaaataaagacagacatggatgacgatatgttctgtgggctgtggggaaacaggcattcttgtacattgctagtgggagtgcaaactgcaaagggaacttggcaatacctcacaaaaccacatatgcaatttgacccagcaataccacttctaggaatctgtcttgaagatgtatttccaacaacgggaatatatatatgcgctcaaggttattcactgcagcatttctggaattacaaatctaagtgctcattcatgggagactgaataaactatggtttgtctataaaatggagtaccaagcatctctatcaaagaacgagaaagacaatgtaaaactgacatggagtgctcaccaggatatactatttagtgaaaaaataacaagcaagagcccatctgtagtaagctactgtccatgtaagaaagaaaggatataagaaatataaggctgagcgtggtagctcacgcctgtaatcccagcactttgggaggccaaggcaggcagatcacctgaggttgggaattcaagaccagcctggccaatatggtgaaacctcatctctactaaaaatacaaagttagctggacatggtggcacgtgcctgtaatccaggctacttgggaggctgaggcaggagaatcgcttgaacctgggaggtggaggttgcagtgagctgggatcgcgccactgcactccagcctgggccacagagtgagactccgtctcaaaaaaaaaaaaaaaaaaaagatatacaaagaaagcatattcctttatacaaaagaaatataaaaaggataaagcagacactaaagctgtaagttactgctcacacgtgtaatcccagcactttgggagaccaagaagggaggattgcttgagcccaggacttcaagaacaccccatctcttaaaaaaaaagataggttactgttaggggttgaatcgtgtcccccgcaaaaaggatacgttgaagtcctaaccacctttacctcagaatgtgatcttatttggaactggggtcattgcagatgtgatcagtcaaggtgaggtcatcttggaggagggtgggcccattatgactggtgtccgtatcaggagatggcagtgtgaagacggacacatgggaagagcaccatgtgacagcgaagaccggtcggcgtttgtggctacaagctgagtcacgccagattgctcgcacaccgtcaggagccaggaagaggcaaggaaggggtcagagggagcacggccctcccaatacctttctcagacttccagcctcctgaactgtgagatgataaatgtccatgatttcaaacaaacaaacccaaaatggcagacatgggagagggagagggagacagctaaaaagataattacaaaggaaataggccaggtgcagtgactcacgcctgtaatcccaacactgggggaagccaaaacaggaggatccttgagccagggagtttgagaccagcttgggtaacatagtgagaccctcgtctctaaaaaaaataaaataaaatgaattagcctggtgtggtggcgggcgcctgtggtctcagctacttgggaggctgaggcaggaggatcgcttgagcttagaagttgaaggctgcagtgagccatgatcgtgccactgcactccagcctggttgacagagcaagaccctgcctctaaaaaaacaaacaaaaccccacacagatggaaagttactttgtgaaacagatacaaaagatgaggagagatggagagagtgaggaagggagacaggtctggctgcaaacaaaagggctgtcagaggcagggaaatgtcacctgccctggagctgcggcctgtcaccatgagggatgcactgagcatgcagtctggcacagatctggctgatagatgttggggatcccattgccagcggcctgtcacatcccctccccatcgcctgtttccagagctgagcccagcttttccgtagcactgtggagatgaacctgtcatggggctcagagtgtggtgttgggagtagccttggcctggtgcctctgcctcacctgccctccgactctgctgcaaacagtcagttcctgtttgtgggggcttgcacaggggcagagggatggacgagctggcttgctcagaacctcctgccagccacaaactgagctgcgcttgttttggacgtggtagactgaggggcccaggaaggtagtccacatagtgaaagtgtggcaggacacctcaggaggggagagtggttagatcttgcctcccaagatcagggacaaacatctagagcttcccttcctctagcccccaaactactccctggtgctgggatgtggggagactcagggagcctcttggtcaagtcccagaagctcaggcccccaccaagctggtgagtttttgcctccccgcttcagctcctctgactttcttttttttttgagacggagtctcgctctgtcacccaggctggagtgcagtggtgtgatctcggctcactgcaagcttcacctcctgggttcacgccattcttctgcctcagcctctcgaatagctgggactacaggcaccggtcaccacgcctggctaattttttattttgtatttttagtagagacgggtttcactgtgttagccagaatggtctcgatctcctgaccttgtgatccacccacctcccgcctcccagagtgctgggattacaggtgtgagccaccgcgcccggcttcctctctgactttcagtgggacctttccttctcacccaagggayggggcctcttagagcccagcacatgggtggggcagagactgtaggcctgggggctacatggcagggagggagtgccagagttccttttgtctttagggttcctgagagcccgatgctggcacaggatggtaagggattgggtaaatccattcacctctctgggccttggttgtcgtatctgtaaaagaagaggaaccgtccctgccctgagtggacgtgaacgtgggtgtggatctgtgggcatggggtggggggcggtagagcactgggctggcctccagagtggctgcttcctactctctttagggtttgccctgttcctgtctgttatgtagcatggagctgagggccaggagacctactgagcattcatttattcaacaatcaattacaaagcacctattgcatgccaggcattgtgctgggcaccagggagacagcagtgaccatgtcagataaagcccgtgaggccatggagtttacagtctagtgagagaagggtaaacagtgaaataaaacaataaagatcgtttcagatagtgacccacttcactgaagaaaggaaggcagcttactatcatgttatgctgtgakttggagcaggagggtgggaggctttctgaggagaggacttttgagctgcctgttgaagggtctgtgggagaacattccaggcatggggagagccagatcgaaggtcccaaggcaggacagggcagctgtattgagggatgtaaaaaaggccagagtggcggtggcagcaagacagagagaagggctgggcagaggccacctgcaggcctggactgagagggcctggtgaggagactgttagcctgagaagggtgggaaaccgtgggagggcattgcaacgcattctctaggccggctatgtgaagagcaggagggtgagagaggcagcctggaggcccacccgtgagaagcagattgccatggtccaggcagagatggtggtggttggacctaggcagggcaaggggtggtggagctgagagggaccaagatgcctgctctccatagctccaagcacacagacactgctctaggaaggccctcccagttgccatggattagggggtgggaggggaagactggctgctgggagggaatgtggctttgtgcttggaaaacaaagaacagagcttggggccctcttctcctgggggtggtggcaggcccrgaggctgttgacaggaccagaggctggagctcagggctaggcctggtaggagcaggctrcagcccyagggatccaggagggggtaggtgcccatgcagagggaccccagagccctccaggggtgaaccctgtggctgctgggcttggggcagggagcaccaggaaggaggacagataattagcggaatgctcaaccctgcagcctgggagccaggctggtggaggacatttgggcaacagtgccctgggccctgggcttgggacccagtgtagagacaaatgcgtttgggagccagtggtggccctggtggctgtgtgggagggacaggaggagtttgacaggactctgcctctgcctcgcccccagccctgctgctgaggccgcgccctccccgccctgaggtgggggcccaccaggatgagcaagctgcccagggagctgacccgagacttggagcgcagcctgcctgccgtggcctccctgggctcctcactgtcccacagccagagcctctcctcgcacctccttccgccgcctgagaagcgaagggccatctctgatgtccgccgcaccttctgtctcttcgtcaccttcgacctgctcttcatctccctgctctggatcatcgaactgaatgtgagtgggggcgaggtgggggcacaggccatgttgcaggccacccgggcctcartttgtccatctgccacatgggagggctgcctctcccctggggttggttagctgggtaaaatgaagactgggaggaacaacaggggttctcatattctgaatgaaggaatgtggaggggttcggaggggttgtgtcatttggccaaggtccctctgcaccsaagtgtgtgaaggcaacggccttgaacctaccctccagctgagttcatgctcttggcctctgccccatactgccccctagtggaggctcccgagagaggaggagggggagacccagctctggcagagctgttgaaacctttgtcttctttctgcctgccactgccctctggctccagttggttcattcattcgtttgttcgatcattcattcattcattcattcattcagcaaacattttttgagtctctgctgtgtcccaaccactgtgctaaaaccagacgctagccaggtgtggtggtgcacacctgttgtcccagccgtttgggagtctgaggtgggaggattgcttgagtctagaagtctgaggctgcagtgacccatgattgcaccactgcattccagcctgagtgacagagtgagaccctgactcaaataaataagtaaataaaagcagagggcacagtgggaagcaaaacaggaaaaactcccagttcccagtggctctaatgagatgctgccgggcagcctggagaccagagctgccccacccccaccccacgcagtgcttggcccaccctcaggaacacagtctagttggcagtggcctgatctggtctccaggcagggccaagcccacataagcaggagccctggaagcagggcaccccaggctcagttctgtcccagctcctcctcggctttggcccgatgacctcagcaagggactcagccccttgagtcctcccctcgttttccttctgcagcatgggctccccatcagacttccggatggcaagggcccttcctccaggtctcatgcttatgtgacaagaaaacaatgtcttgttaatagaggtgatgagctcagagaaggggccagctccgggcaaagagattaagtttgattctgggcatgttgagctggagggagagacagggctctgagggtgactgtcgattgtgcaccagagatgagctggcaccttcagtgagctggagccatggccatggatggccctaggggccatcttacccatgaaaaagctgtggcccagcaggctcaggaccttctgcagagcttctaaggtcttaggcagacttccttttcaaggtcccatccaacatcaaagcaaacactaaaacttacctgcatccttcattgaatacttgtttccttacccaaaaagagctgaaaagattttgataattttactttcgttttgttttgttttgagacagggtcttgctctattggccaggctagagtgcagtgatgtgatcatagctcactgtagcctccaactcctagattcaagggttcctcccacctcagcctccccagtagctgggaccacaggtgcatgaccacatttggctattttttttttttttggtagagatggagtctcactatgttgcccaggctggtctcaaactcctgggctcaagtgatcctcccatctcggcctctcacagtgctgggattagaggcatgagccactgtgcctggcctctgtaattgtgcttttgaagttatttggctgtgttggctgcgattgctctgcagtcctcatgcgtacctgggaattcttgcaaagtgagaagatctaacttactaattgttttcagatgtcatgaaacatttcagaatcctgcactgaacaattagtagagtccacatgatgtttcccttggcagacatttaattaaaattgtattgattttcagtcttgtagttttacttttgtatttgggagcatatatttttagttcgctgacagactgtgtctgtgttgcccagtggttacaaggactcagtagggtcgtgctgagcagggggtttggagccagagagtggcaaagcaggggctgagacttggctctcccgagtcctgatcggtcagcaccggtgggtgcccaggctggaaagaggaaggaggacagagctctgaggcctagtgactgagggtggaaggggctgcagagcccagggcagagtctgaggagcaagaggagtgctgggtggtgtgggttgggtgggatggggtgggtgggtggcaggcctgggggcctcaccggcagccagaggagaggtggcatcagatttcatggagctggggtgggcttgaggaagaggcacatggtggggctgtgtgctcagtgggggagcatctgtatctttaacaagcccccccagatttggctgccctgctggagagcggaagccccagtctaggcggttgtgaggggtcttcctctccagggctcctgggctccatcgcccagagtcccygtgtcctcccttctccagggtggctggtgccccacctgaaggagcctaggcccgtcacccccgtcattccaaggagtcaggtcgcagtctggcctggtgtccatccagttccctcaaacctctggacattggagtcagggccaaggcctcaggggtcctggtgaaaatgtctggtgggctggggtagggacaggggcaaggacacatccactccgtctccacttcaccctytcaagcagcgtgatggattttgcccattaagcataaacctaatcaattgatttgccacctgaggctccgtctgacaccactgcccacccccaccccccatcagcccagatggattatggctgggaagatggagcaccgcagtgctgggagggagatgggattctgtcagaggtgggctttcggcgcccttctgctggccctgtatagggcgcattgcctcccctgcacagccccgaagcctccaagcctgccccttcctgggcagggtgctggaagctagccctgcccatcggggcggcctggatccttagaggactggtattggtgcctgaggtctctggccgtgggctgagatcccttggtgcttccagggcccyctgggtggtggcttagcatcaacagcctcccctccaggttcctccatcccctacctcttgccccttccgggaggtgaggggcagccccrggcccttgcttctacctgcagagctcttcctgtctccctctcacagaccaacacaggcatccgtaagaacttggagcaggagatcatccagtacaactttaaaacttccttcttcgacatcttygtgagtggccttggctgatcctggggaccccggmggcagagagggagcrgggaaatgacttctgctgggttctcttttggcagcatatatccagtctgatcagagactcggctcccatccttcrggagccatcagtcattaaaacctttgctccacaaggctgggcgcagtggctcacgcctgtaatcctagcaccttgggaggctgaggtgggtggatcacttgaggttaggagttcgaaaccagcttggccatcatggtgaaaccccgcctctactaaaaatacaaaaaattagctgagcatggtggttcgcacccataatcccagctacttgggaggctgaggcaggagaatcacttgaacctgggaggcggaggttgcagtgagctgagaccgtgccaccgcactccagcctgggcgacagagcgagactctgtctcaaaaaaaaaaaaaaacctttcctccacaaagcccccttcagagagccccaggtgggagagggaagataagacccctgtgcaaggttacatccaaattgtcccagagacatgctgactcagtcgttgtcccctgaggtgtgcatgcccataggaagggaacgtgggggcaggaccagaggggaggtcagcctgcagcagggtggggggcagtagcttcctgtgactgccttgctcccgtcccccaccaggtcctggccttcttccgcttctctggactgctcctaggctatgccgtgctgcrgctccggcactggtgggtgattgcggtaagatgccactttcctggcagcttctgggccctggcagggctggtggaagggatgggatggaggaggactcacttcccagcctctgccttccccttcctccctccctcccctgggcaggtcacgacgctggtgtccagtgcattcctcattgtcaaggtcatcctctctgaggtcagtggctcagggtctggccagtctggtgggcatcagacctgagtggtatgcttctagagaggagcatttctctaatttggggtgtctgtccctgttgtccgggttagggggagagggaatcctgtcctttggtatctataaggaatcatccttcacccgcttccctgacttagccccttgcagctctaggaatcagaaggttctttctccagcctaaccccagtttatcctgctgcagacttgagagggttcccaagcagctgctaccaggaatggggtgtatgccagtttggctggctagagttggtagccacagaagggggctctgggtttggggtgacccctgccatggagctcagccccctcccttyacagctgctcagcaaaggggcatttggctacctrctccccatcgtctcttttgtcctcgcctggttggagacctggttccttgacttcaaagtcctaccccaggaagctgaagaggagcgatgtgagtgcttgcgggtaggggggtgcagcgagggttacccacagccccaagagaggggagttgcgggcatgagagtcagtctgaagcatctcgccacctctgagcagcctccagtagcctgagggggagcttgggtgggggtaccccaggctgctagggtgtaactgtcctcggtccgggaccgagtctgctcctccagggtatcttgccgcccaggttgctgttgcccgtggacccctgctgttctccggtgctctgtccgagggacagttctattcacccccagaatcctttgcaggtgagggctggtgtgtgggggaactgctttcagggaggggccttgtgaggaatggggtaggctgggtctgttctttctattccttctatcaggctccctggggaaagccagcaaccctctcccacacacttttatcccccacatccttgcactcacatacccgaaccccactacctccccacactctctccccaccccttgccattgtcatctgtgcctgttttctgcagggtctgacaatgaatcagatgaagaagttgctgggaagaaaagtttctctgctcaggtatttgcctgcctacccctaacccctgcccttggaatgggtgcctggaggagggcgggtgcaggggtcagccggggtgggcaggggtttcccagtagaggctgaacctcgggcartgcccatccgagtgtctcccccaccaccagtccggcccccctggtctgcctcatgcctgggcacacaggtggagcagccacaagcctgcagggcccagggagaccagcccagatcccacatgtggctgggccaggcccctctgggaagcatgtggtatgtctagagagagaacaggccacgaacatggtggactgcaggccccaggctgaccccyccctgcctcctgcttccgtccaggagcgggagtacatccgccaggggaaggaggccacggcagtggtggaccagatcttggcccaggaagagaactggaagtttgagaagaataatgtaagaagccctctcccacctgaccttcccatgcgtgttaggagtttctgttctcttttctgaggcctgaggaagaaacccaaagattacatrggttggagccatattcctgccccaagagagggagctgggccctcgggtcggcaggaggctgggctggattggacgtttcccccgtgccccttggccccccttccccgcaccccccatgtttacttccctgctgttctgcccccttggctccaggctttgaaggggaagccaggcttctgctctgcatccgttgtttcgtttcatgatcaaaacaacattatctacaaagatcgtagagagcttggaaaacagagagcaacatgccccagtccctctctctggccagttcttgtggcagccccattggcctggagacatggttttttgtggttgcagctgcagctgtccccccgtcttttaactcgacatcaaaagcctctctcctgccagtgccataggtttgttagagctactgttttgtaacagctgctcaggtgtccccaaactcctggagttttccaccctgagctgttaaaaacctgccctgcctgtcacccatttctgtgccaccagcccaccccctgcctccactctcctccctgccaccttctgtccctgccayaggaatatggggacaccgtgtacaccattgaagttccctttcacggcaagacgtttatcctgaaggtgagtgaggggagcgggtgtcctggagccccagacagcacaggaggctccaggaaggtgccgaggggccctctggtgggtgccccccaccaagagggaagggttggtctgcccgagcccatctggcaccacccagccctctgccgccctgtcccagaccttcctgccctgtcctscggagctcgtgtaccaggaggtgatcctgcagcccgagaggatggtgctgtggaacaagacagtgactgcctgccaggtgagcccagtctggctgcctcttaaggcacagatgggggcacagccacgcctcagtgggatcactgaagcactcagcgcctcagctgccccatctgtacagtgggtgtgatggtaacagtgcctgctcgggagggtcgggaggagggcaggaggagtgctcatcaggcgctgcccagggcctgcctgtggcaatagcagttagtaaaggggcctggggtgttcccatccctggggttttcctggggcgacctgttccaaaagtctccgttgacggccctcagatcctgcagcgagtggaagacaacaccctcatctcctatgacgtgtctgcaggggctgcgggcggcgtggtctccccaaggtgagtccatgccgggccccctcctttcagccaggtcttctgcactttggccttgggtcattgtcccctgaactaaccctmcctcccgcagggacttcgtgaatgtccggcrcattgagcggcgcagggaccgatacttgtcatcagggatcgccacctcacacagtgccyagcccccgacgcacaaatatgtccggtgagcctcactttgcctggggtcacccctgccagcccctcccctgggagyattgagcagtgcagggtacagcatgtacagctgggcacttcccctgctgaggctgcgttcctgttccctgtcccgctgggctctgctcctccyggctactaatcctgctaatcttgctgctctgtctgtggagatggggggtggtggacagctggaaccaagccaccaaggctggacgggatgtgcggcggtggctggctggggtagaccatggatggggacccgtgcagggaaggggcctgagagccatgtgctcactctgggctgattgacctgagcaggaggctctatgctctgggtttcatcttcctgcctaaggagactcgggtcccctttcgtcctcctcaccctgtcctcactccgtcatctttctctggagtggctcaggagttcccccaaagataaagggattatggccttcccgcatctgtgcctgggcttctggagtcttcccttttgtccagtcaggctgtggtgctgcgggtggccccctcccatagaccccactcttccccatcccctcctgggttccagcaggagcactgttctttgaataggatgccaggctctgctttgggcactggacagacttgctgggtgcagggaagctcacttcctctctggatgccaacttccttatctgcagaatgggcttaggtgtgctcagtggagctgagggagaatgaaatggtgatgggatgtgaaccgtgcctcccaggcttagccttctcctgagcaggtgtcccctcctgaaggggaaggggtaagaagcgccagcccagcctactctgccatagcagggctgacctagaatctctggacagagtgtatgagggctgggaaggtggtgagctctctgtccctgggggtgtgcaagcaccaacaggccgttgtaggaggattcaagcatcacagagtgggtgggggtggagggccgattctgcagcccatgggacacctgtgctaagccttgttcagatagggtagctctgcctttctgcttccagcccagtcccagctgggccaagaatggagtgtgagtggtaggggctgcgggggggtgtcagggcctcactctgttccaaagtccccccaatgatgcctctttccataggggagagaatggccctgggggcttcatcgtgctcaagtcggccagtaacccccgtgtytgcacctttgtctggattcttaatacagatctcaaggtggggtgctggggggctgccaggtgggttctgtggagtggaggggaccctgctgctgacttggttgctgcatgactttgggggctctctgccatgsctgggcctcccctttgtcagccacctttcttacttgaaaatttgggtcagggtccagatggtctcttagccctgggttgctgtagggcatgtgcccccccttcttacctctgagtcctgaggccctgaggaagggtggctggtggccagcccggccccaccctggtctgtttgtgtkgctggtgccaagagccaggcccagcatgttcttcctgccaggggtgagtgggagagggcgrcccaggctggattccagagctgcacctgcattctggcccagagcccccctgctggtgccagctgcaaggggagaccctgctgagggcaggccatcaagtgtgacttctgcctgccttcccccagggccgcctgccccggtacctcatccaccagagcctcgcggccaccatgtttgaatttgcctttcacctgcgacagcgcatcagcgagctgggggcccgggcgtgactgtgccccctcccaccctgcgggccagggtcctgtcgccaccacttccagagccagaaagggtgccagttgggctcgcrctgcccacatgggacctggccccaggctgtcaccctccaccgagccacgcagtgcctggagttgactgactgagcaggctgtggggtggagcastggactccggggccccactggctggaggaagtggggtctggcctgttgatgtttacatggcgccctgcctcctggaggaccagattgctctgccccaccttgccagggcagggtctgggctrggcacctgacttggctggggaggaccagggccctgggcagggcagggcagcctgtcacccgtgtgaagatgaaggggctcttcatctgcctgcgctctcgtcggtttttttaggattattgaaagagtctgggacccttgttggggagtgggtggcaggtgggggtgggctgctggccatgaatytctgcctctcccaggctgtccccctcctcccagggcctcctgkgggacctttgtattaagccaattaaaaacatgaatttaaaaaaaaaaaaaaattccagcccctcccactgccttgcctcttgagggaagagaaaggcaggcagcagcttggatgaagagggaagacccctcacacagcctctcctgggctcacaggagggcggagcccggggagccagttcctgaaacatgccccccattccccccccgcccaccccccactccccgctttcctgaccagttcaactgagcagatgactggtcagaaaaaaatgccccgccccctgccaggcttcagcggggcaagtttaaagtctctagtccaggaatggaggtgggggtatgggcacctggcagtgcccacagcaagccttgactgtgtggcctggagatggggcctgagcttcagggtcactgaggcacctctgggatccaggccacctggagccccggacctcccagactccactcacccattccctctccccgcrcggcactcacaccaggggcggcctggagcccggatcgcagggcggggccaggccactgcctgccttcctcctccctcccggctggcctgcccccttgcctgcctgcatgcaggcttccagcagagccagcttcttcagagccaggtggatcctgtttcggtcctgcctaggtgtgtgaccctgggcgaatctacctctctcagcttctgcttcccactttatgaaaatgggactgatgtcacagggttgttatgagattaaaagatatgaagaaccggggacagtgctcagtaatcaatagtctgcagttctgcacccacgtgctcctgggtactctgccgtccccacagggtcctcagctcagcccctgtcactgcctctcctgccaccctttgtccactcggcagtgttctcactcctcatccccccacacccaccacctgtctgccagcctcttgcaccatgagttgctactcctggggtgctggactgtccccacagccatctgtctcccctgctccccatgaagaagagccagtcccctcccaggtagcacatcagagcgggcaggctccagagctcttctggtcctcttgcagtggccagaaagtggggaaaggggcccagagaggggcagggactgacccatggtcacacagcctatttatggctgatctggagccaggccttctgactatcacccatcagagcccctggattcccatttcacccaacacaggtgttggggtagaactgggggccctccacccctactagcctgactgtctcctgagacctgtctcctaagaccacttacctgaccactggccatggggaaggaaaacacctggccaaggctcatgccccaggttcccaggcatgaagttgactgtctccgcccctgctggtgtggtgagggtgactggggactaggcactaggcctttggtgcaggcgcctgaggacgtggttgcactctcccttctggggatatgcccttgagcccaggcagaggagagcacagccagggcaggacctggcagccctggtacagagcccagagggggcatcagttcctgctggtcctgctctgtttacagacaagctgctgtcctccctgcaaaggggagtgggtggggcagagggcaagtgccaggggggcacaaggctgggcatgtggctggcatgagacggtgtctgagtaatgtcaggcacctggaggcattgaccccaggaccttggaccccagacctctgaccggggggcagccagcgtccaggtaccccaacccctgccctgggtccggcgtccccccattagtgagtcttggctctacttatagcatctgacaccagaggggccgaaaatagcccctggagaagggggaggagggggctatttaaagggcctgggaggggagagagaatgaggagtgatcatggctacctcagagctgagctgcgaggtgtcggaggagaactgtgagcgccgggaggccttctgggcagaatggaaggatctgacactgtccacacggcccgaggaggggtgagtgtgggtctgctagagccctgcctctgctcccccagagcaccctcactgagccatgaggccagagcatgaagccctggagaaatttctgggggtgggggcaggaagaatgccccatggggagagcaaaggggaaccacccttcctgcccccaggtcccagcagcccaggggagccccccacccagcctgtgcccagagagcaacagctcccaggagctcactgcccctcccctctccccagctgctccctgcatgaggaggacacccagagacatgagacctaccaccagcaggggcagtgccaggtgctggtgcagcgctcgccctggctgatgatgcggatgggcatcctcggccgtgggctgcaggagtaccagctgccctaccagcgggtactgccgctgcccatcttcacccctgccaagatgggcgccaccaaggaggagcgtgaggacacccccatccagcttcaggagctgctggcgctggagacagccctgggtggccagtgtgtggaccgccaggaggtggctgagatcacaaagcagctgccccctgtggtgcctgtcagcaagcccggtgcccttcgtcgctccctgtcccgctccatgtcccaggaagcacagagaggctgagagggactgtgacttgggctccgctgtgcccgccctgggctgggcccttcctggctaggactgtggaggggagctgctggccatggctgctttgtagtttgcccagagttgggggctaggggaggggggagccagaggccaggatgcctgagccccctgagttcccaaagggagggtggcagagacagtgggcactaagggtggagagttgggggccagcacagctgaggaccctcagccccaggagaagggacaaaaggtactggtgagggcaagaggtgcctgggaggagtggccctgatccaggaaaatgtgaggggaatctggaacgctctaggcagaagaagctgggagggagggggaggtgaaaagggcagaggcaaggatggtggggcccccagcaccctctgttagtgccgcaataaatgctcaatcatgtgccagagttgcatctctttccttgtggttgggggggctggcccatgggtgtcccctcaatgcccacttctgggaccaggctccgcatctgagctaaatatggcagagctaatgggtacaccccatacttggggtgggggtgggggcaggacagagctgtaaacagggtgctgtctccagtctccttcccgtaccctgaccgctgcccagtcctggcttctgtgtccagccccctggcactgggtggtaaccagcaagccagctggcatccgcatccagggtttgtttcaatgatgtctcgtggagaatatggaggggctggtgccaggactgtccttggctttgcctcggggtgtgaacggggtcagtgacctctaaaactaacctgcctctcagttctgaatccagacagaatcaatcctcagctgtgtctcgctccacaccccctgccctggaagccagggaaggttggaggtgctagggggtcaggctcccctctgtgacccctgcagctgttgtggtgactcatgtcccaacctagctgcctctcccaaggagactttcccctggggacaagggggagggaatggcatggaggaggcccacatcaagcggggccaggaacccacggtggcaggagctgggctggtgacctacccagggcagaagggcccgggactcatccagaggggaaggaaggggtcttcaggaagaccacggagatgccacaggcagaattggcttcccatctgggagataggtggggagaccctggcattttgacagccagaacctggggtgctgagcagaatcttcatgcctggcctggccgctccttcggagggaagctggagggtgggctgcgagaggagtggggtcagagcccctacatccgcaggaccccaaatcggctgggccccaaggcccggactgcgctccccggtggccccggcggccctccgcgaatgcgtcctgcccctcccctgcccaagccctctgccctcacccgggtccggcgccgcccccgaagtggcgggaacaacccgaacccgaaccttctgtcctcgggagcccccagataagcggctgggaacccgcggggcccgcaggggaggcccggctgttccgcccgctaagtgcattagcacagctcacctcccctatcgcgcctgccatcggacgggcagtgccgcgccctgctctggggcccccggagcgaccacagcggaggccggaacggactgtcctttctggggcggggtggggagggggtgtcgctggagggcccggtggcatagcaacggacgagagaggcctggaggaggggcggggagggggagttgtgtggcagttctaagggaagggtgggtgctgggacgggtgtccgggagggaggggagcctggcggggtctggggcctcgtcgcggagggcgctgcgagggggaaactggggaaagggcctaattccccagtctccacctcgaatcaggaaagagaaggggcgggctgctgggcaaaagaggtgaatggctgcggggggctggagaagagagatgggaggggccggccggcgggggtgagggggtctaaagattgtgggggtgaggaactgagggtggggggcgcccagaggcgggactcggggcggggcaggcgaggcggagggcgagggctgcgggagcaagtacggagccgggggtgtgggggacgattgccgctgcagccgccgccccactcacctccggtgtgtctgcagcccggacactaagggagatggatgaatgggtggggaggatgcggcgcacatggccccgggcggctcggcggtcagctgccgcccccacagcggaccggtcggggcgggggtcgggcggtagaaaaaagggccgcgaggcgagcggggcactgggcggaccgcggcggcagcatgagcggcgcagaccgtagccccaatgcgggcgcagcccctgactcggccccgggccaggcggcggtggcttcggcctaccagcgcttcgagccgcgcgcctacctccgcaacaactacgcgccccctcgcggggacctgtgcaacccgaacggcgtcgggccgtggaagctgcgctgcttggcgcagaccttcgccaccggtgagcgggggaaactgaggcacgagggacaagaggtcgtcggggagtgaaagcaggcgcagggaaataaaaagaaggaaagggagacagaccaggcgcctaacagatggggaccaagaaacaagagatagctgagaggtgcaaacagaagagaaaaaggagcaacatcccttaggagaggggcagaggagagagaggtggagagagggggcggagagtgctcagaattgagagctaaggtgggggatgcaggacagactgaggtggagatgcataggaggaaatggaggcagatgtgggacaggggtgagaaactgccaggatttcctcgctgagcctggctggtaggtatagttgttttctttctttttctttattttattttcatttatttacttatttttattttttatttgttttgagacggagtttcgctcttgttgcccaggctggagtacaatggcgccatctcggctcactgcaacctccgcctccccggttcaagcgattctcttgcctcagcttccctagtagctgggattacaggcatgcgcccccatgcctggctaatttatttgtatttttagtagagacgggacttctccatgttggtcaggctggtctcgaactcccaaccttaggatccacccaccccggcctcccaaagtgctgggattacaggtgtgagccactgcgcccggccagtaggtatagtcttctagatgtgaaacctgagtctcagagcggtgaagttcccttccgaagggcagcccatgttggagctgggttcagtctaactctggggccaatgctttttccagatggagacacatttgcagaggagaaggaagaactagagagaggcagggagatgcaggggagggaagggtaaggaggcaggggctgcctgggctggctggcaccaggaccctcttcctctgccctgcccaggtgaagtgtccggacgcaccctcatcgacattggttcaggccccaccgtgtaccagctgctcagtgcctgcagccactttgaggacatcaccatgacagatttcctggaggtcaaccgccaggagctggggcgctggctgcaggaggagccgggggccttcaactggagcatgtacagccaacatgcctgcctcattgagggcaaggggtaaggactggggggtgagggttggggaggaggcttcccatagagtggctggttggggcaacagaggcctgagcgtagaacagccttgagccctgccttgtgcctcctgcacagggaatgctggcaggataaggagcgccagctgcgagccagggtgaaacgggtcctgcccatcgacgtgcaccagccccagcccctgggtgctgggagcccagctcccctgcctgctgacgccctggtctctgccttctgcttggaggctgtgagcccagatcttgccagctttcagcgggccctggaccacatcaccacgctgctgaggcctggggggcacctcctcctcatcggggccctggaggagtcgt

SEQ ID NO: 97932 - DNA, 13209 bp, Homo sapiens
gctgggccaggcccctctgggaagcatgtggtatgtctagagagagaacaggccacgaacatggtggactgcaggccccaggctgacccctccctgcctcctgcttccgtccaggagcgggagtacatccgccaggggaaggaggccacggcagtggtggaccagatcttggcccaggaagagaactggaagtttgagaagaataatgtaagaagccctctcccacctgaccttcccatgcgtgttaggagtttctgttctcttttctgaggcctgaggaagaaacccaaagattacatgggttggagccatattcctgccccaagagagggagctgggccctcgggtcggcaggaggctgggctggattggacgtttcccccgtgccccttggccccccttccccgcaccccccatgtttacttccctgctgttctgcccccttggctccaggctttgaaggggaagccaggcttctgctctgcatccgttgtttcgtttcatgatcaaaacaacattatctacaaagatcgtagagagcttggaaaacagagagcaacatgccccagtccctctctctggccagttcttgtggcagccccattggcctggagacatggttttttgtggttgcagctgcagctgtccccccgtcttttaactcgacatcaaaagcctctctcctgccagtgccataggtttgttagagctactgttttgtaacagctgctcaggtgtccccaaactcctggagttttccaccctgagctgttaaaaacctgccctgcctgtcacccatttctgtgccaccagcccaccccctgcctccactctcctccctgccaccttctgtccctgccataggaatatggggacaccgtgtacaccattgaagttccctttcacggcaagacgtttatcctgaaggtgagtgaggggagcgggtgtcctggagccccagacagcacaggaggctccaggaaggtgccgaggggccctctggtgggtgccccccaccaagagggaagggttggtctgcccgagcccatctggcaccacccagccctctgccgccctgtcccagaccttcctgccctgtcctgcggagctcgtgtaccaggaggtgatcctgcagcccgagaggatggtgctgtggaacaagacagtgactgcctgccaggtgagcccagtctggctgcctcttaaggcacagatgggggcacagccacgcctcagtgggatcactgaagcactcagcgcctcagctgccccatctgtacagtgggtgtgatggtaacagtgcctgctcgggagggtcgggaggagggcaggaggagtgctcatcaggcgctgcccagggcctgcctgtggcaatagcagttagtaaaggggcctggggtgttcccatccctggggttttcctggggcgacctgttccaaaagtctccgttgacggccctcagatcctgcagcgagtggaagacaacaccctcatctcctatgacgtgtctgcaggggctgcgggcggcgtggtctccccaaggtgagtccatgccgggccccctcctttcagccaggtcttctgcactttggccttgggtcattgtcccctgaactaaccctccctcccgcagggacttcgtgaatgtccggcgcattgagcggcgcagggaccgatacttgtcatcagggatcgccacctcacacagtgccaagcccccgacgcacaaatatgtccggtgagcctcactttgcctggggtcacccctgccagcccctcccctgggagcattgagcagtgcagggtacagcatgtacagctgggcacttcccctgctgaggctgcgttcctgttccctgtcccgctgggctctgctcctcccggctactaatcctgctaatcttgctgctctgtctgtggagatggggggtggtggacagctggaaccaagccaccaaggctggacgggatgtgcggcggtggctggctggggtagaccatggatggggacccgtgcagggaaggggcctgagagccatgtgctcactctgggctgattgacctgagcaggaggctctatgctctgggtttcatcttcctgcctaaggagactcgggtcccctttcgtcctcctcaccctgtcctcactccgtcatctttctctggagtggctcaggagttcccccaaagataaagggattatggccttcccgcatctgtgcctgggcttctggagtcttcccttttgtccagtcaggctgtggtgctgcgggtggccccctcccatagaccccactcttccccatcccctcctgggttccagcaggagcactgttctttgaataggatgccaggctctgctttgggcactggacagacttgctgggtgcagggaagctcacttcctctctggatgccaacttccttatctgcagaatgggcttaggtgtgctcagtggagctgagggagaatgaaatggtgatgggatgtgaaccgtgcctcccaggcttagccttctcctgagcaggtgtcccctcctgaaggggaaggggtaagaagcgccagcccagcctactctgccatagcagggctgacctagaatctctggacagagtgtatgagggctgggaaggtggtgagctctctgtccctgggggtgtgcaagcaccaacaggccgttgtaggaggattcaagcatcacagagtgggtgggggtggagggccgattctgcagcccatgggacacctgtgctaagccttgttcagatagggtagctctgcctttctgcttccagcccagtcccagctgggccaagaatggagtgtgagtggtaggggctgcgggggggtgtcagggcctcactctgttccaaagtccccccaatgatgcctctttccataggggagagaatggccctgggggcttcatcgtgctcaagtcggccagtaacccccgtgtttgcacctttgtctggattcttaatacagatctcaaggtggggtgctggggggctgccaggtgggttctgtggagtggaggggaccctgctgctgacttggttgctgcatgactttgggggctctctgccatgcctgggcctcccctttgtcagccacctttcttacttgaaaatttgggtcagggtccagatggtctcttagccctgggttgctgtagggcatgtgcccccccttcttacctctgagtcctgaggccctgaggaagggtggctggtggccagcccggccccaccctggtctgtttgtgttgctggtgccaagagccaggcccagcatgttcttcctgccaggggtgagtgggagagggcgacccaggctggattccagagctgcacctgcattctggcccagagcccccctgctggtgccagctgcaaggggagaccctgctgagggcaggccatcaagtgtgacttctgcctgccttcccccagggccgcctgccccggtacctcatccaccagagcctcgcggccaccatgtttgaatttgcctttcacctgcgacagcgcatcagcgagctgggggcccgggcgtgactgtgccccctcccaccctgcgggccagggtcctgtcgccaccacttccagagccagaaagggtgccagttgggctcgcactgcccacatgggacctggccccaggctgtcaccctccaccgagccacgcagtgcctggagttgactgactgagcaggctgtggggtggagcactggactccggggccccactggctggaggaagtggggtctggcctgttgatgtttacatggcgccctgcctcctggaggaccagattgctctgccccaccttgccagggcagggtctgggctgggcacctgacttggctggggaggaccagggccctgggcagggcagggcagcctgtcacccgtgtgaagatgaaggggctcttcatctgcctgcgctctcgtcggtttttttaggattattgaaagagtctgggacccttgttggggagtgggtggcaggtgggggtgggctgctggccatgaatctctgcctctcccaggctgtccccctcctcccagggcctcctgggggacctttgtattaagccaattaaaaacatgaatttaaaaaaaaaaaaaaattccagcccctcccactgccttgcctcttgagggaagagaaaggcaggcagcagcttggatgaagagggaagacccctcacacagcctctcctgggctcacaggagggcggagcccggggagccagttcctgaaacatgccccccattccccccccgcccaccccccactccccgctttcctgaccagttcaactgagcagatgactggtcagaaaaaaatgccccgccccctgccaggcttcagcggggcaagtttaaagtctctagtccaggaatggaggtgggggtatgggcacctggcagtgcccacagcaagccttgactgtgtggcctggagatggggcctgagcttcagggtcactgaggcacctctgggatccaggccacctggagccccggacctcccagactccactcacccattccctctccccgcacggcactcacaccaggggcggcctggagcccggatcgcagggcggggccaggccactgcctgccttcctcctccctcccggctggcctgcccccttgcctgcctgcatgcaggcttccagcagagccagcttcttcagagccaggtggatcctgtttcggtcctgcctaggtgtgtgaccctgggcgaatctacctctctcagcttctgcttcccactttatgaaaatgggactgatgtcacagggttgttatgagattaaaagatatgaagaaccggggacagtgctcagtaatcaatagtctgcagttctgcacccacgtgctcctgggtactctgccgtccccacagggtcctcagctcagcccctgtcactgcctctcctgccaccctttgtccactcggcagtgttctcactcctcatccccccacacccaccacctgtctgccagcctcttgcaccatgagttgctactcctggggtgctggactgtccccacagccatctgtctcccctgctccccatgaagaagagccagtcccctcccaggtagcacatcagagcgggcaggctccagagctcttctggtcctcttgcagtggccagaaagtggggaaaggggcccagagaggggcagggactgacccatggtcacacagcctatttatggctgatctggagccaggccttctgactatcacccatcagagcccctggattcccatttcacccaacacaggtgttggggtagaactgggggccctccacccctactagcctgactgtctcctgagacctgtctcctaagaccacttacctgaccactggccatggggaaggaaaacacctggccaaggctcatgccccaggttcccaggcatgaagttgactgtctccgcccctgctggtgtggtgagggtgactggggactaggcactaggcctttggtgcaggcgcctgaggacgtggttgcactctcccttctggggatatgcccttgagcccaggcagaggagagcacagccagggcaggacctggcagccctggtacagagcccagagggggcatcagttcctgctggtcctgctctgtttacagacaagctgctgtcctccctgcaaaggggagtgggtggggcagagggcaagtgccaggggggcacaaggctgggcatgtggctggcatgagacggtgtctgagtaatgtcaggcacctggaggcattgaccccaggaccttggaccccagacctctgaccggggggcagccagcgtccaggtaccccaacccctgccctgggtccggcgtccccccattagtgagtcttggctctacttatagcatctgacaccagaggggccgaaaatagcccctggagaagggggaggagggggctatttaaagggcctgggaggggagagagaatgaggagtgatcatggctacctcagagctgagctgcgaggtgtcggaggagaactgtgagcgccgggaggccttctgggcagaatggaaggatctgacactgtccacacggcccgaggaggggtgagtgtgggtctgctagagccctgcctctgctcccccagagcaccytcactgagccatgaggccagagcatgaagccctggagaaatttctgggggtgggggcaggaagaatgccccatggggagagcaaaggggaaccacccttcctgcccccaggtcccagcagcccaggggagccccccacccagcctgtgcccagagagcaacagctcccaggagctcactgcccctcccctctccccagctgctccctgcatgaggaggacacccagagacatgagacctaccacyagcaggggcagtgccaggtgctggtgcagcgctcgccctggctgatgatgcggatgggcatcctcggccgtgggctgcaggagtaccagctgccctaccagcgggtactgccgctgcccatcttcacccctgccaagatgggcgccaccaaggaggagcgtgaggacacccccatccagcttcaggagctgctggcgctggagacagccctgggtggccagtgtgtggaccgccaggaggtggctgagatcacaaagcagctgccccctgtggtgcctgtcagcaagcccggtgcmcttcgtcgctccctgtcccgctccatgtcccaggaagcacagagaggctgagagggactgtgacttgggctccgctgtgcccgccctgggctgggcccttcctgrctaggactgtggaggggagctgctggccatggctgctttrtagtttgcccagagttgggggctaggggaggggggagccagaggccaggatgcctgagccccctgagttcccaaagggagggtggcagagacagtgggcactaagggtggagagttgggggccagcacagctgaggaccctcagccccaggagaagggacaaaaggtactggtgagggcaagaggtgcctgggaggagtggccctgatccaggaaaatgtgaggggaatctggaacgctctaggcagaagaagctgggagggagggggaggtgaaaagggcavaggcaaggatggtggggcccccagcaccctctgttagtgccgcaataaatgctcaatcatgtgccagagttgcatctctttccttgtggttgggggggctggcccatgggtgtcccctcaatgcccacttctgggaccaggctccgcatctgagctaaatatggcagagctaatgggtacaccccatacttggggtgggggtgggggcaggacagagctgtaaacagggtgctgtctccagtctccttcccgtaccctgaccgctgcccagtcctggcttctgtgtccagccccctggcactgggtggtaaccagcaagccagctggcatccgcatccagggtttgtttcaatgatgtctcgtggagaatatggaggggctggtgccaggactgtccttggctttgcctcggggtgtgaacggggtcagtgacctctaaaactaacctgcctctcagttctgaatccagacagaatcaatcctcagctgtgtctcgctccacaccccctgccctggaagccagggaaggttggaggtgctagggggtcaggctcccctctgtgacccctgcagctgttgtggtgactcatgtcccaacctagctgcctctcccaaggagactttcccctggggacaagggggagggaatggcatggaggaggcccacatcaagcggggccaggaacccacggtggcaggagctgggctggtgacctacccagggcagaagggcccgggactcatccagaggggaaggaaggggtcttcaggaagaccacggagatgccacaggcagaattggcttcccatctgggagataggtggggagaccctggcattttgacagccagaacctggggtgctgagcagaatcttcatgcctggcctggccgctccttcggagggaagctggagggtgggctgcgagaggagtggggtcagagcccctacatccgcaggaccccaaatcggctgggccccaaggcccggactgcgctccccggtggccccggcggccctccgcgaatgcgtcctgcccctcccctgcccaagccctctgccctcacccgggtccggcgccgcccccgaagtggcgggaacaacccgaacccgaaccttctgtcctcgggagcccccagataagcggctgggaacccgcggggcccgcaggggaggcccggctgttccgcccgctaagtgcattagcacagctcacctcccctatcgcgcctgccatcggacgggcagtgccgcgccctgctctggggcccccggagcgaccacagcggaggccggaacggactgtcctttctggggcggggtggggagggggtgtcgctggagggcccggtggcatagcaacggacgagagaggcctggaggaggggcggggagggggagttgtgtggcagttctaagggaagggtgggtgctgggacgggtgtccgggagggaggggagcctggcggggtctggggcctcgtcgcggagggcgctgcgagggggaaactggggaaagggcctaattccccagtctccacctcgaatcaggaaagagaaggggcgggctgctgggcaaaagaggtgaatggctgcggggggctggagaagagagatgggaggggccggccggcgggggtgagggggtctaaagattgtgggggtgaggaactgagggtggggggcgcccagaggcgggactcggggcggggcaggcgaggcggagggcgagggctgcgggagcaagtacggagccgggggtgtgggggacgattgccgctgcagccgccgccccactcacctccggtgtgtctgcagcccggacactaagggagatggatgaatgggtggggaggatgcggcgcacatggccccgggcggctcggcggtcagctgccgcccccacagcggaccggtcggggcgggggtcgggcggtagaaaaaagggccgcgaggcgagcggggcactgggcggaccgcggcggcagcatgagcggcgcagaccgtagccccaatgcgggcgcagcccctgactcggccccgggccaggcggcggtggcttcggcctaccagcgcttcgagccgcgcgcctacctccgcaacaactacgcgccccctcgcggggacctgtgcaacccgaacggcgtcgggccgtggaagctgcgctgcttggcgcagaccttcgccaccggtgagcgggggaaactgaggcacgagggacaagaggtcgtcggggagtgaaagcaggcgcagggaaataaaaagaaggaaagggagacagaccaggcgcctaacagatggggaccaagaaacaagagatagctgagaggtgcaaacagaagagaaaaaggagcaacatcccttaggagaggggcagaggagagagaggtggagagagggggcggagagtgctcagaattgagagctaaggtgggggatgcaggacagactgaggtggagatgcataggaggaaatggaggcagatgtgggacaggggtgagaaactgccaggatttcctcgctgagcctggctggtaggtatagttgttttctttctttttctttattttattttcatttatttacttatttttattttttatttgttttgagacggagtttcgctcttgttgcccaggctggagtacaatggcgccatctcggctcactgcaacctccgcctccccggttcaagcgattctcttgcctcagcttccctagtagctgggattacaggcatgcgcccccatgcctggctaatttatttgtatttttagtagagacgggacttctccatgttggtcaggctggtctcgaactcccaaccttaggatccacccaccccggcctcccaaagtgctgggattacaggtgtgagccactgcgcccggccagtaggtatagtcttctagatgtgaaacctgagtctcagagcggtgaagttcccttccgaagggcagcccatgttggagctgggttcagtctaactctggggccaatgctttttccagatggagacacatttgcagaggagaaggaagaactagagagaggcagggagatgcaggggagggaagggtaaggaggcaggggctgcctgggctggctggcaccaggaccctcttcctctgccctgcccaggtgaagtgtccggacgcaccctcatcgacattggttcaggccccaccgtgtaccagctgctcagtgcctgcagccactttgaggacatcaccatgacagatttcctggaggtcaaccgccaggagctggggcgctggctgcaggaggagccgggggccttcaactggagcatgtacagccaacatgcctgcctcattgagggcaaggggtaaggactggggggtgagggttggggaggaggcttcccatagagtggctggttggggcaacagaggcctgagcgtagaacagccttgagccctgccttgtgcctcctgcacagggaatgctggcaggataaggagcgccagctgcgagccagggtgaaacgggtcctgcccatcgacgtgcaccagccccagcccctgggtgctgggagcccagctcccctgcctgctgacgccctggtctctgccttctgcttggaggctgtgagcccagatcttgccagctttcagcgggccctggaccacatcaccacgctgctgaggcctggggggcacctcctcctcatcggggccctggaggagtcgtggtacctggctggggaggccaggctgacggtggtgccagtgtctgaggaggaggtgagggaggccctggtgcgtagtggctacaaggtccgggacctccgcacctatatcatgcctgcccaccttcagacaggcgtagatgatgtcaagggcgtcttcttcgcctgggctcagaaggttgggctgtgagggctgtacctggtgccctgtggcccccacccacctggattccctgttctttgaagtggcacctaataaagaaataataccctgccgctgcggtcagtgctgtgtgtggctctcctgggaagcagcaagggcccagagatctgagtgtccgggtaggggagacattcaccctaggctttttttccagaagcttccttgaggctagcattctgtaccactcattcttcccaaactaaggaaggccaaggtcaggggagctcaccgggcacctgcagtgcaccaggcacttgtgatatgccattgtgtccatcgcatcattcattcctgcattcagcagcaggtcctgctagtctgtttccaggtgaagctcagagaggtgaagtcacaaacagtgcagactgcttcagaccagaacgagggagagtggggatcatgaggagatggaagtagaatctgcaaggtggtggggaggtgggggtgttatgattgaagcacaatggccgagggaagtgaaagggaaggaactggctccagctccctctcacaactggacttgagttctgcccagctctgcctctggggcctgccattccccatgccacgtgcccaggcagagacctcacctctgtttactgcctccagccagctctgggacctgcccctgccgccacaactgtcttctcctgccctccagcccaccctattcacacaaatgagctgaacaagggcaggtgaggcttggaattgatttattaagcacatcccttgccaccctcccaccttaaaagttttcagtatcaaaagaagctagcgcaggccacccgagtccctgaggttggagtcctagcatagctcccctccctcaaagagggacaaggggtcaggggcagagcaaaaatccagtctgcttcaaccacggagactgcctttgggatggaaagtttctggagctccctccattctattcctgtggggcaggaacatgccagggctgctggtaaatggcaggggtcacctttaccagggcgcaggcatagtgtggcccctgcctgccctggggccaccctggaacagtaagaccctctgggaagggaagaaaccagacccagccataagctttctccccttctccctcaaatcgccccttcctcctccccaaaatcaggctatggcaaaggggctggcagcaggggaatggaggttttggaggggaaggccagccatgcgaaggcaaggagaaaaggaggatggagagagccccagccatccccattttccttcctctgcctccgaggggctgcttctggagggcactgttgtgtggggaccctgtgaggtttgcaggaggcgggcaaaggggcaccagacagggaacatgcacacaggcagcctggccatggagagctcctggctgtccgcccaggtggcgtcttgggcagagctggcgctccacaagtgattattgatggtgacaggattccctcatcctgctccaacctctcaactgtggacacattcaccggcagtcactcatctcacatgcccaccagcacgcgcacacacgttcccctaacccacgctaacacacccaccccctgcacacacacactttgaagccacacctcttccccgacaacacccgtctccacactgcgcacctaggcctgagctcacacacacccaggcccatgctcacggccctgtcacctatgcactcagcctggcccacactcccgacacacggtggcaggctctcaaccagacagcagcacaggatccttgccctgggcttgctggagccctggccctgaaagggagtatggtgaggcctcctgggaacctggctagggcaacggtcagggtgaaactccttcccaatcccagcagcttggtccctcaagatcccatggggagaatcgccgtgaaccttggctggccaaagaacaagcatccagcaccacctagtggtgtcctggaggagggtggggggtggtaacagaaggggaccccctgtatccctaaggcctgtggtccctggtctcccaggtagacagagggcttcaggacccagccaggcagctggggatgtggggaggaggctggtggggaggaaacaggcagctgtcctcccggtagagctaagaacacactcagttccaccccagt

SEQ ID NO: 97933 - DNA, 28922 bp, Homo sapiens
tgtatttttgatagaggcagcgtttctccgtgttggccaggctggtctcaaactcctgacctcaggtgatctgcccacctcggcctcccaaagtgctgggattatgggcatgagccactgtgcccggcctatttattttttaattgagactcctgacctcaggtgatctgtccaccttggcctcccaaagtgctgggattacaggcatgagccaccacacccagccctattattattattattattattattattattattattattttattttcgagatggagtctcgctctgttgtccaggctggaatgcaacggtgcaatctcagctcactgcaacctctgcctcccgggttcaagcaattctcctgcctcagcctcctgagtagctgggattacagaagcgcaccaccatgcctggctaatttttgtatttttagtagaggattgctttagcccagaagtttttggctgcagtgagccatgatcacaccacggcattccaggctgggcgacagagggagaccttgtcacaaaacaaaaaaaactaatagtctactgtttaccagaatacttatcaatagcaaacagtccatttacacacattttgtatgtgatatgtgttatatactgtatttttacaataaaggaagctagagaaaagaaaatgctactaagaaaatcataagtaagaaaaaacatatttaccattcattaagtggaagtggatcatcacaaaggttttcatcctcatcatcttcacattgagtaggctgaggagggggaagagaaaggaaaagagatggggttggtcttgctattttgggggtggcagaggtggaagaaatgtgagtataaatggacccgtgcaattcaaacctgtgttgttcaagggtcaactgtatttaactcgatgcttgctactgcatgaaattgttttacattttttctttgtgtttttgtttttgttttgagacagagacttgctctgttgcccaggctggagtgcagtggtacagtcttggctcactgcaatctctgcctcctaggttcaagcaagtctcccacctcagcctcccaaccagctgggattacaggcacttgccatcatgcctggctaatttttatgtttttgtagagatgagttttcaccgttttggtcaggccggtcttgaactcctgacctcaggtgatctgccgccggcctcggcctccttaagggctgggattacaggcatgagccaccacactcagcttttctttgtttttaactgattatatacacagacggtacacacttttaaaggtacaaaaataaaaagcgttcctggccaggcacggtggctcacgcctgtaatcctagcactttgggaggctgaggcggacggatcacctgaggtggggagttcaagaccagcctgaccaacatggagaaaccccatctttactaaaaatacaaaattagccaggcgtggaggcgcatgcctataatcccagctactcaggaggctgaggcagcagaatcgcttgaacctgggaggcagaggttgcagtgagctaagatcgcgccattgcactccaacctgggtaacaagagcaaaaactccgtctcaaaaaaaaaaaaaaaagtgttccttacttccctattgatcaggcacatagtcccacttcccaccagaggcaagaactatttccactttcttttttatctttctagatatattctcaaaaataacaaccataatactacgcgcataacacgtacccttatttttcttcacatggggtactgtatataagtgtataggtgtacatacacatgcatacacacacacatattttgttctgcactgtgcacttgatacttatcaaaaatatttggccaggtgtgatggctcatgcctataatcccagcactttgggaggctgagacaggtggatcacctgaggtcgggagttcaagacagccttaccaacatggtgaagccctgtctctactaaaaaatacaaaaattagccggatgtggtggcacacacctgtaatcccagctactcgggaggctgagacacaagagatatatatatatatatatatatatatatatatatatatatatgtatatgtatatgtatatgtatatgtatatatatctatatctatatctatatctatatctatatctatcatgaaggttttaccatgctagtacattacaaatctgccccattcctattaatttctgttcagccttccattgtatggctctccctccattaatataattcattccctattgatggacatttagttgtttcctttttcttcttgctattgaaaacaatgactaatgctaccacaaataactgtacttaaacaaatttgcacttgtttaggtatactggagcttatgtaggtatacctaggagtgaaattcctgggttagagggtatgtgtgtgtgtgtgtgtgtgtgtgtgtatatatatatatatatatttttttttttaatgtagatggagtctcgctctgtcaccaggctggagtgcagtggcataatccaggctcactgcaacctccaactccctggttcaagcaattctcctgcctcagcttccggagtagctgggattacaggcacgtgccaccatgcccagctaatttttttgtatttttagtagagatggggtttcaccatgttggctaggatggtctcgatctcctgatctcatgatccgcctgccttggcctcccacagtgctgggattacagatgtgagccaccgcacctggcttcagtcttttgtttgacacttgtttatggcctgtttccctcctctgaccatgaaaaggacagtgccttgttcatcactctgttcccagagacttgcacatggtaaacttaataaacatttgatgaataaggaacccacattgtagactctctaccaattttgatctaagaacatggtcagcttgccgttgagcctttagcacactatacttttttttttttttttgaaacggagttttgctcttgttgcccaggctggagtgcaatggcacgatctcaggagtttctccatgttaggtcaggctggtctcgaactcctgacctcagatgatccacctgcctcgccctcccaaagtgctgggattacaggcatgagccactgtgcctgtccagcacactctactattaacatatgctttgtcttttttttcccccatgagtacaatggctgatacacaggaggactcaataagcctgagttgaaggaatgaattagtgacttttcagactgtggatcacatctgaagccaaatacaagttaggaagaaggacaagctaaggaggctcaggggagaactaggggctccaggctagaaagttgggaagagaggccaggtaatcgccatctagagattgttatctggggctgtgctggcagggaaattctcaagagctgtcccagagagacagtaccccatcttccaagaagtcaacagaacagaagtctctactcccacttccaccattaacctaggattgctttttccatcaggtatgtaggcatgggttttcaaggacctctgaaatactttagacccgaacaaatttccattgttagttctaaaatataagaaagctgcgaaaattaatattttatggccgtgtggcatggctcacgcccgtaatcccagcactttgggaggttgaggcgggaggatcactcgagcccaggaattggagaccagtctaggcaacatagcaagaccgtgtctctacaaaaaattaaaaaaattagcagggcatagtggcgcatgctgcagtcccagctactcaggaggctgagatggaaggatcacttgagtctgggaggttgaggttgcagtgagtcgtgatcatgccactgcacttcagtctaggtgaaagagtgagaggctgtctgggaaaaaaaattttttttaactaaatgtatataaatgtagcaatatgtcaactattaacagcaattagattgaattatatatatgtatagttatttataaatcttatttaatgtggggcgttactgcatttcagtatgtttgacataatataggatgaggccttcaaaattggaattttctttttctttttttttttttttttgagtttcgctcttgttgcccaggctggagtgcgatggcgcaatcttggctcaccacaacctctgcctccctgggttcaagcgattctcctgcctcagcctcctgagtagctgggattacaggcatgcaccaccacacccaactaattttgtatttttagtagagatggggtttctccatgttggtcaggctggtctcaaactcctaacctcaggtgatccgtccgcctcggcctcccaaagtgctgggattacaggcgtgagccaccacccccagccttacttaggaattttctaaaggggagactccctattttgtcaggatttcatcctctttaatcctaaatgtccatctttatatgaggatcctcataaaaagactcatcccagagtcacagaaaggacaaaatgaaatgaaaaaagaaaaaaaaacagtattgtaaaagaactaatctgtaagatgcaaagtagtattagcactggatttccggtcagctcctggagggctaaggggttgttttgttcatttcagcttctcagtcagtatcagttgggtggtcaactccaggggacactattcatgttatatttaactggaagaatttgccattcacagaaaaggcaatgtgaatgctgctccccagagcaccattcacagaaaatgcaatgtgaatggtgcctcctggagattttgccttgcttagcaaggtgctagagctaaggactcagaaatgtttgttaagtgagtgaatggaatcccaggctacttcttactcattccaacccccaggacgaaaaagaaaagttgacaaggggtgaggagagtgggggaggagaaagggtgatccttagctacaaggcttctatgagattgggtgtgggtcggtgctgatgggagtgcaggggaggtgagcagggagaggatactaaagcaagcgtcctgttcccagggttcctaattttcctagaaatattacttctctccgatctcagtgcagaaccatactgatgattttacagccctggatttgtcaagttcttatgttgatgtatgctgttcattcattaaacagaagaacaaacaaacgcagttagcgcctaccataagccaaattctgtgctggaggtagagtggtgaacaggacagcaaaggttctaccccgcatggggaagcaatcaccctcgggaggtggtacttcaattgcgactagaagaaaaaagaagagtgagtgattcagaccaggccaggcagtcaggaagcttgagggacatagccctctgaagcgggtctggagcaagggagtgagggagaccagtggacaggggccaaatcaggcagggtttgtggagactgtattttacccaaggtaattgggagccagtaaataattttaagaaaaaaaaagtgatatgggcaaattttaatttttcaaaatggagcgcaggttggaagaggcaaaagtagaggcagggagagccattaagaagctactgcggctgtcttggcgacacatgatggtgtctttaaccagggtggtgccagaagagatggagagaagtggatagttacaggtacgtttaggaagtaaaatccgacaggggtggtgacagtaaacagccctacctcaaaaaagatcatggaaaacacttcagtttgctcattaacccatcaggcgtccgccttcccttaaccctatcgcctcgatatatggacacagcagggggacgaggggcggggcaggcgcccacaaaaatccgggaactttaatttaaactgtgtggacttcagcggagagtagaataaagaacacaggaacttccggttactccggaagtggaagcttcatactcctaagctcctcccccggcggcgagccagggagaaaggatggccggcctggcggcgcggttggtcctgctagctggggcagcggcgctggcgagcggctcccagggcgaccgtgagccggtgtaccgcgactgcgtactgcagtgcgaagagcagaactgctctgggggcgctctgaatcacttccgctcccgccagccaatctacatgagtctagcaggtaagccccacccccacggtaagccccgcccatttgtcttgctcccgccccctgcgcccccaatacgcctctgcaatccctgaaccttagtttccccacgaggtctcttatgaatgtgagtgaagcccctaaggtgatgagagccttaccagcctctcttactttcccagaagctttcatttacttatttgttcagtcaaaagggtatttattaaatacattcgggcyacaatgtctaggaatggcacagaaatcagaccagggtcccgcccattgggactcacagtccccacggggacatgagccttttcaagtgcaaggcagagaatgatttgagcccctgaaagactctttgattaggaagcatttgggataggaaggtgtcagttccggctttgaagacgtrggggcagggatcatcttggaacgttttgtttgaaggagggactttggactggtacattcgatttggaccatagtgggcaaagaaccaacgtattgagcactcactgtgtgacaggtgtcacaatatgtcargtaatttttatcacaccctttgagatagtttctctaatcccagttttacagatggggattagagagattaaatgccctgcccaaggtcacacagccagtatgtagtaaagtggagtttccagttctggcctgtttgaccacaagcttgtcctctttactattataccactttgcattccagacagagggaacagagagaatggatgccctgggcagatgtgggcacatccaggagctttatttactcagggagcagggtacatgaacaggagtagtgaccaatacggttggaaaggcaatttggagcctcaaaagtcaggttgaagaatttgggcttcattttcataggaagggagtaagatagcaagaactccttccaggagagtaagagcaaatcctatattcaggaaggacaaatataaacccaggtttccatagatgagttcatcagatgccaacatcttgatggacttgagcaaaaggagaggaaatgtctgccaaggtagaaagatcatctgagccctggagttcaagactagcctaggcaacatgacaagatgccttctctacaaaaaataaaagaattagccagacattgtggtctcgctacttgggaggctgaggtgggaggatcgtttgagcccaggaggtcaaggctgtggtgagccatgctctccccactgcactccagcctggatgaaagagcgagaccctgtctcaaaaaaaaaaaaaaaaaaaaaaatgccgggtgcggtggctcgtgcctgcaatccccgcactttaggtggcagaggcaggcagataacctgaggttgggagttcaagaccaccctgaccaacatggagaaaccccatctctactaaaaatacaaaattagttgggtgtggtggtgcatgcctgtaatcccagctactcgggagcctgaggcaggagaatcgcttgaacccaggaggcggaggttgcagtgaaccgagatcgcaccattgcactccagcctgggcaacaaaaacaaaactgtctcaaaaaaacaaacaaaaaaaagacgaatatctctaattgctcactaaaatatgcatacatacrtacatacaccttcccctatgtgtacatctcatcatctctcattcattcaaaggggaagctagaattttgagatttctcctggttctctccaacttacaggccctcttggcctacatttgcgcttggaccccattcatgctctctctttcctctctgtgctggggagttcaccaggccacatttgtctgtttcaggctggacctgtcgggacgactgtaagtatgagtgtatgtgggtcaccgttgggctctacctccaggaaggtcacaaagtgcctcagttccatggcaaggtgagttggagggtcagggtaggcatatggtagtagcgtggtaggagtaatataccccctggttggaccacactgtccaagcagtctgaggcatggggtaatgcgtgtgtgtttggggcagctacctgttctccccaaaatctgctggtttccatagaattggataggacccatgtgtcctgcctctggatttggagtagcaatatctggaaggctttggagtctccccagagagtggtgctggrcctcttagagtggttgagatgcccaccttactgcagggacaaattcccttacctactgtggcttgtttcctgttgcttctccagtaggggtctggattcacagtaatatgcttcagcttgtctagcgaggcacagtttgctggtacctttctttcttttgttttttgttttttgtttttttttttgagatggagtctccctctgtcgcccaggctggagtgcagtggcatgatcttggctcactgcaacctctacctcccaggttcaagcaattctcatgcctgagcctcccaagtagctgggactacaggtgtgtgccaccacacccagctaattttttgkatttttttttttttttttttaagtagagatggggtttcaccatgttagccaggatggtctcaatctcctgaccttgtgaccctctcgcctcagcttcccaaagtgctgggattacaggcgtgagccaccgcgcctggcctgctggtacgtttcaatccagtattatctcattctggcctgttgaggttggcaggaagtattcaccccagtttttcacagagtaagctgaggctcaaaggaccgtggtcagtggtagaggaggggttgggacctgtgtcttctggatggcaactctgtgctgtttccaccaggccatactgagtcatctaccctgacccatctggtcttcccagagatcagggcttacagtgctgtgsctgctggccaggatgggggtataactcttaactaggcactggagggtggctcattagtctgaagaggtactgaacctgaggctttggccaaactccagagctgaggactcagctgaggacctgttgcttcagcatgtcaagaataggtggactgggccagttgagggttgcctgcccttcaaacctccttcatctgctcctttttcagtggcccttctcccggttcctgttctttcaagagccggcatcggccgtggcctcgtttctcaatggcctggccagcctggtgatgctctgccgctaccgcaccttygtgccagcctcctcccccatgtaccacacctgtgtggscttcgcctgggtaggtaacctagcaggactcctgctgtctcctcttatctaggaaggtggagctctacatccctattaacacccaacagggcttctacttaccagcttcccctctgtttcccagggctaaagttgcagctgcagggtggtaaagcctggggagaaaacagggagggtgctgaatcgggccttacctttccagcagagccctaggtcaggctgtttgggaaggagagaggaaagaagggcatttttcttgtcctgaagaaggaagccactaaaagacccagtaggacagtttacaaacacagaggggagatggggggctaaagaggatgctgggaccacaggtctttccaagggcccttctggaggacttggagcaatctcaattccagcccaggcctggtggggagtcacagccatagtctctgtgtagagctcagcctagtcttttttttttttttttttttgagacagagtctcactgtgtcacccaggctggagtgcaaatggcgcaatcttggctcactgcaacctccacctcctgggttcaagcaattctcctgcctcagcctcccaagtagctgggatgataggcgcgtgccaccacacctggctaattttgtatttttagtagagacggggtttctccatgttggtcaggctggtctcgaactcccaacctcaggtgatccacccacctcggcctcccaaagtgcagggattacagttgtgagtcactgcacctggcgagctcagcctaggcttagaccatccctggagaagcccaggtatggttacatctgcaggtgcagaaagggctgtcagcttcacagtacggctggtctaaagagctgtattcagggcctggtattgtgtgataagcacagactggggtgcagatatggaccgtgacggccttgggaagggtgtgagaatgaaaggttgcaacggatgtctctaggtcggagctgcccctgtaagccttaaggaaaaaatttccattcactcaccttcctgctctcacagaagccattcactcaggtgttgagcacctactatatgccaggcactttgctggagatccagaagtctgccctctggtgctaatcatacaattgaatgtaagagtacaactatgaaaaagtgcagtcggggagaggtgcttcaggggtgtgtgtaaaggcagaccaagaccagcatggggccatcagggaaggcttccctggggaaggggcattaaaggtaaggtgggaaggatgcatgaatgttaactaggtaaatttgagaagagtaagggaaggcttctaaagagaagtctcagaaagtgcccaggtgggagagagggagggtcrttccaggcagcctgacatgcaggaaatcagagagtgggtgtgagctgggcggactgatgggtggtggatggggccagccatggagagcctcacattggagatcttgactctcaaagcatcaggaagtacggagggattttattttattttattttattttatttgagacaaagtctcactctgttgccccagctggagtgcagtggcgctatcttggctcgctgcaacctctgcctcccagttcaagcgattctcctgcctcagcctcctgagcagctgggactacaggcatgtgccaccatgcctggctaatttttgtatttttagtagagatggggtttcactatgttggccaggctggtcttgaactcctgacctcgtgatccgcccacctcaccctcccaaagtgctgggattacaggcatcagccaccgtgctcggcctacggagggattttaaatgagggttgaggagaaaagttgtttcatgaatagatttgccctttggaaagctcattctggctactgtgtagagaacagattgaagggggcgggagtggatgcagtagaccagttggtagttttagcacagggcccagtagctagactagagaggtggcatgggtcttgggcattgaagagaagtacacttgagctgtgttttggaggtaacattaaagctttttaaaaatttatttccttaacaaatacatacatagctcatactgtatgccaggcatcaytctaagcattttataagtattaagcttgttcatcyataacaagtggcaaaagacaaattacagcaaacttacttatagagccaattggctttaatttgtgattcatgaattggtgcagcctccgttytacaaaatagaatgcaagtttccattgggcaatagcagaacagtgggttttgtaaggtgggaaccaggaaacagaacaatagaaagaaacctgattggttaacatcagatttttttttttttttttttttttttttttttttttttgagacagagtctcactctgtcacccaggctggagtgcagtggcgccatcttggcccactgcaagctctgccttccgggttcacgccattctcctgcctcagcctcccaagtagctgggactacaggcgcccaccaccacacctggctaattttttgtgtgtgtatttttagtagagacggggtttcaccatgttagccaggatagtctcgatctcctgatctcgtgatccgcctgcctcggcctcccaaagtgctgagattacaggcatgagccactgcgcccggcccacatcaggtttttttttataagggttaaagcagaggagacttccttacttgggtagactggactctcctgttttcaggaaaaagtggtctgttttgggacctatcagttaccttaaagtttcagtttgaagatcaagtgcggtggctcaggcgtgtaatcccagcactttgggaggccaaggcgggtggatcacctgaggtcaggagttcaagaccagcctgaccaacatgaagaaaccctgtctctactaaaaatacaaaattagctgggcatagtgttgcatgcctttagtaccagatacttgggaggctgaggcaggaaaatcacttgaacccggaaggcggaggttgcggtgagctgagatcacgccattgcactcccgcctgggcaacaacagtgaaactccgtctcagaaaaaaaaaaagtttcagtttgattatgtggcatttagcatgagtgacttcatttttgtctggtctcttgggtctagtgcgggggctcaatccagaacaatggcctcccgtaatttttgtttaacgcagcttataggtattattattctcatccccagtttatagatgaggaaaccaaggactgaaaaggttaagtccagccacagatcaccgagccagggtttgaattcaggcatctggctccagagtccacactttcaacatcttggctatgctgataaacttcaagagtggattagatgaggaaagagcagtaagggatgaccccttgtgtttctgcttataagacagtgatggaggccgggcgcagtggctcacacctgcggttccagcactttggaaggctgaagtgggcggattgcttgagctcacaagttccagaccaccctgggcaacatggtgaaaccccgtctctaccaaaaatacaaaaaaaataagccaggcctggtggcacatgcccgtagtcccagctagtaggaggctgaggtgggaggatcacttgagcccaggaggtcgaggctgcagtgagctgtgatcctgtcactgtactcttgttgctctagcccgggtgacaaagggtgacctgtctttaaaaaaaaaaaagacagtgatagaagctgtgggtgtggatgagatcaccccaggagagcctagtgaaaagagaagggatctagggcaaagccctggggaaccccaaaatgtaatggctggctaaaggaagatgagccagacacagagacagaaggagtagccggaggggcaggtggagaactgggagatagtgtgcttggattgtgcttcccgggatgagcacaggaaggagagaggcttctgctgtcctgaattgtacacgtgrgaactgaaggagaccccggaatctggagacacagaggtctctagggccttagaaaagctgatagatggggcgtgctgcgaagtccaggccgagccttagacttgggaggtgggcgtgggaaggaggtcagggaaggaggctgttaaacctctgggaaatatggaccctccttaatacttcctattcaacaactattaataacagttgtgataaattaaggaacaggagccatgtgacaggcttgtctgaagcactttacatacatttccttatttcatcytcatagtacccttatgagctctgagttagattcagaggggaaaaaaacttgcccaaaatgcacagctaacaagttagcaaggaataaagacagggttggtgtccagggctgtctggctccagggcctgagaacttagctcttcttctaggccactccgtgtcctgtgatgagtgtccattgagcatttgctgggggtggagacagggtttagcacttgtggaggctgratcccctgccccagggagctaagcatagtgggaggtgcagttctgggcagcctgggcagcagacggcaggcagagtcaaggggtgctccggtagagagccctgggagtcrtgaggtggggagaccgcgtcctctaactggggaagtctgccaggccagggaagcccggggaggaggagaggtttaatctgggacttagacacatacatgtgtggggcaaggcttagacacatacatgtgtggggacaggggattgaattccagcattccaggaaaccttggccccattgtagctgtgtgaataggagtagaagagtagatggagcagagaggcccctgagtgccaggctgagggctaggggctctgatgtaggcagggcctggcatcggcacacactgtcacaggctgggtgagataaagccaccacttcctgtgtaggcctcttggagcgaagcaaatttagtcctggctaagaaagcaggaagggcagggaagctgaggacgttacacctgtctgctttcctttggggttcttccacggacactgcttgtctgggcccacagcgtgtaccacccacttgtccccacctctactagggagcatgggacagccctgcctgaactctgaagaagcttagagccttcttagatcggagggtcccaccccttgtctttataacatgtgccagaggccaggggtcacttcacagatctggtcttgtcatccctgattcttggatttttcacctcaatggtatctgcaactcagcttccttcttggagaggggggtcacacttccccagggtagcctgcagtccagtgtgactaaggaccctagagaaaaagcagcagatggccgggcatggtggctcacgtctgtaatcccagcactttgggaggctgaggcaggtggatcatctgaggtcaggagttaagaccaggctggccaacatggtgaaaccccgtctctactaagaatacaaaaattagtcaggcgtggtgatgggtgcctgtaatcccagctactcgggaggctgaattgcttgaacctgggaggcagaggttgcagtgagccaaggtggcgccactgcactccagcctgggtgactggacgagactccatctcaaaaaaaacaaaaacaaaaacagaaaaagcaggagatgttagatgttggggtggtagaaggcagatagttgggccctgtgtgtcttatgggatgtggggttctgggacatgggaccccctcatgctctcactaggccttcaagaaacaaagcctcagaacccacactcctgtggatggcctagtttggctttcccagttgctcttgggcttcccagttgccctgtgaatttctgcaggagggagggatactgagctgtatggagggtgcggcagtggactttgacctgggccttctggggcactgaggctcctgatttctgttggggtgaggataggaaggcaaggtccctcacccgctccgggctaagtcttgggggaagggtacctcagctttgcctctgggaaatgaggagaccccgccctccagcaggactcatgataacgctggcacaagaaggcagcccttgccttgccatttaggcctgggcttgggctggggagcagccaggyggcgggtggggagcctaccaaagctccgcataccatgtctctttgacttcacggagtaggggcccctgctgtgtgccaaagccagaaggccaaaccaattccccaggccttcatccagtcaggaaaggtcctcaggtgtagagaggagggtgaagtggtgggaagcccaaaccgtctctgtagagtggtttgtgtaggtggggactgattcttctcttcctctgttaagcaaactacaagaagaggtaggttgcagctgtagtagaatgatggttagacttcaggaaggacttcccatggtcagacaagagctagtggaacaggcaatggcaggaaatcaagggatcytctgggatcktggaaaaagccctccttctcccatccgcatccacctctgtctcccttctctcaggagtgagctggggctggcctgccctgcctgaggcagggggtgagacactgtggcctccagaggagcccaggatggcagcaggcatcatatttaacattctgcctcccccacttctgagacactgagctattttaagccccacttgtccccaccgccatggtgtcaatgacagccccgagcactggggcttagcgccgggtcgaattcctgacagatctggctcacttggcatccaaccagtttcacggctgtgatatttttgtctcgattttcttatttccaacagactgaaacagcctcttgctctccctccacccagtctcctattccacccccactggcaccctgcccctggccaccccctctcctcagtgtttacgcaaagctctgggtgcctgctgggcagcctgtcgccctcctggccagttcccctccctgccccccttcacttgagcgtggcraggagtccgagagtagccgtgccttggcatcttggaactctccttccttccagagcccatctttcccctttgcttgctcttgatgacaaactctgagtgaggagaaatggatctgttcggttcacattgatgggaacatggctccagaggaaggaggaggggctcttcctatagctgaggtgtctccgttctggaatggagagaccctgrggccccatagtttgacctcaaactttgtgacycttgcggaaagggaagttgaggggcaggtgaasgggcrtggtgagagtcagtctactggacctgatgaaggaaactgacattgatgggcacctactatggaccaggcagcaaaaccagcagccattcagaggagttccttggtgccaggcattccgcagacctcgtcctcatggcctcctgtgcagtgagcatcattatgaacctgttttgtaggtgaggcagtggaggctcacacatactgggttatgtgtccaaggtcacacagctgcgyaggggctgaggcaggacttgaatgcagactctgtctcattgtgaagactggacactcttcccccagcctggagctgtggaggtgggcctaggcagctaggagaccaccccttatctgcctaaacatccttggcctgcagggagagtgggaggcagacatcctcttaggcctcagttctatgggaagctgacggggttctgtgctggtcaggcaagtggagagaacactcatgtttcagcctgtcctgggctctgtgctgtacgctgtatttgtattgctcattaaacccttaycaactatgattattcccattttgcagatgagaaaactgaggcacagcaaggctaaataacttgcccaaggacacacaggaaatgcagagccaggaactgaaccctggcagtctggctgtagggcttgcattcttaatgataccactacctcccaaatctgaggaaagggtgagaagaggagcacccccagagtgggatgctccccaggggggaggggcttttcaggggtgcagaggccaggcttcaggtgggtctctgtgagtggaaggcacccagggaggcggttggagaggggacccrgcagccccacccatcctgtggccctacgcayatgtttgcccgcacacacaccccctgctttcggtgttctgagccacttagctcagtcctgcagtcctcttctcacctcccccttcctgctgtgggtgacaaggaggcctggctggctgccagtccctgccgccttcctcttctccttcccacattggctccagggccactctcctccctaaggatgtccctgttcctggcctgccagggagaactggtccatgtgattgcctgggtcccgtctccagcccaagcctgctcctctccccatgctgactctaagcttttcagactgtgggagcagtgtctgagaagccaccaggttcagtcctgttgtgyagcctccatgcctgtctctggggagggggctgcagcagggcagagccttgwgtctggtggaagggacagagtggccatcctcaaagraggaagcagcctgccctagaccacaccacctaacgccaggctggaaaggaactgaagtttcacttgagccatgatttgtcccgggggaagcttgggctgagaagggcagggccctttgaccaggtcaagaggagcagaagcagcaaggctcagcccagagcccaggccagacaggkgcactaggcrgccttgcgccttccagagcttggcaccccgagaacctgactggctgtgcagcagttctgccccgcctgtaccccttctcctcccattctctcctgagctccccagacctgcatttggaatgcatcttactgtctgacctgcctgctacagtgccagacagagtgtagcttcttgccccctccctctgtcccctgcctggccagttttcctggtacattggagccaactgagcagttcctggcctttcctcatctccgccaggcctgtcccaccctagcgcatccctccccacctccaggccattcccggcctggcctgctgttcctttggttgtcacgatttcccagcccttcccttcagcccaccctgctttcagcagtttgggcctttgctgtggacacagcagtccctgaagaaagtgccagcaccaacgcccacaagctcttaggctcattcgctagataacttttgtgctctctycacgcagctaatttccaggaagaaggcctcaaacattcccctgggccctggcccaccacagcccctccagtcctgccctctactcctcccaggctcgggagcagccactggtctggcgggttgggcaggcccagccaggaggaagctgggcttggttcaccctcctcctgggagcctgtgccccagtgggatctgcttgatctccctcccctgctgcttggaacacaccccaagctggctcgagcccctccaccccacccacctcattcccgcccccagaggctgaggtcactggctcccctgggccbsgggtggtgctgtcaacacctgccggttggaggaggaggcaaggcccctgggggctgttgtcttagcaattgagtaactagggagcttggctataccsgaactggttcccaggccaggccggaacctgtggaggctgcagccccccgtggccttgggggtttggggtggcaggaagtccaccccagggaccctggctgggtgggggtagasggacataggtttgttcagagggctccaggggcaggaaaagcacatttcttgtccygcagagccccttcccaaaggtgaaatggatgtgagcaaatgggggtccctgccttgaggtcrgggtggggggcagcatgctcaccagcccctccctccttaggtgtccctcaatgcatggttctggtccacagtyttccacaccagggacactgacctcacagaggtgagcattcctccagctccccctcctgcacagggtggtcccagaggagcccagaagtgggcagaggggctctagagggtcatgccaactccctctgaggagcactgggaggagtatggggtgggcatcctaaacctgttggtgcccttgatcctcagtgagcctcatcaggtggggatgagtattcgctcttcttgcctgatgaggcagctgagccttcgacagggggaccacatgcttaggggcacccagccagtgaagggttgccacaggacgtgaccccatggctgtcagactccacactgtgctctgaattctgtgcagcgtggtcatgtcctggagcctcagcaggaaccctccaccagcgtccctaaagccttgttcctgggcacatttttaaaaacttgtatggtgatgtgaacwcaagactcagtcagagtgaaacagtgataggcaggcccaggaccccggcccctctctgccactcctccatgcccccatccccgcgggtcctctccgtgaagcctcatgctggtccctcaccacccttccctgtcctcagaaaatggactacttctgtgcctccactgtcatcctacactcaatctacctgtgctgcgtcaggtgagcctgcctgggtggctgcaggggcaaaatcgaaccctgggggcagaaaggggtcacccagccttcccctgggggccttcttcactagtctcccaacacctacgccccccaacccccaacacatcagctgtcctgggtgaggactctggggtaggactgggggccctggctcctgacaaggagctgtagcacttgctgcccagctgtggcctgtttggtggggagaggggtagtgacttcaggggccatgcaccaatgttggggggaggagatgcttcagggaatgctgctctggggatgggccacctgccctctgagcaaccctggacggtggggcaggaccgtggggctgcagcacccagctgtggtcagtgccttccgggctctcctgctgctcatgctgaccgtgcacgtctcctacctgagcctcatccgcttcgactatggctacaacctggtggccaacgtggctattggtgaggccctggggggcttgggccatctgcagaagtgctagcttggggtgcgagtgggaggttggtgccattcctggagaaggaggttctagagagactcttggggtagaggaatggagaagaatttgaggtgggagagagaggaggctgggaggagagtccraggatgatcctggggtcagagagcatggagttksgggtggccttggggagaaggagccgaaggaatgagtctctcctgcccccactggcacccaggcctggtcaacgtggtgtggtggctggcctggtgcctgtggaaccagcggcggctgcctcacgtgcgcaagtgcgtggtggtggtcttgctgctgcaggggctgtccctgctcgagctgcttgacttcccaccgctcttctgggtcctggatgcccatgccatctggcacatcagcaccatccctgtccacgtcctctttttcaggtgggtgctgccccctgcctggtgctcaccttctttggacccttccttgcccactccttaggggagattgggggctctgtgtgcccatccgccccctcccaccttgcctgcatgcaccccacccttgtctccatgcgagctgtcagagctgtgtgcctcaatgggctactccttyggcccacagctttctggaagatgacagcctgtacctgctgaaggaatcagaggacaagttcaagctggactgaagaccttggagcgagtctgccccagtggggatcctgcccccgccctgctggcctcccttctcccctcaacccttgagatgattttctcttttcaacttcttgaacttgsacatgaaggatgtgggcccagaatcatgtggccagcccaccccctgttggccctcaccagccttggagtctgttctagggaaggcctcccagcatctgggactcgagagtgggcagcccctctacctcctggagctgaactggggtggaactgagtgtgytcttagctctaccgggaggacagctgcctgtttcctccccaycagcctcctccccacatccccagctgcctggctgggtcctgaagccctctgtctacctgggagaccagggaccacaggccttagggatacagggggtccccttctgttaccaccccccaccctcctccaggacaccactaggtggtgctggatgcttgttctttggccagccaaggttcacggcgattctccccatgggatcttgagggaccaagctgctgggattgggaaggagtttcaccctgaccrttgccctagccaggttcccaggaggcctcaccatactccctttcagggccagggctccagcaagcccagggcaaggatcctgtgctgctgtctggttgagagcctgccaccgtgtgtcgggagtgtgggccaggctgagtgcataggtgacagggccgtgagcatgggcctgggtgtgtgtgagctcaggcctaggtgcgcagtgtggagacgggtgttgtcggggaagaggtgtggcttcaaagtgtgtgtgtgcagggggtgggtgtgttagcgtgggttaggggaacgtgtgtgcgcgtgctggtgggcatgtgagatgagtgactgccggtgaatgtgtccacagttgagaggttggagcaggatgagggaatcctgtcaccatcaataatcacttgtggagcgccagctctgcccaagrcgccacctgggcggacagccaggagctctccatggccaggctgcctgtgtgcatgttccctgtctggtgcccctttgcccgcctcctgcaaacctcacagggtccccacacaacagtgccctccagaagcagcccctcggaggcagaggaaggaaaatggggatggctggggctctctccatcctccttttctccttgccttcgcatggctggccttcccctccaaaacctccattcccctgctgccagcccctttgccatagcctgattttggggaggaggaaggggcgatttgagggagaaggggagaaagcttatggctgggtctggtttcttcccttcccagagggtcttactgttccagggtggccccagggcaggcaggggccacactatgcctgygccctggtaaaggtgacccctgccatttaccagcagccctggcatgttcctgccccacaggaatagaatggagggagctccagaaactttccatcccaaaggcagtctccgtggttgaagcagactggatttttgctctgcccctgaccccttgtccctctttgagggaggggagctatgctaggactccaacctcagggastcgggtggcctgcgctagcttcttttgatactgaaaacttttaargtgggagggtggcaagggatgtgcttaataaatcaattccaagcctcacctgcccttgttcagctcatttgtgtgaatagggtgggctggagggcaggagaagacagttgtggcggcaggggcaggtcccagagctggctggaggcagtaaacagaggtgaggtctctgcctgggcacgtggcatggggaatggcaggccccagaggcagagctgggcagaactcaagtccagttgtgagagggagctggagccagttccttccctttcacttccctcggccattgtgcttcaatcataacacccccacctccccaccaccttgcagattctacttccatctcctcatgatccccactctccctcgttctggtctgaagcagtctgcactgtttgtgacttcacctctctgagcttcacctggaaacagactagcaggacctgctgctgaatgcaggaatgaatgatgcgatggacacaatggcatatcacaagtgcctggtgcactgcaggtgcccggtgagctcccctgaccttggccttccttagtttgggaagaatgagtggtacagaatgctagcctcaaggaagcttctggaaaaaaagcctagggtgaatgtctcccctacccggacactcagatctctgggcccttgctgcttcccaggagagccacacacagcactgaccgcagcggcagggtattatttctttattaggtgccacttcaaagaacagggaatccaggtgggtgggggccacagggcaccaggtacagccctcacagcccaaccttctgagcccaggcgaagaagacgcccttgacatcatctacgcctgtctgaaggtgggcaggcatgatataggtgcggaggtcccggaccttgtagccactacgcaccagggcctccctcacctcctcctcagacactggcaccaccgtcagcctggcctccccagccaggtaccacgactcctccagggccccgatgaggaggaggtgccccccaggcctcagcagcgtggtgatgtggtccagggcccgctgaaagctggcaagatctgggctcacagcctccaagcagaaggcagagaccagggcgtcagcaggcaggggagctgggctcccagcacccaggggctggggctggtgcacgtcgatgggcaggacccgtttcaccctggctcgcagctggcgctccttatcctgccagcattccctgtgcaggaggcacaaggcagggctcaaggctgttctacgctcaggcctctgttgccccaaccagccactctatgggaagcctcctccccaaccctcaccccccagtccttaccccttgccctcaatgaggcaggcatgttggctgtacatgctccagttgaaggcccccggctcctcctgcagccagcgccccagctcctggcggttgacctccaggaaatctgtcatggtgatgtcctcaaagtggctgcaggcactgagcagctggtacacggtggggcctgaaccaatgtcgatgagggtgcgtccggacacttcacctgggcagggcagaggaagagggtcctggtgccagccagcccaggcagcccctgcctccttacccttccctcccctgcatctccctgcctctctctagttcttccttctcctctgcaaatgtgtctccatctggaaaaagcattggccccagagttagactgaacccagctccaacatgggctgcccttcggaagggaacttcaccgctctgagactcaggtttcacatctagaagactatacctactggccgggcgcagtggctcacacctgtaatcccagcactttgggaggccggggtgggtggatcctaaggttgggagttcgagaccagcctgaccaacatggagaagtcccgtctctactaaaaatacaaataaattagccaggcatgggggcgcatgcctgtaatcccagctactagggaagctgaggcaagagaatcgcttgaaccggggaggcggaggttgcagtgagccgagatggcgccattgtactccagcctgggcaacaagagcgaaactccgtctcaaaacaaataaaaaataaaaataagtaaataaatgaaaataaaataaagaaaaagaaagaaaacaactatacctaccagccaggctcagcgaggaaatcctggcagtttctcacccctgtcccacatctgcctccatttcctcctatgcatctccacctcagtctgtcctgcatcccccaccttagctctcaattctgagcactctccgccccctctctccacctctctctcctctgcccctctcctaagggatgttgctcctttttctcttctgtttgcacctctcagctatctcttgtttcttggtccccatctgttaggcgcctggtctgtctccctttccttctttttatttccctgcgcctgctttcactccccgacgacctcttgtccctcgtgcctcagtttcccccgctcaccggtggcgaaggtctgcgccaagcagcgcagcttccacggcccgacgccgttcgggttgcacaggtccccgcgagggggcgcgtagttgttgcggaggtaggcgcgcggctcgaagcgctggtaggccgaagccaccgccgcctggcccggggccgagtcaggggctgcgcccgcattggggctacggtctgcgccgctcatgctgccgccgcggtccgcccagtgccccgctcgcctcgcggcccttttttctaccgcccgacccccgccccgaccggtccgctgtgggggcggcagctgaccgccgagccgcccggggccatgtgcgccgcatcctccccacccattcatccatctcccttagtgtccgggctgcagacacaccggaggtgagtggggcggcggctgcagcggcaatcgtcccccacacccccggctccgtacttgctcccgcagccctcgccctccgcctcgcctgccccgccccgagtcccgcctctgggcgccccccaccctcagttcctcacccccacaatctttagaccccctcacccccgccggccggcccctcccatctctcttctccagccccccgcagccattcacctcttttgcccagcagcccgccccttctctttcctgattcgaggtggagactggggaattaggccctttccccagtttccccctcgcagcgccctccgcgacgaggccccagaccccgccaggctcccctccctcccggacacccgtcccagcacccacccttcccttagaactgccacacaactccccctccccgcccctcctccaggcctctctcgtccgttgctatgccaccgggccctccagcgacaccccctccccaccccgccccagaaaggacagtccgttccggcctccgctgtggtcgctccgggggccccagagcagggcgcggcactgcccgtccgatggcaggcgcgataggggaggtgagctgtgctaatgcacttagcgggcggaacagccgggcctcccctgcgggccccgcgggttcccagccgcttatctgggggctcccgaggacagaaggttcgggttcgggttgttcccgccacttcgggggcggcgccggacccgggtgagggcagagggcttgggcaggggaggggcaggacgcattcgcggagggccgccggggccaccggggagcgcagtccgggccttggggcccagccgatttggggtcctgcggatgtaggggctctgaccccactcctctcgcagcccaccctccagcttccctccgaaggagcggccaggccaggcatgaagattctgctcagcaccccaggttctggctgtcaaaatgccagggtctccccacctatctcccagatgggaagccaattctgcctgtggcatctccgtggtcttcctgaagaccccttccttcccctctggatgagtcccgggcccttctgccctgggtaggtcaccagcccagctcctgccaccgtgggttcctggccccgcttgatgtgggcctcctccatgccattccctcccccttgtccccaggggaaagtctccttgggagaggcagctaggttgggacatgagtcaccacaacagctgcaggggtcacagaggggagcctgaccccctagcacctccaaccttccctggcttccagggcagggggtgtggagcgagacacagctgaggattgattctgtctggattcagaactgagaggcaggttagttttagaggtcactgaccccgttcacaccccgaggcaaagccaaggacagtcctggcaccagcccctccatattctccacgagacatcattgaaacaaaccctggatgcggatgccagctggcttgctggttaccacccagtgccagggggctggacacagaagccaggactgggcagcggtcagggtacgggaaggagactggagacagcaccctgtttacagctctgtcctgcccccacccccaccccaagtatggggtgtacccattagctctgccatatttagctcagatgcggagcctggtcccagaagtgggcattgaggggacacccatgggccagcccccccaaccacaaggaaagagatgcaactctggcacatgattgagcatttattgcggcactaacagagggtgctgggggccccaccatccttgcctctgcccttttcacctccccctccctcccagcttcttctgcctagagcgttccagattcccctcacattttcctggatcagggccactcctcccaggcacctcttgccctcaccagtaccttttgtcccttctcctggggctgagggtcctcagctgtgctggcccccaactctccacccttagtgcccactgtctctgccaccctccctttgggaactcagggggctcaggcatcctggcctctggctcccccctcccctagcccccaactctgggcaaactacaaagcagccatggccagcagctcccctccacagtcctagccaggaagggcccagcccagggcgggcacagcggagcccaagtcacagtccctctcagcctctctgtgcttcctgggacatggagcgggacagggagcgacgaagggcaccgggcttgctgacaggcaccacagggggcagctgctttgtgatctcagccacctcctggcggtccacacactggccacccagggctgtctccagcgccagcagctcctgaagctggatgggggtgtcctcacgctcctccttggtggcgcccatcttggcaggggtgaagatgggcagcggcagtacccgctggtagggcagctggtactcctgcagcccacggccgaggatgcccatccgcatcatcagccagggcgagcgctgcaccagcacctggcactgcccctgctggtggtaggtctcatgtctctgggtgtcctcctcatgcagggagcagctggggagaggggaggggcagtgagctcctgggagctgttgctctctgggcacaggctgggtggggggctcccctgggctgctgggacctgggggcaggaagggtggttcccctttgctctccccatggggcattcttcctgcccccacccccagaaatttctccagggcttcatgctctggcctcatggctcagtgagggtgctctgggggagcagaggcagggctctagcagacccacactcacccctcctcgggccgtgtggacagtgtcagatccttccattctgcccagaaggcctcccggcgctcacagttctcctccgacacctcgcagctcagctctgaggtagccatgatcactcctcattctctctcccctcccaggccctttaaatagccccctcctcccccttctccaggggctattttcggcccctctggtgtcagatgctataagtagagccaagactcactaatggggggacgccggacccagggcaggggttggggtacctggacgctggctgccccccggtcagaggtctggggtccaaggtcctggggtcaatgcctccaggtgcctgacattactcaga

SEQ ID NO: 97934 - DNA, 117985 bp, Homo sapiens
ttattaaaattaatttcatcaacttttacttttactttttttttttttttttttagatggagattccctcttgttgcccaggctggagtgcagtggtgcaatcttggcttactgctacctccacctcccaggttcaagcaattctcctgcctcagcctcccgagtagctgggattacaggcatacaccaccacacccatctaattttttgtatttcgtagagatggggtttcaccatgttggtcaggctggtcttgaactcccaacctcaggtgatccgcgcacctcggactcccaaagtgctgggattacagacgtgtgccaccacgcccagcactttttttcttttcttttcttttgagacagagtcttgctctgtcaccaggctggagtgcagtggcgcgatcttggctcactgcaacctccgcctcctgggttcaagtgattcacctgcctcatcctcctgaatagctaggactacaggcacacgccactatgctcagctaatttttgtatttttaatagagacagggtttcaccatgttggccaggatggtctcgatctcttgacctcgtgatccgccctccttggacttccaaagtgctgggattaccgcacctggcccctccttttaccttttttttttttttttttgagacggagtctcgctccgttgcccaggctggagtgcagtggcatgatcttggctcactgcaacctccccctcccggattcaaccaattctcctgcctcgtccttccaagtagctgggactacaagtgcatgccgccactcctggcaaattttttgtattttagtagagatgggggtttcaccatgttgcccaggctggtctcgaactcctgagctcaggcaatccacccaccttggcctcccaaagtgctgggattacaggtgtgagccactgcgcctggctcctttcaattttttttttttttttttttgagacagagtttcgctcttgttgcccaagcgggaatgcagtgctgggatcacggcttaccacaacctccgcttccctggtgaatcaagcgattctcctgcctcagcctcccaagtaactgggattacaggcatgcgccaccatgcctggctcagtttttgtatttttagtagagatggggtttctccatgttggtcaggctggtctcacactcccaacctcaggcaatccgcccaccttggcctcccaaagtgctaggatcacatgcatgagccactgtgcctggctgggcaagtcactgaactttctgatgctctattttctcgactgttaagtgcaggtattcaaaacaccaggtatgttttcttcctctgacaccttgctggatgctttgtccccatagtggtgacagtaggggaagggaggctgggcacccacctccaggcttgctgaggtttggaggctttagtgcatgtgcttatttggctggttttgtgagccgtgtgttttgtgtggttggtcaggagccatgattttggcctcagttgtccaggcatccacttttcaaccaccatggagattgagtgcttactttgtgccaagctctcttctctgcttggggatcccagctggagagacaccacagtgctccccacccaattttcgcaggtagaaactcttaggcaccaaaaggctagctctgctggttggagacagaaccagaactaaaacctcggaacatggttgtttttttttttgttttttttttttttgagatggagtcctgttttgtcgccaagctggagtgcagtggcgatcttggctcactgcaacctccaactcttgggttcaagcgattctcctgcctcagcctcccgagcgattacaggtgcccgccaccacgcctggctagtttttgtatttttggtagagacagggtttcaccgtgttggccaggatggtcttgatctcctgacctcgtggtcctcccgccttggcttcccaaagtgctgggattacaggcgtgagccactgcgtctggcctgtgtttgttttattgactgtagtggcccttctctgcccagttcaacagcatggccccagagcctggcacagtgagcaccagagtgcaggtgcccagtgaatgaacggacgaactttgattcccagggctctcctctgggctaagcactttgcagggatggatgactgcatgccattctctccatgaggatggtcagggaggtaggagatggctgagctggatttgaagccaggtctcttctctcccaagactcctagcttgccttttttttttttttttttttttttttgagacagagtcttgctctgtcgcccaggctggagtgcagtggtgtgatctcagctcagtgcaagctctgcctcccaggttcatgccattgtcctgcctcagcctcccgagtagctgggactataggcgcccgccaccacgcctggctaattttttgtatttttagtagagatggggtttcaccatgttagccaggatggtctcgatctcttgacctcgtgacccacctgcctcggcctcccaaagtgctgggattacaggcgtgagccactgtgccctagcttttttttttttttttttttttgatacagagtctcgctctgtcgcccaggctatagtgcaatggtgcaatctcggctcactgcaacctccacctcccaggttcaagcagttctcctgcctcagcttcttgagtagctgggattacaggcacataccaccaggcctggctaatttttgtatttttagtagagacagggtttcaccatgttggtcaggctggtctcgaacgcctgaccaagtgatctgcccacctcagcctcccaaagtcctgggattacaggcttgagccactgtgtctggccctagcttgccttttaacccttccctcgctgtgttgccttcagcaagtctccaaggttgtactagttttctattgctacattaccacacatttagtggcttatgtaactttgttatcttaaagttctggaggtcacggtggttggcagggctcattttcttctggaggctttaggggagaatccattccttgtcctttgtagcttctagaggcagcctgcatttctgggcgtgaggtcctgcgtcattcctttgtcagtcaatatgatgaactccgcttcatcaaccacatcttctccgactccgaccctccttccttcctcttgtgaggacccttgtgattccacctgcccaaccaaataatccaggattcatctctgcatctcaagatccttaacttcatcccatctacagaatcccttttgccagagaaggtaccattttcacagatttcagggatcaggacttggacatctttggtggggggcattgtattgcctccacaaagtctacttttcttctctgttggatgggcacactagtgtctgttttatgggtatgtcgtgaggattacctgagtgactctatagggagtgtttagcacagtggctgtcacatagtaagtgctcagtaaaccaccctgttactgttcagcctcctcctatcattttgttttgagacagagtctctctctgttgcccaggctggagtgaagtggcgtgctcttggctcactgcaacctccacctcctgggttcaagtgattcttgtgcctcagcctcccgagtagctgggattacaggaccccaccaccatgcccggctaatttttgtatttttagtagagacggggtttcaccatgttggccagactggtctcaaactcctgacctcaggtgatctgcctgcctcggcctcccaaagtggtgggattacaggggtgagccaccacgcttggccttacaaataaagaatctgaggcttcagatagtttatttcttttttgcttgtttattttctttctttttttttttttgagatggagtctcactctgtcacccaggctggagtgcagtggcatgatctcggctcagtgcaacctccgccacccgggtttgagcaattcttctgcctcagcctcccaagtagctgggattacaggcgactgccaccatgcctggctaatttttgtatttttagtagagatggggtttcaccatattggtcaggctggtcttgaactcctgaccgcatgatccacctgcctcgacctaccaaagtggtgggattacaggtgttagccactgcgccagccttacagatgaagaacctgaggctcagtttatttatttaatttattttttatttgtttatttgccttctatcatttttattagttgctgggttttgagcactgggccaattctatggccttcctgaagatggtcaaggaacaaaatcgaaaacaaaaattagggttacatcctccctgttttgtagagatagcgaaatattgaagacattggcaggggaataatgcaaatttgatgatgtaaaacagagtggccggcactgtaatcccaacactttgggaggccaaggtaggtggatcactttagcgcaggagttccagaccaacttggccaacatggtgaaatcccatctctaccaaaaatacaaaaattagctgggcatggtggcagatgtctgtaatcccagctactcaggaggctggggcaggagaatcgcttgaatctaggagttggaggttgcagtgagcagagattgcggattgtgccactgcactccagcctgggggacagagcgagactgtctcaaaaaaaaaaaaaaagaaaaaagaaaaaaaggataacactgaaaatgaccatggataaaatgtaggaaaattcagagaattataaataaggctataaaagtatccagaattctactccccaaaaactaagctttgttcaccagcctcagttctggagttaggctgaagtgggttaattttccttctgggtccagcagtgtggcctggggcacattctctcaaagcctcctttgtctcacctgtgaattagaacaataatatctgcccctgggttaggattaagtgagacaaaccacgtgctttagcatagggcatggcccgcagctggtgcttagagcaaccgtgactggaagagggtgggatgatttgggtgccaggccctaacattttttttttgtatttgctttttgaaattgcttttatagttggttaggtgtctaaaaaagtaagaaccctcctccgctctcccaacctcaaaccacggaggtaaccaagacaggagtgcagtctcccggaccttttgttttgcaatcacacaaacacacaacactcaagaggaggggcttattagttttcattttgtaaaaatgggacaaagtacccatattgtgcaacaaccttgcttttgaaatgaaaaaagtattatttctgcttcctttccgttcatataccgtatacatattttaacaaaatccgggcttagtctgttctgaggcgctgcagttttgaagggggagggggcggagatccgggctcgctcccccgtcactgccccctccatcccttccccctctttccgggcgcccttcccccgggcccaggccgggcccatgcccttcccaggccccttctcttggctcctggcccctcctccgggtctcctccccgatccccgctctgccccgttctctcccgcctctcccgccgtccccgggcccctccccactcccagccccctcccagccccctcccgccgctccccgcccctcccccctggccccagccctcgcccggcccccgggccgatcccaaggccgccgctcccgggaggcgcggcagggggcgctgcgcgggcccaggttgcgggcggcggcgggaggaggaggacgaggaggcgggggcggcggcaggcggggggcggggagccgagcgcgagggagcgagcggcgagacaggcgccgaggctccaccgcgcagcgacgagcgagcccgggaggagggagggagcgagcgagcgagcagcccgcgccgccgcctcgcaatccgccgccatcccgccgcccccgtgcccgaccgccgcccgactgccatcgcccggcccggccgcgcccgcggaaccagaccaggtgggtcggggccggggccggggccggggcgtgggggcggcggcgctaagatggaggcggcgcggcccggccgggctttgtctcccgcggccgccgccgggggcccgggggccctgcggccctgcccgacctttgtccgcgagcgcggccgccgccgcctccttcccgccgggcgcggggctgcggggctgggaggccgcggggcctgggggcggcgggcccgggcgcgctcgccattgttgtggcggcgccgcgcggcctcaggctcgggcggggtccaggggccgcgcgactccctcagggctcgcccgccacccccgtacccccgaggccgggccgggctgcagaggccggaggggcgggggtcccgggcccgcagccgggtctcggggttcyggggccggcgtctttgctccccgccccgcccaattgacggagcagcgcgcccgaggcgggatcctgcggggtcgggccttgggtccggggcgctgagcggcgttcgcggggccgttcctggcgcggggtgggccgggccccggcggcgctaaagttggcggctgggggagggaggcgagcggccgcccagtctcggtgtgagtgcgggaaccagagggttattttcgaaatgctgaatgctccatgctaaaaatgtttaataataaacaggatgtcgccactcggggcctgccagatgggtttttttttttttcctcctcttttgcctccccycaacccccaggagagaaattcagccctgttgaaactgtgggcctctgaagagtggatttgccttaagaggtggatttttttcctttttcttttttcctccttctaaatatcgkgggaggtcggagcccacctttaggcaagaattggaggtgttttcagtggtgagcttgaaggaagtgggagaaggggggctggggagtgtcttttgctaaatggcttcctgggagaaatctttaaatgcctttggtttacaggactgttaaactttccctaagattttttttttctttaaggtttagtgtgcatttgatgtggctttgtacagtgtcatccagtttggtttttgtaaccaattgtgtgcggtcttagcatggtttttccgaatctcgctgcagccatttagtcatgtctatgcacagcgctgtggtgtaaggtgggactggggaggcccaggcattggggtgcagatcctgcttctttcttccgtaaacctagtgactctggggctgtctgaggcttcatctgcataaatcggggcgtgcaccctccacctggcaggtttgggcagcggtgaagggcctagcagagggcctggcacagttagtggttcctcctacggttgttggtataactgctgtcaagtcctaggacagacgtgagccccttgtggtgccacccatagagccaaactgtgcccatggatgccacaggtgctggcctaaggcatggacaatacagaaggaattcaaggcccaaacattagtgggcgcttatacagtgctgagcctctcgggaggcagggatgggaaaaagtagcatttggaggtctctagaacttagtagacccggagtgtgtggcagttggtcagtttaaggcagggttagaacagtacgagatgctcaggacaaacagacgcccaaggagtcctgccttctgaggataactgctttccttggggattggcagataatcatctgagagtgagtttctacttgtttgggcaagtgtgtctcttggagcctgcgcagctggattctggtcctcatcgggttacctttacaaagcaagtctctgaggctcagatcttgcatctgtaaaatgggaataattatgcctgccttgggtatctattagggctcttgggagcctcacttaagattcacagtgaattgttttctctccataggaaggtgatgaaatgtatgtgtttgttgattatctgtttttctggttcctttctccttccttcctyccttgccctcttcctctctccctccctccctttcccttccttttccttccttcccttccttcttttttcttttcttttctttttttttttttttgagacagtctcactctgtcgcccaggctggagtgcagtgatgtgatctcagctcactgcaacctccgcctcctgggttcaagcgattctcgtgcctcagcctctggagtagctgggattacaggcatgtgccaccacacctggccaatttttgtgtttttagtagagacagggtttcaccatgttggccaggctagtctcagacatccgacttcaggtgatttgcctgccttggcctcccaaagtgctgggattacaggcctgagctaccgcgcccggtcttctttctcttaatgcttattttttcctcttctcttggttgatggaactgtgacttccccaccccaaattctatggccggctaatgttttgctatggtgactatcacccatctacctggaagcaccagaatggcttagtacagctagggagctcagccagatctcggtgtctgctgtttgagattgtgtggaaggactattgctaagaagcaggagacagactgaacccagtgttggccacaagtgaggactgagacccaggtcacctcttggctgaacatgttagcttgttggtaaatggctctgcagtggttctgcattttaktggggaatttgttttggttcattttggcattcccgcaaccatcttgttggttttttggtaaaatgtggcaccccctccagacctcytagctgtggaactgagatattttagcagggtcctgtcatcctttgatttttcctcgcttcctgcctcttggcccttcctttttgtctgacttcactcgggcccagtctggctctatactgttaactggttagttaggccaggagatagtcgctgcctctcccatgagcttctgcatacctgtgaattttggttatctgtggccccctaatgctgattgcatgcccttgccttaggccctaagcccactgtgtgggcgtcccatctcgtacagtggccgtctccagcctccactgggcccaaataggtaaaaagaaagcctggggaaggaagagccaggaaacctcgggagagtggaatttcaggaatggcaggtcagaactggttccagcatgggtccctttgccttgtgcttagctgagggatttttgttattaattttttttttcctgttcaacactcctaacctcttttgaatttcagttctctttttttatcctgaaggattattttattgtacttttgagggtttttttttttttttttgccttgcacaaagtactgactcatgttgctaatggctgtggctgtatgctagttatatgtctcattatcctaccccttaagattgatcatttctgtgttggtttctatttcaaaccagaataggccaggtgggtcaattcatgtatttctgaattcrataatgaggcttccctaccgtgaaatgtacatatcttgtcatgggcggacaggtactaaatagagcctatctatactagattttaaaacaatggatttctccccaaaaaacaacatttccagcagacaatgggctttgtgctccaaatcttgtaattttggttttaaataaatttcatgtaaggaggcagggctaactagactgtcttcttttcagatcataacttgatctctttttaagattatttctgggacttgtacagcctcaggaaacttgggtctgtcattgggacaaagaaatacaggcactggctgtggtgttggagatgggagcgacatgggatatggtgagctttgtttctggtgaaatagaattgtttgtcattagctttaggtttaaaaggtgccattcagactggacctcctcacctgggagctggcagacctgggccttgccattggcgatattactgtttatacctctgggtggcacgtgggaaatctcttttgtgctgggaggtaggtttgtcttagtgtcttgagccagaagttgtggttgagctttgttctcagctgtacttgttggttttctgtgtgacctgagaagcatccttcgtccgagctgaagtgcacctccgaggtgctggcagcagcactgatttgtgaagcattgcgtgcagcaggagtagctggcagaacaaagcctatctcaagttgctggcggtctttcacatcttgtacaggacttccttccgttcttacctctgcagccagttgtgtggcttccgtctggaccgtcttcctcctttccaagataaccatcagtctttttctctgtggggctgcagcagcagtatttattgcatttttaattgacttgtcaggcaatagatactccttgagcacctatcatttgccaggcattgtacaaggccctttaaatacatttttcttgtggtagggcaaggtggctcatgcctgtaatcccagtacttggggaggccaaggcaggtggattgcttgaggccaggttaagaccagcctgggcaatgtgatgaaaataaaaaaatgcctcttaaaagaaaaaattagtagggtatagtggcrcatgcctgtagttctaactacttgggaggctgaagcaggaggatcacttgagcttgggaggttgaggttgcagtgagccgtgatcatgccactgcactctagcctgggcgacagagtgagaccctgtctcaaaagaataaaaagtaggtcgggcacggtggctcacgcctgtaatccaagcactttggcaggccgaggtgggcggatcacctgaggtcaggaattcaagaccagcctggccaacatggtgaaaccccgtctctgctaaaaatacaaaaattagctggatgccgtggcgagtgcctgtagtcccagctactcaggaggggtgaggctggagaatcacttaaacctgggaggtggaggttgcagtgagccgagattgtgccactgcattccagcctgggagacagagtgaaattctgtctcaaaaaaaaaaaaaaaaaaaaagtctgggcacggtggctcacacctataatcccagcattttgggaggctgaggtgggcggatcacgaggtcaggagatcgagaccatcctggctaacacgatgaaaccccgtgtctactaaaaatacaaaaaattagccgrgcgtggtggcgggcgcctgtagtcccagatactcaggaggctgaggcaggagaatggcatgaacccgggaggcggagtttgcagtgagccgagatcacgacactgcactccagcctgggccacagagcgagactccatctgaaaaaaaaggaaaatactgaaaagaataaatgccaaaataaatatataaatcacttgtgacctcaccatccagagctaactgcagtaaagttgctggtgtgtttctttcctctgataatgtctgtgttttctaaattagagcaatagtatatatacattgaatacacagttgatagcttgcttttccccttttaatgttatagtgtattcctctacgttatttttataattatataattgctattatacggatatgccataatttattgactcctgtattcgtagacatttagattattgttgccctcttttccctcctataagagaaactgtagggagcatctcggcatgttaagtcttggtccacgtggctgattatctcccataagtggaatttctggggtcagaggattgcaggyttgttcttctcttctggacaggatcggttgtctccttcagtctttgtcacctccctctccagccttgagcccaaggcagtctctttcttagttttttcttttttgaggcagggtctcactttgtcgcccagtctggagtgcagtgatgtgatctcagctcaccgtaacctctgcatcctgggctcaaatgatccttctgccttagcctcccaagtagctgggatcctataggcatgcgccaccatgcctgactaagttttgtatttttttgtggagacggggtttcgccattttgcccaggctgtttgtttttcttttcttttctttctttttttttttgagatggcatcttgttctgttgcgcaggctggastgcagccgtgcgatcttggctcactgcaacctccacttcctgggttcaagcaattctcgtgcctcagccttcgagtagctgggattacaggcgtgcaccaccacacctggctactttttgtatttttagtagagayggggttttgccatgttggccaggctggtctcgaaatcctgacctcaggtgatccacctgccttggcctcccaaagtgctgggatgacaggtgtgagccaccgtgcctggacacccaggctgtttcagactcctggactcaagtgatccctccgcctccgcctatcaaagtgctgggattayaggcatgagccacggcacccagcaaggcagcctctttcatgagccactaggttctggggggtctcagtcctggttaagccctttgatgagtggggcttgaggtcttactccatttactggtttgaacctggagaagccttttgtcttaaacagtttttgtttctagggacatggatgccccattgactcctggggagatcctggtctggtggggaggaggccctggagagccccccacctaactttggcctcatcctcttgtggtttctttctttctttttttttttttttgagacggagttttgctcttgttgcctaggctggagagcaatggcgcgatcttggctcactgcaacctctacctctcgggttcaagcgattctcctgcctcagcctcctgtgatttcttcggagccccctacagtttctctttatagcagttttcacaacttgtaaataggtgtttttttctttatttgaattttaaaaattgtggtgaagtatacataacataaaatttaccatttttaagtgtacagttgagtggcgtgaagcactttcacagtgttgtgcarccatcaccaccatccatctccagaacgttctcatcttcccaaactgaaactctgttcccattagatgccaactcccctcccccatccagtggcggcggccaccattcttaccattctttctccttttttttttttttttgagatagggtctcactgtcgcccaggctggagtgcagtggcacgatcttggctcactgcaacctcagcctcttgtgtagctgggattacaggcacacgccaccacacccagctaatttttgtatttttttgtagagacggggtttcaccatgttggctagtctggtgtcgaactcctggccttaagtggtttgcttacctcagcctcccaaagtgctgggattaccggcatgagccaccgtgcctggcctagtttttgtatattttattttattttattgagacagagttttgatgttgcccaggctggagtgcaatggcgcgatctcggctcactgcagcctctgcttcctgggtttaagagattctcctgcctcagcctcccgagtagctgggattacaagcgcctgccaccatgcccagctaatttttgtatttttagtggagacggggtttcaccatgttggccaggctggtctcgaacccctgacttcaggtgatctgcccacctcgacttcccaaagtgctgggattacaggcgtgagccactgtgccttggtctaatttttgtattattgttattatttttgagacagagtctcgttatgtctcccaggctggagtgcaatggcacgatctcggctcactgcacctctacctcccgggttcaagcgattctcctgcctcagcctcctgaatagctgggattacaggtctggctaatttttgtatttttaggagaaacggagtttcgccatgttggccaggctggtctcgaactcctgagctcaagcgatttgcctgcctcggcttcccagagtgctggaattacagccatgtgtaatcccatggtggcaatgttgagccaccttgccctgccaaccattttactttctttctgtgaaaccgaatactcttaagtacctcatgtaagtgagatcatccagtatttgtcattttgtgtctggcttatttttagcatagtatttccaaggttcatccatgttgcagcatgtgtcagaactaacttcattcttaaggcagaataatattctcttatttgcatgtatctaccacattttatttattcattcagcgacgggcagcagcctgtagatagttttgttttcatgtattgaatggtcctttcccccagtggagtgagtaaatgcatccggaagcagaattctgttgtttcccattcatcactgtgtgccaggtgtctgagaagggggtcttataggagcccacgcagaaaccaagctcacctcagtctgggtgtggggcagtcagggaaggcattctggaaaatgtagctgactcgaaataagcacctattgaaaatagtgtgctgagccctggaacattaaaaatgtgttcctatgtggaaatcagaaatgtatgggtcccagaagagaacttgtgggtcagcctgctttccagagagtgccgaggccctttgaatggtgaacattatgcaagcrttcttgtatggccagtggccagcagggaggagggcagagaatgactgtgcctccgggaagccggcgtcaacttcccgacacgcttcaggatcatctctttgtatagaaccatgggatggatcgctgcaggacctactggaaaaaggaggtcatctccaggactctttccatgggtcctttgtgtcttgcagaacttttttcggcaggtgttgtttacatatggttcagagcttaaagaacagctgtgttccaggccagggcagaaagcacaggcctgtctgggaggggcatcatcactcctgcctgcctgcccaaccgacctgtcggtggactgaatgggccaagtgttcagaagtccttgggaagaggatagtgtcctgaatcataatgtggtattttctggttttttgtttgtttgtttgtttttggtaaaatgttaattgcagaagtatacaggttattttatttatttatttatttttttttgaggtggagtcttgctstgttgcccaggccggagtgcagtggcatgatctcggctcactgcaacctccacctcccaggttcaagcaattcccctgcctcagcctcttgagtagctgggagtacaggtgcatcccgccacgcctggctaatttttttttgtattttagtagagatggggtttcgccttgttgcccaggctggtcgcaaactcctgagctcaggccatctgtccacctcagcctcccaaaatgctagaattacaggcgtgagccactgcgcctggcccatactttaaaaaaaaaaaaaaaaaaaattaaaagccaagtgtttgaagagaaatgaaagcttttccccaatgtcccaggcagtaaccattattgataaatttgctttgtttatccttctaggctcagtgcacgtataaatatggcctcatgtagggaggttttttaaaaaacaaaaatgggatatactatattgtattgcaacttggcattttcaaaatatcacagtatttttccatacgtatttttaagcgtaacttctcttatttttattttcagtaatactttttttttcttccttagggatgtgggggtgggtctcgctatgttgaccaagcttgtcttgaactcctggcctcaagctgtcttcccatcttggcctctgaargtgctaggattacaggtgtaagccaccacacccagccatttttccatattcatgtgaacagacctgccacactaagtgttttaaaaataatgttaggtttctaaaaaatatacaggtgtgtaaaagaagaaaaaatcgtttataatcccatggtttagatattcccagttgactttttttttttttttttttggtggtggggacagagttttgcttgttgcccaggaaggcaatggcgtgatcttggctcactgcaacctccgcctcctgggttcaagcaattctyctgcctcagcctccctagtagctgggattacaggcatccgccaccatgcctagttgatttttttgtatttttaataaagacgagatttcactatgttggccaggctggtctcgaactcttgacctcaggcgagccacccgcctcagcctcccaaagtgctgggattacaggcgtgagccactgcacccggcccccagttgactttttaaaaagaaaattcaagttgctcagggaggtataaaggctcttccccactctctctgaaaaaaaaaaccastgtgaggaagttcttgggattcctcccagaaaaaaacccacattatccacatgcacgtttgtattcttcaagcatgctgctgccctttcacgtgataaaatgtctcagcgtgctccctgacagctacgcagacggattatgttatctattttagcaactgcagagaatattttgtgggtatacttgatttaacctctgtctcctactggtggacatttgggctatttgtagttttggaatattacacaattttggtcaaactgtaccagatttgttttcaaaaacatacaatttgtatgtaagcatgtaagtgtgagaatgtggttctgcagtgtggactcttcaactgaatagctttttggtaagaattctgccagatttctcttcagaaaactttgtatcagcttatatgtgtgagcgtatgtttctggactatgggcttttctaaatgaacaggctttttggattgttttgggtgtgcacattttccaatcaaaagctactgtttgcggctttctgtggtgagcgtagggtctgatgttttggtgagcttgggcagacagcgatcagacacagcagctccgttcacagtgcagaagcggccactggaggagttgctctgggtgtcttgttaggtgaaggccactgtgggagctggaaggaggcgatagacacagccaggtctaaggttgattttctgtatcaagtaaaatgattgtccttgctgcctgttttcttccaactgttatacactggagcctggtgcataaaattcagagacggcctccattttaagttttctcatagccccgtctttcacagtccttggtggttttgttgctgttaatattcattgctgttggcgcttttgcagctcctgatagtggctgttgtgcatatctcacttctcgactcaacctcttggcgtcacttgccacccctcctgccccccactttggtttagttcttccaggagatcacaccattggttgaagtgactgcagaaatgaagcactggaatgcctgggtggtggtgtttcatcaggctaggctggcggggatttgtgctctggcaagaggaggtgcggtttggaattacactgctctggctcctgggggggttattgttagctggaattcagagagagctcgctgggagagttgggaatgccatgccccctcttcctggtggagagtagctctcccttgcaggcacagtgcagcaccccacactggargccctgctttggggtcagctgccttcaagtccaggttctaccacttagaagctgggtgacctggggccagcttttaaatctttttgaatctccattctcttcctctgcaaaatgtgatagtaacaccttcataggacctgggaaaggattcagagggtcatgtgctgcagagttgatagggcacctggcacaagacagcaggctctccatagaccgcagctattaatggttcctggattcagccctccccgggggcccgggggtttggagcaggcaggcttttgtacacttggggcttgtttgttacctaggtgttggggtttctaattatgtgctcagcactgtgctacatgctaaagatttggacccgtagcgcattgccctcacctcctggagctcagtcaccttaactagcaagggcctcccatgggcaggtgcatcagggctcttctgtacatctctccacaatgaacaccactgcggatgtctgttcccacgagcaagggcgtttgatagctggcagctgccctgtgtctagtctgttgtgttgtgttcttggggagtttcaggtaaatgtcttggaaggaatgaaggtaggcatgttaaggcagtttgtgggttctggctgcaagggagactgcagctgggccagcaacagccctgacttgacctcaggccgacaggagtgttcctttcagccacttagacctacctgctatgaggtcttgaacaaatcatgtcttttgctcctttaagtctcagttttcttatctgccccaaatggatacggaacctgtctcacagcattgctgcaaagattggcgtaatttctgggatgcagtgttagtgcagtgtaggaaacctagtcaacttggaacagtatatggtgttgatactatgttgctcagttcaccgagatcttaaaaacaatgtaacagttacaatacaggcgtgtcacagttacaatacagccttgctacaaacatcaagctccagaagtgtatagagtagaaagtgaaagtcattccttcttccctgctgtttctttataatatcaagagaggactgctgtcttaaccagttgtttttaactaaggggactgttttaactgtgcatatgaattctaaacctgaagtgaccactggaaggtgggaggtgtgactgtttataggtagaccttaatataagcaaagacatctcatatggctccttagtgtggtctcttcagctttttgaggggagaaaaggccattgtaattctttgcacaccctggatgaatcataatgttgtattggtaaagttcagcagtggcatagactgggtttaattaacaagtgctgcttccaaagatcccacagctttacaatttgctgttgacatggttggagggtgggggaaggggaaaggtgggcatgcccttagggtaatggggcagtgcaatacggttttttagacgcttcggggagatggtgggtgggggaggagagttgtgagtatagagttttgggtgaggtgaggagtctgtgggtaaggtgtttataacgtgtgtagtgtatttggagtgagggtgcatgctcccttttcccaccgttctgaagtcacagcttggcgtacctgggaatgcccttggcgtagtaatccctggcccttattttggatctgtcctttattcctttgttactttagaactggcttcgccggcgattgtcctgggtttcctctagtgtctgaggcttggaggagaagtcatgcacggcttctggggtccagtcctttggcctttgctggagattatttataccaacccagcccttttagctcccacttcagtatttttggatttatttattttcatcaaagagaaagttcctttgtctcggctgagttgatgaacgtctctatagcagcaaacacccgagggcgtgtggcccagttctgagaagctgtggtagagtgaggagggcactgtgtgaccctggttctcacttcacctctgagcctctgttcccttatctgcaaatagggggtgatagtaaggacagccaccttagtggcggttaggaggatgctctctgcagctgtaatgtttattcgggcagcccgatggagtatttcctcaccggggtaacgggaggcattgcatccaggttggagtggttgctgaggagtccttcggtgcttctggtgatagtcattgttggccctaatccgcctcctgcagctgaactgtgggagtgccacagctagagggggtgggaagaagaggatggggttgttgtaagtaggctgtgttctctgcctgtctgggcatttgctgccgaagggcgtctgactcccatgtaatttacctaatgagaggtctcgggccttgctggttactctgtgcggggttacaggtctcaactcttttctttctatggacacaaacgaaaaatgtgctttgcagagatgccaggttgtaaagaaatattggccccagcatgtaaagatacatgtactggagtgttggttgtggcattatttgtggtgggacatgttcagttggacatttccgtagggaaatgggtaaataaaatacgatgccactgtatagtggaatgctgtgtaggcattaaaaagaatgaggtagatcactatgtgtatttttatcttttaatttttaagtctgaactaaacagaacttatgtatatttttagaaagatgaccatgtrtagaaagagaagaacccaggttgaataatacagtagcttcctgcatttgtagagaagaccatgactgctaatatgaatgtgtataagcctggaggctgtccaccagtttgttaacactgtttaccttttgagttggattgttttcttgtgcacacattagtatcttttttttttttttgagacagagttttactcttgttgcccgggctggagtgcaaatgatatgatctcggctcactgcagcctccgcctcctgggttgaagtgattctcctgcctcagccttccgagtagctgggattacaggcatgtgccaccacacccagctaattttgtgttttcagtagagacgaggtttctccatgttggtcaggctggtctcaaactcccaacctcaggtgatccacccccctcggcctcccaaagtgctgggattacaggcatgagtcactgcgctcagccacttttttttttttttttcctgagatggagttttgctcttgtcgcccaggctggagtgcaatggcgcgatcttgtctcactgcaacctccacctcctgagttcaagcgattctcttgcctcagcctcccaagtaactgagattacaggcatgtgccacgacgcccggctaattttgtatttttaatagagatggggtttctccatgttggtcaggctggtctcgaactcccgacctcaggtgatctgcccgtcttggcctcccaaaatgctgggattacagacgtgagccaccgcaccttacaggtgcctgccaccacgcctggctaatttttgtatttttagtagagacgggatttcaccatgttggttggccaggctggtctcgaacgcctgaccccaggtgatctgcccatctcggcctcccaaagtgctgggattataggtgtgagccactgctccctggccacattagtatcttttgaatttgtcttactgaatgtgtattagtaacatgtattggttacaaagataataacaaaggtaactcgcatgcatttcagtacagtggagcctgtgggggccgggctgggctggggcagctgctgtgttggtggctcttttcctggtgccagatcaaacttaccgtgaggtaagagctgctccaggcttcgtattccacgcagacccatccagtgcaccctggctcctggtattgggccccagtggttactgtgaatttaactagttcaatcgtctgtctctgttgatgtgtcagtggccctcagaaactgctttgtttatctggttagaaggaacaatccaatacaaatgctgtctccgatttctcttctctactaaatcagattgtacaataaagaacatagattttggttgcatttgcagagtacttctcatttgttaattcaccattatttggaggtggaaaaggaaggagtaactgaaagaagcccatgtatttcatgtatttcttttatttgccaggtccttgttaaattttgacgccagagagggaggcctttgtatagcacatctgtccaactgttcatcactcaccatatgttgaaatcatcttcttccccaccccccttgctaaattaaccgcatcttcaaagcgggaggtaggcaggaacttggagaccgcatatgggctttccagccagagtcctcttcaggcttcagcccaagcctgcctgcctgtgagctagatgaggagaggggctccaggcagaccctgtgggtgaggagcccagagctggtgcagactctgggggtgtgggatgctgtattagagtaaagataacagtgccagcgccagttcacaccccaccgcaggccaggcctgcacttcacattcacctcaggtccccaggggtgctggcagggccagggagtaccgtgggcaggtggggccattctctggggcccaccgcatgggcctcccaatcatggcagcaggcgtcgttcttccagtgcccaacactgcccaagtaagtctggatgtcacatcaccccgggttcaggttcagattttttagactcactaactggatgatagtgaccttgaactagttatttaaccttgcggagccttcatgtctataaaatggaagtactaatacccttctctgagtggtttatctattttgtttcttcgttcaaggaactaattttattcattttttcttttctttttttccttgtggacctcacctgactggaggagctcctattcttaaatgcaattttatgcagatgtatttattacactccctagctctctttaggctttttcttcattgtttctgctttcccttacatttgcttgcattggtttttttctgatttcttaacttggatgcttaatttatatttcattttttttcgttaggaatttggtttttaggatatttcctctgagtacagatttatttttgctttgaaagttttcttacggccagtaatcccagcactctgggaggccgaggagggcggatcacctaagatcaagagttggagaccagcctggccaacatggtgaaaccccatctctactaaaaataaaaagaattagctgggggtggtggcaggcacctgtaatcccagctacttgggaggctgaggcaggagaatcgcctgaacccgggaggtggagattgcagtgagccgagatcacgccactgtactccagcctgggtgacagagcgagactgtgtcggcaggggaagaaagctttgttatgcagtgttctgtttttcatttgtgctattttcttttttttgtttgtttttttgttttgttttgttttttgttttgtttttttttttgagacggagtcttgctctgttgcccaggctggagtgcagtggcgcaatctcggctcactgcaagctccacctcccgggttcactccattctcctgcctcagcctcccgagtagctgggactacaggcgcctgccaccacgcctggctaattttttgtatttttagtagagacagggtttcactgtgttcaggatggtcttgatctcctgacctcgtgatccgcccgcctcggccttccaaagtgctgagattacaggcatgagccactgcgcctggcctcatttgtactattttctagatattttgcaggtgtggttttgaattccacttagattcaaaacttttttagtagagagtgttaggttttccagctcttggggttattatttctactttcatcatgtcttgttttattgcactgttgtcagttttactttacagaatttgggatttttcttttcttttttcagacagagtcttgttctgtcacccagggtggagtgcagtggcacagtcacggcttactgcaaccccaaactcctggattcaagggagtctcccaagtagctgggatccaggcatgtgccaccacacccagctaattaattttttttttttttctgtagagatggcgtcttgctgtattgcccagactgatctcaaattcctcacctcaagcgatcctctcacttcggactctcagagtgtggggattacaggtgtgagccactgtacctggcckgaatttttcttaaagtctaatatagtcacttttagaacatgtttgctcatctacgttgaccgtctctatcttgatgggcttgatctaccaaggtggacaggcttctgtttgttctaatgtttgtactttcattgtgggtggtcctcttggccctttaaaactaccctgctctgctgcttgctcttttgtgtctgtctcctttgattcaacattttttttgtgcgtttcatctgtatagttgtgtatgtttatttgttcttattgtaggatggtttttggttatgtggatgtaattatccatgtgacagactgagctcatttccatagttcttccaaacaatgctgccacagtgcgggtatgtgcgtgcgtgcgtgcgtgcatgcacacgctgttgggtatatacctaggtttggagttaactgggtcatgggtgagcatatggtggctgcatgggcagctgccagctctcagtgatggcaccaggtacatgagggtcatccttgctctgctgrcgctgtaaagatgttgcttctttgcaaattaaccgctggattccctgtaattctagtgaaaatcccagcagcttttcttttgttttagctgtttatttcagaaattgacaaactcattctgaaatttatatgaaaatgcaaaagggccaagaataatcaaagcattctctctctctcttttttttttttttttttgagaaggagttttgctgttgctcaggctggagtgcagtgagacgattataggtcactgcagcctaaaactcctgggctcaggagatcctccagcctcagcctcccgagtagctgggattataggtgtaaaaagtaaagtagaggtttcattttaaagattttcctcttcatctaattaggaataaatagtaacttcttttagaagcaaaatttatttaaagacctgtgctaacattcttaaatatctgctagctgtaataaataaattaatgtactttatattcttagctcctacaatttagcctgaatatttgccctggtatgcttatactggtccaagcaagcattaggtcatagcctgttcctttttcttatttgaaggtgtttttacctttcttagcattccacaagttactttctccttcctttgttctcctctgccttygcctcttttaaaaagttctaagttcctagccaatcgggacagatacagaatgtgaggtcctgttccagccaatggaaactgaacgcagtagggtggacgcatcaggttgtaaatgaccctgtctcctttgttcggtggcaaaactgctagcgactgtaccctttctgcagaaagtataaaaatggccttgctgaggaaattaaatttacgttcaagtgctatttctttacagcgtcagggaacaagcatttcaaacataggcatgcaccaacacacccagctaatttttagtggagacgtgctctcactgtgttgcccaggctggtctcaaactcctggcttcagaatcatcctgccttggcctcccaaagtgctgggttacaggtgtgagccacctcacctgactaatcaaagcattattttgtttttgagatggagtttttgctcttgttgcctaggctggagtgcagcggtgcgatcttggctcactgcaacctctgcctcccaggttcaagcgattcttcggcctcagcctcccgagtacctgggactataggcgcacaccaccacgcccagctaatttttgtatttttagtagagatggggtttcaccatgttgggcaggatggtcttgatctcctgacctcatgatccacccgcctcggcctcccaaagtgctgggattacaggcgtaagccaccacgccgggccttaatcaaagcattcttgaagaaaaacaaagctgaaggacatatcctaccaaatatccagactttataaaagctgcagtgattaagacaatgcagtgttgccaaaaagatagacaaataggctgattggagggaacagtcttcaaacaaactgcacatcagtagtcacttaatttatgacacatgacaaagagaaaagatggccttttcagaaaaggtactgggagaactgaactctccataagggaaaaaaatgaaacttttatcacaaatcatatcgagaaatcagtgttaggtagatcatagatgtaaacatgaaagataaaacaataaagcctctagaataaaacataggatatcttcatgattttggaaaaatcggacacagaaagcagtaaccaaagtagaaaaatttgatacattaaactgcattaaagtttgtatcttttgctttttacattgctccaagaaaatgcaatcaatactaatttgtaatttcctggaaatggtagataatccatcctgtttgttcctccagaagcctctatcctgtttttaccaggactgttgcccctctggcccatggtgcggctaccatcttgggctttttttttttttggagatggagtctctgctgtgtcgcccagactggagtgtagtggcctgatcttggctcactgcaacctctacctcccgggttcaagtgatcttctgcctcagcctcccaagtagctgggactacaggtgcctgccaccacgcccaactgatttttgtatttttagtagagatggggtttcaccatattggccaggctggtcttgaactattgacctcaagtgatccacccgccttggcctcccaaagtgctgggattacaagcatgagccaccgtgcctggctgctatctcgggcttctgttggtcgtcattctgggacttgtttttgtccctccacacgtggtccttatttcctggatcctatttgtattggttggataatttggacataatgacagcaactgtcttttttgtttgtttttttgagtcggagtttcactctgttgcccacgccggagtacagtggcacaatctcggttcactgtaacctctgcctcacaggtttaagcgattctcctgttttcagcctcctgagtagctgggactacaggtgtgcgccatcacgcccagctaatttttgtatttttagtagagacgggggttttaccatgttggtcaggctggtcttgaactccggacctcaggtgatccacccgccttggcctcccaaagtggtgggattttcaggcctggccaacagcaactatcttaataagaacrttcattgactcaagtaattgcaagtccagaagtagacaggtttgggattatttgggtgcacccattctgaaccagtcattagaaccggagctgggcttctcttaggccaggcccccgctcccctggggctggggctgggtcagcctccctcaggctccatcaggaaggaggaagggagaattaactgctgggtaggcagacaggrgtggtcccactaatattgccagtccctcggtttgctctcttgtaaaaatcctattttgagtccttatgtaggtctgaaaaagtctttttctgtccctacacttgacttggtcagctgagtattggattctagattgaaagtcatttcctagagaggatggtgatactggtaagaagtctccatcattgttgctcctgagaactcattgccattctgattgttcctccctgggaacttttttgcaagagggatgacttttagaagcttttagattctcaaactgtatccctaacatgctgaaatttcacattgtactttgtgttctttttatatccattgttctgagcacttggtgggcctttgaagtctcggctacttggctacttcaactctgggaactatttttggcattttttacttgataatttcttcctctccttccccccaccccacccccatgtttctggaactcctagttaaatctggactcctgggttaatcctttgattttgggggtaggatgtgactagcattatcccatcgctcattttctgagatttgtttggcttgctcttccacctcttcttcgttttcttttctttcttttttttttttaagacagtgtcttgctctgttgcccaggctggagtgcagtggcgccatctcggctcactgcaacttctgcctcccaggttcaagtgattcttctgcctcagcctcctgagtagctgggattacaggcgcatgccaccacgcctgactaatttttgtatctttagtagggatggggtttcactatattggccaggctggtctcgaacccctgacctcrtgatctgccgcctcggcctcccaaagtgttgggattaacaggtgtgagccactgcgcctggcctcttctacctcttctaattggattattttactttagaatagtttagctgtacagaaaagttggagttcccatatagcctactcccagtttgcccccattaaacacatcttatgttagtacagtatatttgtcacaactaatgaaccagtattgatacattattattgactaaagtttatgctttattcagatgttcttagcttgtacccagtgtctttttttttttccgttctaggatgccacattaaatttaatcatgtccccatagtttccactaggttgtgacaattaagtttttgatgaccatgacagttttgaggcataccgatcagatatttggtagaatgttcctcgatttgggatttgtcggatgctttcttcatgattatcctgaggttatggggtttgggctataacatgcttaattgtaactagggtgattcttgttttctagttattttttaagggggaaaaaaagtttatttcatgggtgtggtatcttctcttgattttatgaggatattaattttataatacatatttttaatctttgatctctggcactgtctgtttcctctgttattttgtctatttatttggtgtctgtcttttagttggtcatctctcagatacctgtggtctcgggcacacagctgattggaaactgcatggactcttcagagtgggtgcctggatgggaggctggccttttcatttcttgaatcccatgttggtgtatataggttttctttctctggggctggtttttcaagagaagactcccttgtctttgcctgaggagtggagggtggtgtggtgtttgtctgctgccctcctgtgaggagcagcagaagtggggggcctgaagcttctgaggtttgccactcaggttctctcttcacttttttggggggtctyctttccccaccccttccccctctgaccctggtgttctcaagtctagacttctcttgtttaatgtatccagtgggggagggaaggggccgtaggtgtctagctgttgcacttgcagccttcagccagtccccccacatctgagttcccaccttcccctttcatgcaaggtgcctgccacctcctacgacctcctgagccttctgatatcctgggtgaagggaggttttcccctctgcagtcctcatgttgtggcatctttcagtctgtgaaatctgttcatacttttgccccctccttgccaaaactgtccctgttgtttgggttcttcgctgttttcattttcgggggttggaaggatgagctgtacaagccctcagtctttytgccatgtttaaccagaagccccctgtattctaaatagtgtgtctgtgagttggatggaattgaattaagggccatctgtgggatgtgtgtgcgtggagatgcgtgcacagccctctttatgtacacgggtgtgggagtatttttgtccgagcaccactcgactgccttttccccatgatcgagcatgactctctttttgtgtcagaacctcaagaactgccatttgctgtggtcgctacagagcatggtgaggcccagaggtaaggctggttttgatgtctggtcattggcacaaccttcttacacatatggagggtgaacttctctgtccttccctccagacgccttgagaaagggagtccaaagccccggaggcagagagttcagccagctgcagggggtgatggtgtcaccaccactatctgctgaactcctctgtgccaaggagcattgcatcagggtgctggtggcacacctggggatcatcatctcttccttctaaagcagctgtctgtctccactttgtcactgagaaaacagtaagtgcaggaggtgacatttggcccctggccccctcttccttctggaaacttgtgtgtagagagagagctactgcctgcaaagggggttcatcctctatagggagtgtttgccccagagagtgtttacctagaggttaggtgggagtttagattcagcgttggttattatttgggggatgatagaaccaatcttggttttttttacccccctgtgtttttttctgtgagtctctgtgaggacatagggtttaggaaggtggggaggaatgctttctcctgggctgaaggaagtcacttgctgccagagacaggccagcctgatttgtcttcttcttttgtgcccagattccagcttgctccaggtgacatcattcctacaggggaaaggctttgggtgtaaacaatggcactgccgggcaagccagggacagctgcagctggctgggacgtggccttcctcctcggtgtgtgtgtgctcagctcagcctttctgccatcctgagttttctttaaaattatcttcatagttttaaaaaacaaatagcaaatctgtttggaattaatacacagtgttttatgacccttactgctgaattcttttgaaatgggaagtcaaaacacagtagaacacgggcgaggcagatgattagtattgcagcgtgacagcacctggaatttaagtggctcatgctggtgaagagagatccagggatctaatctgggagctggtttagggatgatacttttctgtaattttttttaagatttacagtttttctgtatcaagcgtatatttcttttgttactaaaaatgtgatggagaaataaatgagcagtactgggattatccacttccataaggccatctattgtaacatcagagggtgactgcagtraatagctacgtttattgccccaaagtgggaagccttgaaactggggcagtttagtgtggtttaaattagtcacagtagagtgtttatctcaagagggttttctgagaatctccctgcatctctgtcttcctgagaattaaaggggtccactagcagatcctaaacacctgggagtttgtcctcatggtgtttgaaggtcygctctctgtaccagcacccttaaactgtgacacttaaactgtgacacaccaacgtggggacgggtccccagtgcacaggaggaggtagaagcacaggtgcctggtctacccagcaccacccagagcagccctgctggggaacggaggcttccctggctgcataggagtctggagagatgagcactgtcaaaagctgataattgggtgggctggagagagaacaagagcagaaccacggtgaggtgacagccgccattggtcgagtgcctgctgaggacaagtgctgggtcaagtgcgggggtctttgttctcttgtttattccttacagcagacctgggaggtgggagattaacatggtatgttcatcttaatccacgaggaaatagacctcaagtcacagtgtggagtggaggcgagatgcaaacccagtgtttcagatttgagactgccgggggtggtgtggggagaaggctgggtggcggcgtggggccagcatgttgggccgggggggtctggacttgaccctggcgcggtggggggtgatgtggaaggtgtgtgagcaggtgctccccgtggtctgtgttgctgtgtgagccgtggctctggtggaggggacccagctgaccatgtggttccggcaaggggcttgcaactaagtgcyggagaaccccccagttctccactgggggtggggagtgcttcttgtgtcctcaccatacgcctcaatgcttctttgtttttcctttcctcttattttaaatttgttgcttcctatatatgctgtctccttggggtgcgtggtcttytggggatggctcatgtctcccataaggaacactgggttaccaggaaccccactttccccactctgtggtttcctcaaaccttattttcaggctgtttattcttggagagtttgtgcagtgttctgcagggacctcacccatttgggcttctgcaggtagaatgcctggattgtgctatagctgagcccagccttcagctttccagatgagccagtgcctcgctcttagggaacagaaatgtgggcgctttagggctctttgaaagccacctctgcttttcttttttctttttctttttctytttctttctttctttctttctttctttctttctttctttctttctttctttctttcttttctttcttttttttttttttttttgagatggaggctccctctgtcgcccaggctggagtgcagtgcatgatctcggctcactgcaacctccacctcttgggttcaagtgagtcctgtctcagcctcctgagtagctgggattacaggyatgcactaccacgcccagctaatttttgtattttcagtagagtcagggtgtcgccatgttggccaggctggttccgaactcctgacctcaggtgcacctcagcctcccaaagtgctaggattacaggtgtgaaccgccacacctggcctacccttgcttttctgacagtgccacgtagggagcctctgcaagctggaggtgtggtgggggttgggttaggctgtcatcgagtgaggcagcagaagtgtcccctcaaacccacctggttcccccaccctgatatgcacacaagttcatcatcatcttgcaatgtattcatgtccatactttaccctctgaaccagaaggcagcaaactgcaaccccgattgcagcccacctcctgtttttgtaaatatggctattctcttttatgtattgtctggggctacttccatgctacgacgacagcctcaggcagagttgagcaattgcagcagagagctctgtgtggccagcaaagctgagtacatttactgtctggccctttacagacaaactttgcagatctctcctgctgcaggagtgcagggtggagtctcckgtctccatgtccccagcaccaagtgacacagggtctggcacacacattggtcagtaaacgtttgagtatttgaagtaggtgaggtcgccttacttacgttaaaggtttttttgccagacattgattggtgtgttggggaaagatagacttctttcatcttgtccctggatttcgtggtgatggttcttggctgagacttaacaagtaaactgtccagtggccacgtccttttctggcccacattgttacttcctgaagcgtttatccagcctgctatcaatttccatgcctgtggaatcatgatttttggtatgttttgtctagcagtgggatctttccgttcgttctataaagagacattccacctttctctctcactgcccccagcctcacggccagggcacgttgcagcactcattgtgtccccctgaggtcgggccttgggcctttgtcactattgtgagtggaggaaagagccatgaaatctctaggtgcccacatgtgaagagtgaagtgactggatttgccttgggtgagaatctggctgttggtggcatggcgtaaataaaatgcttgtttttgaagctgtccaggatcatcatctgyacagttggccagaaagcagctgttgagcctgggctgacttatatcagaacccattgtgccgcctttcgtgtctgcaccggtactcccactgggaaagcagattccaggtcgtggggcattcagtctgcagcctggtggcgtccagtgcagcctgggctccaagcctggccctgcactcggcagccttgtgaccttgggtgcgttacttttcttttctttctttcttttttttatttttttattttattttaagatgggtgtctcactctgttcccaggctggagtgcagtggcatgatcttggctcactgcaacctctgcctcccgggttcaagcgattctcctgcctcagcctcccgaatagctgggattacaggcgcgcgccaccatgcccagctaaattttgtatttttagtagagacggggtttcaccatgttggccagcatggtctcgatctcttgaccttgtgatccacccaccttggcctcccaaagcactgggattacaggcgtgagtcacccgcatcctgccgggtgtgttacttttctatcctgattgactgaaccttaatgtccttctctgtcaaacaggcagtagtatcttccagaaagtgctgttatgaaggggagtagagcacatgagggcttagcagggtgcctggcccttgaagtgctggtggccactgatctcccctgaatgcggagccgtagtggttcctggtgaatgacaggtcatcccagtgccctggtcaggcatctgacactggctggcactcaagtgtggagtgaaattaatcctgttacccggaaatggcttttgataaattaattacagggcagagatgttccctctggtggacagatagcaggaacctgttggacaggcgggcactgtctggagaggcggggcttggatgtgaagttgccgttgttggcgaatctttctggttgtttttgttccagcacagcctgggagcacttctttagattatgtgccaaaatatgcaacctggattctttttcaatgttcttttctccattgatttgttcccaaatctatcttcatatgggttttaggcccctttttcatctgcctaatggcaatattttcttttaggctggcaagtttcagaatgctctagctccccgtggcagtgtctctgagtggcttctgtgggaaaggagggcttacagcaagggggcacataggctggacttctttccagcaggcatcattgggttgtgtctgcttcatatgtcatactgaggttccaagtcagattctgttggagagaaaacgaattctgttgcctacagaagggagagaaggtgaggtaaagccgtggccataagccaggtttgacttatgctaacctgcgaggacttggtgcgtctatgccgggtctagtcccacagacctaggggtgagtcagagctggatggaaatgcctcagaccmgctggagagctgttctcttgcctcagccggcttcctgcttcacacttggatgctcaccggtgctttctccctgcctccggataggctagyttagcttggggtatgcatgtgtgttgatggatggaaactcggcaggtatttgaagcctggtaaagccctgctaacagcgccctggcctgatgtttgtgaaaagcagctggcaagcagtggggccagatgcttgtgggcggggccagcctcgcactcagccggtcagtggagatccctgcaacgggaggaaatccgaatgattctggtttattttggagttgtgtccagtgaaagatctcctgactgccgtaaagcaggtgtgtatacacaaactttgtaaaggaccaggcagtaactgttctgggctttgtgggccatagatggcctcttgcttatttctsttcaggctgccggcccctkctctgatggaacgttgaggctggaagattctccacttgtgcagtcttcactgtggagagtgtaattgtcctcgtaggggctgctttcattcactgcagcagtgactcgcctggttccttgttggtatcccaagtttatataggaaaataggatccaatcccaggcttgtaagaggtggctgattccacagtaagccatttctttctgctacgttttttttttttagacagatttttccctctgtcgcccaggctgtagtgcagtggcccaatctccgttcactgcaacctccacctcccaggctcaagcagttgtcctgcctcagcctccccagtggctgggattacaggcrtgcatcaccacgcccagctaatttttttaaatatagttttagtagagacagagttttaccatgttgctcaggctggtcttgaactcttgggttcaagtgatccgcctgcttcagctccccaaagtgctgggattacaarcgtgagccccggcgcctgggtagtaaaccattatttctgtggctgtcagttgtcaacattgatgggcttgattttagggtcagtgcttgtctaggccactccttcagtagatgaggaaacaggtctagagaggccaatagcgtgcccaacaagtgcaaaacttggttaaaaggttgggggcactggctgggtgtggtggctcacgcttgtaatcccagcacttcaggaggccaaggtgggcggataacttgaggttaggagtttgagacaagcctggccaacatggtgaaaccctgtctctactaaaatacgaaaattagctgggcgtggtggcgcgcacctgtaatcccagctactcgggaggctgaggctggagaatcacttgaacctgggaggcagaggttatagtgagccaagattgtgccastgcactccagcccgggcgacagtgtgagcctctgtctcaaaaaaagaaaagaaaagaaaagatggagggcattaaagaaaacattgtacaagcaggttaagtgcagatgttagtccaatgtgtttcttgtactggcttcaccaaggctctgtgattggaaggggtggaaaacatttcacctggaacacagaaggtgcccagttaatatttgttgggtggttgaatttactgggaggacatagttcaaggaatagttgyagacagactgacatctcgtaaacacaattctaaatttctaggagagtgtctcatgtttgggcraggttttttgttttttgagatggattctcactctgctgcccaggctggagtgcaatggcgcaatcttggctcactgcagcctctgcctcctgggttcaagtgattctgctgccttcaagtgattctcctgctttagcctcccgagtagctgagattacaggcgtgcaccaccatgcctggctcctttttgtatttttagtatagacggggtttcaccatgttggccaggctggtcttgaactcctgacctcaggtgatcctctcgcctcggcctcccaaagtgctgggattacaggcgtgagctaccacgcctgacctgagcaaggtttttttccttttgttgccactagggtatggggaagtatgaatcaaaccttctcagagaagtgtggtgtgtgccaggtagttacactgagagctgtgtgtgtccattctacccttttccctcaggcctggtcagcacagagtcagagaaagtagaggccagggcaaacagcttttaagaggacttttgttgttgttgttgttgttgttttttgagatggagtttcgctctgtcacccaggctggcgtgcagtggcgcgatctcagctcactgcaagctccccttctgggttcatgccattctcctgcctcagtcccccaagtagctgagactgcaggcgcctgccaccacgccaggctcattttttttgtattattagtagagatggggtttcaccgtgttagccaggatgatctcgatctcctgacctcgtgatcacccgcctcagcctcccaaagtgctgggattacaggcgtgagccaccatgcctggcccccgaggactttttaagtaatatttatataaacaaatgtatttctggtcagttttcagaattaaatgacattttagctgggcatggtggttcacgcctgtaatcccagctacttgggaagctgaggcaggtgaatcgcttgaacctaggaggcagaggttgcagtgagccgagatcatgccactgcactccaccctaggtgacagagtgagactccgtctcaacaaaaagaaaaaaaatcacatttgatttaagaaatcattcgatgttgccaggcacggtggctcatgtctttaatcccagcactttgggaagctgaggtgggtggatcacttgaggccaggagtttgagaccagcctgggcaacatgatgaaatcttgtctctactgaaaatacaaaaattagccaggtttggtggcacacacctgtaagcccagctactcaggaggctgacacaggagaattgcttgaatctgggaggtggaggttgcagtgagctaagacggtgccactgcactccagcctgagctacagaaagaaactctgtctcaaaaaaaaaaaaaaaaaagaaaaagaaaaaaagaagaagaagaaaggaaaatcattcaatgtgaaatcttgccatgcctttctttttcttgagacaggatctcgctctgccctcaagaggcttgcaatctagcccacggaacgatgctcttattaattatgacttttggggagtgggacagcaactccctggacctagcctcagggagggagatttaaaatggcccatggaccccagggcaaggaagcagccaggtcatgggcaccgcagtcaggattgggcacgtgggactgactcccattctgagcattggtgccctttgctccagtgcaggaggtgagctctggggagggctgctggggtcaagcagctgctggcaggtaacttgggggcagtgagtgcttggaagcacttttgctggtatgtttcttcattgtgccagactctcttacgccctctagtacattcagcatccttgggcttggccactgaatgtgggcrgcagtcccatcattgtgacatcaaaaatgctcctgcacatttgcaaacaccctggtattccttggcccatggcagcagctgaataaactgggatttgggtgagggaagggagttaagtaaccaaccagcatggctgaagccatgtggggcggagaggagaatttccttgaagaagggcacagtgtcggcccctggttgtgtcccctgctcacacagatcggacgtaggaccgcttatccctcggcatccatcttcctgcgttcttcatgagcatttcttgatacgaattgcatgcggatctgtccctcagtgattggcagatcttaggtatcagtcaatacctgttaaatgaatgaaaggatggtttgcgcacttgcgtgtttgacacggcaccagctcagtcagcgtcttttgtctcactttttttggcccctgtttgtaatcgattttcrctccctatgtttcatttggatcataatatagttgtgtgtgtgtgtgtgtktttttgatggagtcttgctctgttgcccaggctggagtgcagtggtgcgatctcagctcactgcaagctctgcttcccgggttcacgccattctcctgcctcagcctcacgagtagctgggactacaggcgcccaccaccacgcctggctaattttttgtatttttagtagagaaggggtttcaccgtgttagccgggatggtctcgatctcctgacctagtgatctgcctacctcagcctcccaaagtgctgggattacaggagtgagccaccgcacctggcccataatatagagttttatctttaaaatcatcctttggggtacagattgccccccaccacatcgcatgtgttcctcctggcctgcatggtgtcagaacaagatggtgaaatggcaaaccttgcttccgcagctaccaccaagtgccttttaccagtcagtggtaaaatggggaattatagttgttgccattatgtcattgaggacatgttaaacatatgccttaattattgctttagctttgttttccagtgagaagtgatgatcacttatacaagtgttttatttttttgttgtttttgttcttgttgttgagatggagtcttgctctgtcacycaggctggagtgcaatggcacaatctcggctcactgcaacctctgcctcctgggttcaagtgattcttctgcctcagcctcctgagtagctgggattacaggtgtgcaccaccatgcccagctaatttttgtatttttagtagaaacggggtttcaccatgttggtcaggctggtcttgagctcctgacctcgtgatccacccacctcggcctcccaaagtgttgggattataggcgtgagccaccgtgcccggcctacaagttttgttttttaagagataggatcttgctctgttgctcgggctggagtacagtggcctgatcatagctcactgcagcctcaagctcctgggctcaagtgatcctcctgcctcagcctcctaagtacctggggctacaggtgcatgccaccatgccctgctaattatttttatttttatttattcattttgagatgtagtctccctctgtcacccaggctgcagtgcagtagggcaatctcagctcactgcaacttctgcctcccggcttcaagcaattctcatgtctcagcctcctgagtagctgggattataagcatgcaccaccatctctggctaatttgtgtaattttagtaaagatggggtttcaccatgttggccaggctggtctcaaactccaaacctcaggtgatctgcccacctcagcctcccaaagtgttgggattataggtgtgaaccaccatgcccggcctattttaatttttttagacacagtgtcttgctgtgttgaccaggctggtctcaaactcctggcttcaagcagtcctcccacctcagccttcctgagtagctgggattataggcatgagccactgagcccatcaagtgtttggtttttggtaaggaagcttagaacctattgccaaggttgggtatggaataaaaagcagtgaagctcttagtcctcagtgcctggcacacaggcccttggtcggcacttagtatttgtttttgttgtgtttttttttaagatgcagtctcgctctgtcgcctagacgggagtgcagtggtgcaatcttgactcactgcagcccaggttcaagcaattctcctgcctcatcctcctcagtagctggaattacatatacctgccaccatgcctggctaatttttgtgttttcagtagagacagggtttcgccatgctggccaggcaggtctcgaactcctgaccttaagtgatctgcccaccttagcctcccaaagtgctgggattacaggcgtgaaccaccacgcccagccaggcgcttagtattttdagtgagtgagtgagtgagtgagtgagtgagtgaactgatgaggagagcactagtagactcatggacacctgtagcacattagaaagtggcagaggagggaagcttctttcttggagggcttttcaaggttgtctcttcaaaggggcaagtgcggatggcatagcccccatgtggtctctcccttgctagccctggggagttcttgctttctgttttccatgtgtgtagcttagagagcccttttgttgcctaagcagatgttttctctctgggtactagttgtttattttgaaaagtgtatatacttgattatttctgaaggataatactctggctgccctcctttgatttggttttgcttgcccttgagatgaacagccgtggtgtaagtgggttgtgtacctcccctattctgstagccttattttcagtgttatacatggatgtgttaaagtactgagcatttatttttccatcttgagctgtccttgacttggagagggctctgttgaagtttacatgtcagtgtggttggtgtgcagtagactccagccaactcagagtgagaggaattaacagcaggtgggggttgggggggtactccacagatcgcctcggggtgtctacataaatgccctgtaaatgtgaatgaacagcctgtgggtggtgagagcagttttctaaggacagtccaaagccatcttcagatcttcaaggagatccatgattcgtgaaggattcactcctctggatcagaggttctgctgtagtgacactcttttttttttttctctctctttttttttttttcttctctatttcaaaggcagatcgggagcggtgccgagaaaaatttccttactagatgacatttcatcgcaatgtccgatcgtttggggcaaattaccaagggcaaggatgggaaaagcaagtactcgactctcagcctgtttgataagtataaaggaaaatcagtagacgcgattagatcctcaggtaaggcccagggttgaaggccagttcctcaaactttctccgagtgacatatcccagaaacccagagtccctcacctggttagacagatgtggtccgtgcacaccaggcttctgggtgtgcatgtagaatcactctctacttcctacttgaggtatgatttcagagccttgagcatcctgactctttctgtagtggaattttctccatctattaccttattgaagctggggagatatatctatagatatctatagatagatagatagatatctatctatagatatctataggtgtgtgtgtatgtgtgtgtgtgtgtgtgtgtgtgtgtgtgtgtgtrtatatatgttttggagacagagtctcactctgtcacccaggctggagttcagtggcatgatctcagctcattgcaacctccaccttctgggctcaagcgagtctcttgcctcagcctcccgagtagcaaggattacagatgtgtgccaccacgcccagctaatttttgtatttttagtagagatggggtttccccatgttagtgaggctggtctcaaactcgtgacctcaggtgatccacccgcctcggcctcccaaagtgctgggattacaggtgtgagccactgtgcctggccaaagctgtggatttttatcctgatgggtagaatgggacttaataggcattagtgttatcctttttttttttttttgagacacagtttcgctcttattgcccatgctggagtgcaatggcgtgatctcagctcagtgcaaccttcacctcctaggttcaagtgattctcctgcctcagcctcctgagtagctgggattacaggcatgtgccaccacgcccggctaattttgctttttgttttttgtttttcttttttgagacggagtctcactctgtcatgcagggtggagtgcagtggtgtgatcttggctcactgtaagctctgcctcccgggttcacgccattctcctgcctcagcctcccaagtagctgggacgacaggcgcccaccatcatgcctggctaattttttgtatttttagtagagacrgggtttcaccgtgttagccagattggtcttgatctcctgacctcgtgatcggcttgcctyggcctcccaaagtgctgggattacaggcgtgagccaccgtgcccagcctaattttgtatttttaatagagatggggtttctccatgttggtcaggctggtctcgaactcccgaccttaggtgatccacccacctcggcctcccagggtgctgggattacaggcatgagccactgcgcctggccagtgttatccttaataaagaatttttttttttttttgagacggagtctcactctgttgctcaggctggatggagtgcagtggcgcaatctcggctcactgcaagctccacctcctgggttcacgccattcttccgcctcagcctcctgagtggctgggactacaggcgcccgccatcacgcccggctaattttttgtatttttagtagagacagggtttcaccgtgttagcgaggatggtctcgatctcctgacctcgtgatccgcccgcctcggcctcccaaagtgctgagattacaggcatgagccaccgcgcccggccatccttaaagaattttttaaattttgttttaaaatttatttatttatttagagactgggttatgagactggctaatttttgtatttttagtagagacagggttttgtcacattgcccaggctggtctcgaactcctgggctcaagcgatctacccacctcggcctcccaaagtgctgcaattacacgtgtgagccaccacgcctggtgtgttatcagcctttttagctttcatggttcttgatattctagaacttgttggaaaggttcttgttgatccttttcacaccccatgaagacttcatgaatgtcgaagggctcctgttcagtcttgttttggatctaggcagaggctgtccctttagtcctgtaatgagaccagagctgtctcaacttgcagagaggtggttcctctgtaagctggaggttcctgggcctgtctcctcacccatgttgtaaagtctgcgagccttgtcctgcccatcagtgaaatggaagcctttttacaggttttagcagctcctttgtccctgtagtcttcagtgaagagcttgtaaagtgactaaagtgacaccaaacacttgtttgtcccactgctggtctgccctttgttttttgttgggttagctttgttatgatcacttagagattgaaagaacagctgaatgcatcaggcttctttccttctgtgacctttttgcatggtgtctgttccatgtccctctccctgcagttattcctagacatggcttacagagtcttgggaaagttgctgcagcccggcgcatgccaccgcctgcaaacctgccaagcttgaagtctgaaaacaaaggaaacgaccccaacatcgtgatagtacccaaggacgggacgggatgggcaaacaagcaggatcagcaagacccaaagaggtaaacggaggaggcgggtggtgagtgggagctggcgctccaagggtggtcccggcatccttccctgtggcaaactaaccctaaccctttggctactgcagcgctagtcttgcagtggcagaattggaacactgggagatgcaaatgaagctgcttcctctctggccctggtgcttcgtatgtttctttttccctgccttcattttttctggcttttagagccgatggagcagcacatctgtggacaaccttgtccccartgaccastttccccctgtgccttattaggaaaggcctcatcaccccagargagcttatgcaatgactcagagccaattcctgtaagaaacactgtggacagagctggggcttgaggacttcattcctggtgatgggtgtccctgtgagctgagctctgcagagaatcatgcagcttccctaaccatcggcccagcagcttcccagacagaggagacttctgctgttgctctaaacagacctagtcatcagtgagaacagcacagaatcctccaggatcactgtactgcagcctccctggaggctcacctcctgccagcacagtacttacagaaaccctagggggcagagggtggcatggtgctgtcaatcagagaaacagcccctgtgtggtgggctgaaaacacagggcctggctgcctggggcccacttggwtggctgcacctttgtctcctgctgcaagtcctctctgagtgtttagccagtgctaagacaattcagggaaggggatgtgttcagggagggacagggccttgctgaggctggcaggcagaaatctgctgctggggtttgcctgttaaggaatgtgaacaaagctgtctggcggcagcgccctcctggcctgcatctctggtggcctccctgctgatgtaggaaaccagacggtaaaagggacccagatctcagcctgcygaccccagcatccttttcttacaagtctgtgctagaaatgaccatggtagcttttgtaaaattgttgcctgtatttacttcagacaggatgtagagagtgagctagtttagttattcagctagatgattataaagtagtaatcaaaatagggccttagaagttatttttaaaacatttctaagagtttgcttagggatcatattgatggacagtatagcatgacttttgaaatctaccagccctaagtggtttccagctagaccacttattagcttgatggaacctggagaattgtttgacttctgagcctcagtgtcccccccttgaaataggaatgatacctggctttgctggtggttacacggtatccatgaggcattgatgggctagcataggtcaagtgcttagcctaaacctggcacagaggaggggcagatattggctgctgtcatcattccattcaaatggtactcattccattcacaccatgagctctggaacgaaatggatattgcacattttaatggaaggactgaaatcctctgcaccaccaaaagttctagagaggacaaagcattactccctcctgttatccagcctttactctgcctttgcggctccagtgagggctagttgtgctggagcacrtccgccagggaagaggtgaggatggagtgttggtgarggcatagacccccgtgtagttctctgctgccccaggccacatcctcccaccaaggtatcaggtggcaagtgggcccacaacgtggggactcagtgcttagttttggagaacacaaaagtgcgactacttggaagcttctcttttaggtagaaggagatgtaagaacccgatcagtagccttctgtttgtaataatcacgaatggtgagttgcctgggtcaggtgaatcttggaagagggtgtctgtatagagtttggcttccatttacagataagccacttgtattggaggagttcccaccaggggggtggctgccctccttgaatctcgttgagtgaaaagttgcctactgtgaccggagcgctgagttagagcagaaaccttcattcggccatttcttgttgatttcatcacttcacctgtggagtgtaaattcactgacacagcctttttttggagggcagcctggcaatcatttaaacttcaaaatatcttttgatccagcatttccatttctaaggtcgtatgctatggaattacttacagaaaaatggtgcaaagatatgtattaaaaaaaattcttggccgggtgcagtggctgacatctgtaatcccagcactttgggaggccgaggagggtggatcacctgaggtcaggagttcaagaccagcctgaccaacatggcgaaacccgatctctactaaaaatacaaaaattagctgggcgtggtcgtgcacgcctgtaatcccagctacttgggaggatgaggcaggagaattgcttgaacccgggaggcagaggttgcagtgagccgagatcatgccactgcactttagccagagtgacagagcgagattccatctcgaaaaaaaagaaaaraaaaaaaagttcttattgtaggtcgggcgcagtggctcacacctgtaatcccagcactttgggaggctgaactgagcagatcacatgaggtcaggagttcaagactggcctggccaacatgttraaaccccgtctctgctaaaaatacaaaaattagccaggcgtggtgctgcataactgtaatcccagatattcgggagactgaggcaggagaatcgcttgaacctgggagaaagaggttgcagtgagctgagatcatgccactgcactgcaacctgggcggcagaatgagactccatctaaaaaaaaaagccaaaaaattcttattgcagttgtatctgtaagcgggaagaaaaacccatatgagagactggttaaattatgacctgtctagttgtgttgtgtgctcattaaaagcaaaaggaagatccgtttctatgttgatgaaaagatgttcagatgcatgaagtaaaaaagtcatagagctttatgtatggggtcactccacttctgttagaaaaatactgtattcctgcagtgtaaaactctgctggttaaaaacaaaactgtattaacaggtatagaaaagtctgcttggagtttctctctggatgatgagatcatgatgttctgtgttacctagttttatttataagtttatttttactatgagcatgtatttcttttataaactcagagaaggttaaaaagtcagccctctgagtaggtatgggctctgggtctggggtaaggggcacaagcccttcattccagtgattgaatttccctattggcaaatccttcatttgcattgtttacagtgagcttttagtttttgcagacagaaggctctacaagaaggcagaaaagtttcatttttaaaaaagaaaggccaggcaaggtggctcaagcctgtagtcccacctactcagaaggccgagatgagaggattgcttgaggccgggaagcagaggttgcattgagccaagtttaccccactacactccagcctgggtgatagagtgagaccccctgtctcaaaaaaaagaaaaagaaaaagtcagaggactgtcttgtgctaattttaaatgtcagtgactagaacttaagcatggtttgttttcttattagtttttgccagcataagaatctactggggaaagtcgtatttttattggccagaggaggtctgcttcctgtgagcagctgaacagctgtggctcctgagaacgcagagacctggccagcgcactctgtgcggtgcctgaccccactgccctgcctttgtctagttccagtgcgacggcctctcagccgccggagtcgctgccgcagccgggtttgcagaratctgtctccaatttgcagaaaccgacacagtcaatcagtcaggaggtaggtgctgggaccccatcccaactgtttcctgggcatggtagcccctaaatctctttgttgctgggggatggaaggagttgctactgagaagtgtggttgtgcatgacctgtctattccagaggcacacccgatgagtgactttagaaaaccgtcatgggaaaccgtcaaggtcagtggttaagaaatttaatctgcagcttttagaaaaagacctcagatacagactaggatacaggcacctactttggttcctcttgatttaccgtgaggcagggtcactcaggctggactgcagactagttcagggtgaagctccatggaagcgtcacgtgagctccatggaagcttgggtcacaggaagacaaaaagtggcaggtcacaaaaaggttcactggccaggtgagtttgaaaaacaaaacgaagcgagctcctttactgcggtacttctcagtgcctttcatatgctaatacctaatgtgactctctgagaagaggatataatgggcagcagtccctgaatttatttgtcccaggaaacatttctttaccgaatgtctctagggactaatgtctctcagaacacgctttgggaaatacgaagctacaatccttcatttgttgatatgttttaagtgtttttctaagcagaaagtaatgatttcaccaagcaagagctcataacacactcagtccatcagagcctggctacaggtttccagagattggcaggaggatatacttagccagaactagaaatctagatgagaagtctatgaattttttagaagactaaaagtagacgtagatatctcatattcaccagctctcttgacagcgggaatgaacatattttggttttgctttgctgcatgggcaatataaggtctcaaatgtcatcccctctctgctttaaccatactcagggaagtctgtggctttgccagggcaccctctccccacctaacactgaaccgtgcttttaaaattaaagacaagaaaagaggtctataatcatgcaagatgcccttttccttggcctaaatccactgggacccataggctagtcagagtatttagagttgagttcctttctgcttcccagaatttgaaagaaaaggagtgaggtgatagagctgagagatcagatttgcctctgaagcctgttcaagatgtatgtgctcagaccccaccactggggcctgtgggtgaggtcctgggcatctatttgaatgaattgctgaaggggagcactatgccaaggaaggggaacccatcctggcactggcacaggggtcaccttatccagtgctcagtgcttctttgctgctacctggttttctctcatatgtgaggggcaggtaagaagaagtgcccagtgttgtgcgagttttagaacatctaccagtaagtggggaagtttcacaaagcagcagctttgttttgtgtattttcaccttcagttagaagaggaaggctgtgagatgaatgttagttgagtggaaaagacgggtgagcttagtggttagagactcgaaagggcactggacataggcaggctggagactggtcctggtcctgctgttctgcatctgactcagtcactcttctctgagcctcagkgggggatgtgactagagccttctcagggggtggtgagcattcagtcaggctgggtgtgcttcgcataatgctgaccctggcgagttttcagcagaggtgacctcctagggttctcaggaggggagctgtgccttgtagagtcacggtcactacagaaagtgctgcagccagcccacccagatcaagatctggcatgttggccttctttgttcacgttcctcattagcagctgcgcagttttaaagacacatgccggaactgggccttagtctttgtcgctggagcaaaataaagtagctctctgtggacacgggaggttccagagcaccgaatggagagaaacaggtttgggtcctggctttgctgtgtcactgtctgtgtgacttgaagctggtcactccccaaatcctgctccttgtctgtagagtgggcctggcattttctcgtccctgggaccgctgtgtggagtgtgcgttacagggaaggttcagggctttgctgctgctcagaaagtggtggtggatggatccgtatagggtttgaatctaaggtgctggcctctcagcaccttgttgtaataggctgttattgtacagtggaataagggagctggccctcttctgattctcttccttctttcagaatacaaattcagtgccaggtggaccaaagtcatgggcacagctgaatggaaagccagtaggacacgaaggtggtaagtgcgcacgtgtgtgtgttgtttggggacgctggggagagggaggtgaatgccttttccagaatgtctggttgggtctaggcacccagaagctttgaggactctcttccacaaagaggtaccgtctatggagcccttgcctgtgcacagcgggcgctgactctgtagaggtgccagctctttggtttctttggatgtgtgctcttgctgagacagaggagtgctgactgggctgtgctgctggtgatttttgatgatagcttgaatgtttctagcatactgtgcttcagaccaaactaggcagcagctctgagtgggaaggagagtggtcgtggtgtgggcagacgattcaaaggaatgtactggggaaagcccacaattcactttctcctgtaaagcagcactggctgccctttattaccctttgccaycatcctgatatcgccttctgcttcctgcactacccctgccagccaaggcttcaccagacttggtctttagtagcctgtattagaaaaccagctgcacatccttcgttacctgaacctcacccccagcctgccatgcctaggaggtcctgccccttatgggttgaaatccctgtgctcaaaggctcttccctcagtctccaacgggaaatgaccgatcaatgtgccaattggatttcagtgccccagcttctcccaaggggctgagggtacagatcgagtgccagcaggagtgcagtggcacaattatagcccattgcagcctcgatctcccgggctcaagcaatcctcccacctcagcttcctgagtagctgggactacaggtgtgtaccacgacatctggctgmtttttttttttttctttccattctgagtagagacaagatttcactatgttgcccaggctgrtctcaaactcctaggctcaagagatcctcccacttcagcctcccaagtagctggggctgggatcacaggcgcatgcaccaccacgcctggcttattgattaattgattgactgagtgattgattggttgcgacgagatctcactatgttgctcaggctggtctccaactcctgggctcaaatgatcctcctaccttggcctcccagagtgctgggattacagacgtaagccaccgtgcctgacctcaaaagggtctttgaagatgctttatgaagagcattcactggacttgtaactggttctttggctttccatatcttatatttctgtaaggttagaattttttgttttgtttttgttttttttgagacagagtcttgctttgtcacacaggctggagtgcagtggcacaatagctcaytgcaacctccataaggttagaatttttaaaaatagatagaatatattaatttttatttaaaaagaactacaaaaattaaaagaaaaacttctgtataaattggcccaactcctatggaagccagtttggcgctgcctggcaaaataataacacataataccctttgacctagcaagtgcaccctgaggaaattgctctacaaattatactcgcccgtgtgtgaaatgacttgcrcataagattattcactgcaacattataatagcaaaagattgcaaacagtcccttgaaatgcctgtaaaattatggtactttaatgaaatgtgatttggctataaagaaaaaaagcagaagttttctattgatttggcaagatcttcaggtgaaaaaaagtacagaatggtatgtatagtatcttaaccatttgtgtaaaaaatgggggtgagggctggacatggtgactcacacctgtaatcccaggactttgggaggctgaggcagaaggattgcttgagtccggtagttcgagaccagcctgggcaacatggtgaaaccctgtctctacaagaaatacaaaaaatcagccaagtgtggtggcagacacctgtagtcccagctacttgggaggcttgaggcaggagaatcacctgagcaccagaggtggaggctgcagtgagctgtggtcacactcctgtacaccaacctgggtgacagagcaagaccctatcttaaaggacaaaacagaaaaatgggagtgagaaaaaatacacttctaaaaaatgttgtatatgcatgttttaaaagccacccatctgtatactgatgtatatgtgtttaaaaatctccagaaggtaacagaaaactgccagtttttttgagggagtcagaagggggcaaatgggcataggggtgagaggaaggcttctgtgtctacctttacatggtgttcacttctgaaccatgtcactgtgttacctataaaaaatgtaggtaatgtaactgtatcacaataaagcttgatggagaaaataattttaaactggacgtggtggcacacacctgttatcccagctacttggaaggccaaggtgagaggattggttgagcccaggagtttaagtccagcctgaaaaacatagcaagaccctttctctacacaaaatttaaaaaaacaaagaaaataattgcaggcagaaacctgccagcccacagaatcgacacactgggcagggtgggggccaagtgtaaaagtcagtttcagttccccctctcgtgctagagtcatgcatctgtgacactgtcaggagtgtggggatttgagggtgttgcccacaagtgttttcatgactctttggaattcaaaaggacttttcctgaattgatagactcagttgataggtcacctgaaacagacccaggagacctgattgcatgtttgggcagaggtcagaggctcagataccagctgctgccccaccagtggctcagcctgtgacctcggaagaagccccctgactttcctgcctcagtttctcatggcagagaacagatggcaggtgaacatcataaaacattgggaccttatgaatactggtattttggtgtgagattttttttttcctaccctttatccttattaagattaattcatgcttacaataatatattcatgattctcgaagcagaagaaagagatggaacagcaatgttggacaggtgctggtttttttcctaatttcaaatctacctttttttttgtttgtttgtttgtttttttttaggcagggtttcattctgttgcccaggctggagtgcagtagtgcagttttggctcactatagcttcagtcttctgggctcaagcaatcttcccgcctcagcctcccaagtagatgggactacaggcatgcaccaccatgcccggctaatttttgtgatttttgtagagatggggtttcatcatgttgtccaggctggtgatactgtattttaaaaatacagtttttatttgattcttgccagtgaccttctaccataatgaagcgactctgagtcagagcccccttcacagagcactggagctccttcatgacacttagagtccatctctggctggtcattggtgaatggtgtccagtcttaccgtcaggtttatttgaccctggacctttttactaagggagtggcaagcgaattgctgccacgtgcttgtgtggtgatccagccgcgcctttcyggcacagtcggctttagtgaacaggcccgtggatcagtggtgctaagaataatttaaactacttaggggaagatttgggtttagctgtatagggaacaaggcattccacagggggccatttgttgtgtggtgtcgccactgttcctagattgctcctgtctggagtgtgctgcatattccagatcaaaagacgtgccatttttaatctgttcatccaaaaatggtggcagaacctctgtgctaagttttctgtgtaagggaacaacattaggaaaggcttcttctctaaagcaggttgtaatgtcaaggaatgaatgaaagaatgaagaaataaactgttcccaggattataagagtgaaatgtttggccttgtagggctcaaggaacttagtacaaaatgcggaaggacaggtgaatgaggagttactcatgtgtataaatctaatttccacctgatcttaccacatttgatggtagaaagcagcatttgtttattttattttatttattttattttattttattttattatttttttttttgagacggaatctcgctctgttgcccaggctggagtgcattggcacgatctcggctcactgcaagctccatctcctgggttcacgccattctcctgcctcagcctcccgagtagctgggactacaggcgcccgccaccacgtctggctratttttttttgtatttttagtatagatggggtttcaccatgttagccaggatggtcccgatctcctgacctcatgatccgcccgcgtcggcctcccaaagtgctgggattacaggcgtgagccaccacgcctggcctatttttttatttttagagagagggtctcactttgtcacccagactggagtgcagtggcacgttttcggctcactgcaacctccacctcccgggctcaagtgatcctcccaccccagcctcctgagtagttgggactacaggcgcccgccaccagactaattttttgtattttttggtagagacagggttttgccatgttgcccaggccggtcttgaactcctgagttcaaatgatccacccaccttggcctcccaaagtgctaggattacaggtgtgagccactgtgccaggcaaaagcagcatcttaatccttttggggtggactggggcagggatggcagcacactctgtaggtgttgcctccacaggaaagcagttgccttcttggcctcccctgggctgattttataggaggctgtgcttgtctgtggccccaggcagtcagtagaaccttccctgctggggcaggctgtggcctggagcggctgtgatgtcttacctctttccatttgtaagcaggcactggtccttgcaggtcagctgggaaggggcatgatgctgtcagcagcagtctcccttgccaccctcagcaccctcgtggcatctgccagcacagagcacccttgtgacaagactcccttcaaaagcccacttccaggcaacacggctttcaaggtgtggagctgggaagcagacgactgttgactccatctcacttcctccatgtctaccccgtcttcttgacaggtttaaggggctcaagccgactgttatccttctctcccgaggaatttccgacgctgaaagcagctggagggcaggacaaggstggcaaagaaaagggcgtcttagatctgtcgtatgggccaggaccaagcctccgccctcagagtaagtgactgcagcctctgggcactcgatggagtaacagaacttcctcctctcatctctctgcactcctaaaagggtgctgatgccactggggtctccggttcgagctggaaacgtggtctttgactmgccacgtgatctgtgcatccattggacttgctgcctaggccattggattgggccttgtgccttttttgtctcttgggttgggccaggcctgtcccctccccctctgtcatccggttgttaattttgctgtgcctggtggctgtggcaaggatggacaaaggaccaattaacttaggtccccggttcaagagcttgttttctaaagctcccaatcctagctacatctagtcggaatcactggggagtttgtgaatgagtctgatttccagtcctcccctcccccagcccaattaggacctgtatttttaacccattcctctggggattgttacataaatcagcctggtactggtctctactggcccctcatcttaggtcgggccagggaagtggcaggattgtgtagcactggctggaaatttctccttggaagccgagggtggctggaggttaaggtggtgtttaggaatgtgattttccacgtgttctactcagggattttgaagtgkctcatgtagtccaggggtcttgatcaggtcttaaattgtgaggccttttgtttgcttgccttgatgtatccccaaggcctctcccattcaagtcataagtgatgtcctgtaagtcagtgatcactgtggatgtgtcttacttaaaccagcactcactgcctttccagtggcccacacaggactggtttattttgctgcttttttttttttgagatggagtttcgctcttgttgcccagggtggagtgcaatggtgcgatctctgctcactgcaacctccgcctcccgggttcaagtgattctcctgcctcaggctcccgagtagctgggattacaggcatgtgccaccacacccagctaattttgtatttttagtagaggcgggtttctccatgttggtcaggctggccttgaactcctgacctcaggtgatccgccygtctcagcctcccaaagtgctgggattacaggcgtgagccaccgcgcccagcctgtttgcatcattttaagggacacgaattatgtctttctggggttaattaagaggagctgccttgtgggactataaaaacgtagacatagaagaagcttctaagcatcagtttaatctcctcattggagaagatgagaaaacatggacagaggggtgaccttggcttgccccaaatcacacagcaaaggggttgaagagctgggatcagacatgtcctgggtctctttcccttaagggtcgtgtaactcagagacctttgtgcttcaacttctaaccaaaaggtgaccgaaaacaggggtctgttgtctcatttgatttcttgttggcctctaataatttccacccgatcttaccacatttggcaatagaaagcatcattttaaaaagacaggtcagcaggtttccgtctgtgagctacgcaagtgccccacacctccactggaaggacagcagctgcgccttgcctgtcttgtgggctgggggatctttattaaaaggtgccactgctaaacaaagcctgaaaccactgtgcccggaacttgctcctgttttaatgtgtagtccagtgctgaccctaagtgggctggtcagtgtttgttgaaggaatgacccaaggctggtttcatcagggccatcttcatctctctgggttgtgagacttggggaagggtggtgattgttgcttactgatgaagccttctctctgagtagatctcattttatatttcacagtcagacttccctcagcaagttcatcctcattggccaggggtctgccccaaccttccctgacagatttaacagttcttcacttttggtgttttttgtttttcattttatttttttggtgaaggagggggtcccttgaccttcagaacctcatacgatccctccttccccctcctcttccctctccccttttgccccctttcaatttccagatgtgacaagctggagggagggcggtgggcgacacataatttctgccacgtctctgagcacctccccaactgagctgggcagcaggaactcgagtacgggagatggagccccctcctcggcatgtaccagcgattctaaggacccctctctccgcccggctcagcctrtccgaaaaggggcttcacagttcatgggaaatgtataccacccacctacataccatgacatgcttcctgcttttgtaagtcttcagagtgtactttttttccccccatgaagttggattgtgtccagcagataggtcaagtggttgaatgtcccccttggggtctcctcttggccctgttaccctacttctgaggcttccactcgttttgcattttctctccctgctttttaaatcttcagggcctctgacttctttccctggtgatgtggatatgattttagcctttggttctttagaaacaggagaggcaggttttccctgacataggtccccaagtctacttactggcagcaggaatgaaatgggrgagatggtggtaggattaattaggaaaccccatgactttcctgtttcttttycccattttccactttataaaacacattctgatttaagtggaaattgcagtttcagccattaccagcaaatcctgttcattgatgttatgtttcagatgtgttcgccgaagtcatcagaaaaccagggtacagtggaacgaggctcttttccccttcctcagctccgccttgaacctcgagttccttttagacagttccagatgaatgaccaagacgggtgagtccattgcattacagtcacstgtgtagagatgagtgcggtggtgattctggtcaagatgaggggctgatgaatagaagtgctgtgtctcctggagaccacagagaacttaaccagctcagcgtggcagggtgtgtggggtggtggctgggatttggagctggatgacagattgagtcatgatttsaagtgcctggtagagttgaagttctggcacgtgtgtgttgctgctgccctaggccttagcaaccagcatgtaaaactgcaggacaaggcagaacttctttctgggatgtactcgtttgctcattatatatttcttttaaaggaactgatagaaataattaaatcaaacatgaacctttgcagtgtggaatttatttttggaaagrtatttgattttgcttccgtctgtatactggacatgattccatcatcttttcttttatcagaaaagaaaacaggctgggattgtctcgcccactccgcccactaaggcagctggtggagcgggcaccacggcccaccattatcaatgcggaaaacctgaagggccttgacgatctggacgccgatgccgatgatggctgggcaggtgggcagagaagcacgggtggtttagacrggcaggaccaaagtccatmtgtacttaccagggatggaaaccccctggcaccaccgtgtgttttcccttggcaagatagggatgaagagccggacagggaagcagacctgatgccctccttcctcatttactccctgactagmggttccttcctggccaagccattagcttcttttggtctttagtcttgatcttagagttttgttgttaactttttaaaaattattgatgatgcaaaatttaaacaaaaaagaaaatagctcccaaccactgatcactcaggttcaataagtaccaatgttctgccattcggtttttgtttgttttaatttaatttttttccaagagacagggtctcagctactctgggcatactgcctgtgggttagccctactctgcaaggagcagtaaaaaatataaagataaaaaggaaggctgggcacggtggctaatgcctataattcctttggaaggctgaggtgggcagatcacaagatcaggagatcgagaccatcctggctaacatggtgaaaccctgtctctactaaaaatacaaaaattagccaggtgtggtggcgcgtgcctgtagtcccagctactcaggaggctgaggcaggagaatcacttgaacctgggaagcagaggttgcagtgagccaagatcgcaccactgcactccagcttgggcgacagagggagacactgtcycaaaaaaaaaaaaaaaaaacaaaaaaaaaaaaaaaaaaaaaaggaaagagaaagagtctggctgtgtttcccattctggagtggagtggctgtttgcagggtccatcatggtgagctgcagcctcaaactcttcctccttcctcagcctccggagtagctggaactacacgcgggtgccacaaacccagcttgttctgccattcttattcgtttatctccacccactccccatcccccaacctgattattttcttttatagttctttttattttcaagtagatttaaattatagtgaaaggtacccatatcacattttacctgtacagttttacaaatggatacgtgtatatcacacacatccatatccagagaaagagggaacatttccctcaccaccgcaggcttcctcattgcttctccagtgctctgccctgccaccgctcaagggcctgctgctcttctgattcactttaccctagattagtttwgcctagttaacagacttcagatgagtggagtcatacagtttttactcttgtatggttttcatattcatcaatgttgtttatatgccagttgcttttagttgctgagatatgttccagtgcatcaatatactgtaatttgtttattcattcaaaagccccactatatacatcatacttctatttctcttgggtaagtatctagaattgttgggtcaaagggtagacataggattaagtgtttaagacctgtccaaaccttttcccctggtggttgtgccattttacattcccagcagcagtgtgtgagaatttggtaggtctggatcttacattttggtgttcatctttttttttttaaagagacagggtctcactttgtttcctaggttggagtgcagtggtgtgatcaaagctcactgcagccttgaacatgtttgtgtttttaattttagtcattctagtgggtgtttagtggtatctcattgtgcttttaatttgcattttgctgatgactaatgatgataaacacacttttatgtgctatttgacagctgatatattgtcctttgtttggtatctgaattttaaaaaattgagtggtagggtaccagcccaggatacaaatcctttgcaacttttattttgcaaatatatttccttattgcattctttgtcttaattttttttaaacactgttttggtgagcagaagtttgaattttgaagtttaatttacaaatttgggtttttttgtggttattatttttgtgtcctgtttaaaaaaatgtttgcttccccttggtggtaaagatgttcctagatgttttatagttttaactattaattttaggtctttgatccacattggattaatttttgtatatggcataagataggagtcaaggtttgttttttcccatacggccaattctccacaacatttgttgataagacttcactttccctatcgaattgctttggaacctttgccaaaagtcaattgactataaaagcattggtctatttctggacactgttccattgatctagttgttcctcataccagtaccacactgtgggtttatagtaaatcttaaatttcagtagtgtaagttttccaactttgtcgttttccaagattgtttccacataaatttagaatcaacctgtcagtatttacaaagggcctgcgggcattttcgttaggattatgttgaatctgtatcaacattgataagtgacatcttaaatttttttttttttttcccgagacagagtcttgctctattgcccaggctggagttcagtggcatgatctcgactcattgcaacctccgcctcccgggttcaagtgattatcttgcctcagcctcccgagtagctggaattataggcgcgcaccacatgcccaactaatttttgtatttttagtagagacagggtttcaccatgttggccaggctggtctcgaactcctgaccttgtgatctgcccacctcagcatcccaaagtgctgggattacaggcgtgagccactgcaccccacctgacatcttaactttgaaacttggtggtgtttttttttttggatatggggtctcactctgccacacaggctggagtgcagtggcatgatctcagctcattgcaacctctgcttcctgggttcaagtgattctcatgtctcagccttccaagtagctgggattacaggtgtgggccactatgccctactaattgttgtatttttagtagagacgaagtttcaccatgttggccaggctgrtctcgaactcctgacctcaggtgataggtccgccttggcctcccaaaktgctgggattacaggtatgagccaccatgtccagtccttaattttgaatctttaggtccaggaacctggtgtatctctttattagggctttcatttctctcagcagtgtcttacttacagttttcatgtagaggtcctgaatgtcttttgttaaatttattctcaggcattttacggttttttgatgctattagaaatgacattgatttttaagaacaatttcattttttaagggtttgctgtcattatatagaaaatacagctgaggccgggcgcagtggctcacgcctgtaatcccaccactttgggaggctgaggtgggtggatcacaagatcaggagattgagaccatcctggctaacatggtgaaaccccgtctctgctaaaaatacaaaaaattagccgggcgtgttggcacgcgcctgtagtcccagctacttgggaggcggaggcaggagaattgcttgaactcgggaggcggaggttgcaatgagccaggatcgtgccactgcactccagcctgggtgayagagcgagactccatctcaaaaaaaaaagaaaatacagttgatttttttgtgttcactggtaccagacactttgttgaatatacattagttttactagtttttgttgatttcttagagttttctacataaacccttatgtagtttgtaaataaggagttttacattgtctttttcagattacrtgccttttatttatttatttgtattttgccttattgcactgtggtatacttctagtataatattaacctcaagttctttctggtctgaggaagaaaatgtttcatgtgtcagcatgaagtgtcagctgtgggtttttcagagatgctgtttatcaggttgaggatgtgttgccttctgtgtctagtttgctgagcctttgggttttttgtttttgtaaattatgggtattgcattgtgttcaatgatttcctacatctgtgttcatattatttttctcctttattttgataatagattgcatttttttttaatgctaaaccaaccttgcattcttagaataaaccctccctctttgtatgcctagactcaatttgttaatatgttttaaagttctgtcatgagggatattagtttgtaattttctgttcttttaatgtctttgtcaggttttggtatcaagttatgstgggcttataaaatgagttgtggagtgttcttctctactttcctaaagaataagattggtatttttgtaagatcagtattatatatttttctttttctttcttttttgagacagggtctctctcactttgtcacccaggctgagtgcactgctgcaataatggctcaacgcagcctcaaactcctgggctcaagtgatcctcctgcctcaccttctgagtggctggggttacaggtttgggccactgtgcctggccagtattactttaccagtgaaacaattttgcccctksagttttcattgtggaaatgttttcagtaatttattttatttgattagttatgagactgtgcagtttccctatgtcatttcgtgtgagtttttcggtaagttgtgttttttgaggaatttgttcatttcttttgagttgttgaaattattaacataaagttgttgaaaatatattacattatccttttgatgtctgtaggatctgtagtgatatcttttaattcctgataatttgtatatttctttttcttcatttctgccaaggaattgaattgttagttttattaatctttacgaagcagcagcttttagcattgttcattttctccattgtttgacttgttttctgtatctattttaaatgattttttaaatcattgaggcaattttttattacggggacawttctagattgctaatttagttgtcttacagccagagagcacattctgtatgatttcagttgttttcaagttagtaagacttgttttatgactaggatatgatctgtcttggagaatatttcaggtgccctttgaaaagtatatattctacagttgttgttcagtgtcatgttttgtatgttccaacttagtcaaggtggttgatggtggcattcagatcttactgtatatttactgatgtttttgtctgcttctatgagttaaggaaagtgagatgttaaactccaattatggatttatstgttcctccctttaatactgttggtttctgcttcatttattttgaagctgctattaggcatacacacatttatrgtttctatgcctttctggtgtgtttccacatttccctcgttatctctagtagtctattatcttgcagtctgttttgtcctgtgttcataccattgctctgacttactgttttcagcgaaaatctttttccattcttttcctttaagctcctttatgtttgtatttaaagtgattatttagtagacagcacgtaattgcaacttgctttttcagttcctaactctgctttttaattagattgagtttttgttgttaccttttaaatttttttaattttaatttaatttattttttctagagttgggatcttgctctgttgcccatgctggtcttaaactcctgggctcaagcartcctcccaccttagtctcctgtgtagccaggactgcaggcatacatcatggtgcttagttagccttgtgtttgaggcaagatcttgctctgtygcccaagctggagtgcagtggcacagtcacagctcactgcaacgtcaacttcctgggcttaggtgattctctcacctcagcctccggagtagctgggactacaggtgtgcacccccatggctggctacttttctgtatttttagtagagatatggtttcgccatgttgcccaggctggttcaaattctgggcctcaagtgatcctcctgccttgacctcccaaagcgctgggattacaggcgtgagccactgtgaattatatgattatatgattcacataattttaatataattatatgattgacataattgtcatataacataaaatttacccttttaaagtctatagtttagtggtttttagtatatattcacaaggttgtacaactaccaccactattcaatttcagaatgtttccatcactcaaaaaagaaacccaatacctgttggcaggcgctctctcccacctcctaatcctgtggcaacaataaatctactttccatctctatagatttgcatattctggacatttcctatcaatggaatcaatatgtggcctttcttgtctggcttctttcacttagtataatgttttcacagttaattatgttatagcatgtgtttgtattcattctttttcatgaccaaataatattccattgtgtggacctaccacactgtgttcacacagtcctctgtgatggatactttctgccatctgagccacttgggctgatcagtgcctggggcaagtggtaactcacaaatctcacaagtcaagcttctgtattctaagggtagacaactacttggtttctgcctgctttgttcatcctcttgggccttgaaatagattttaaagatatawtgttcagatttaagaattgttacctgtgggagggttagtctaaccaagctgccctgctcttaccagaagccaaaactgcccttcagtcacaggggtaggcagccaggtggttgactcagctcctctgctgggatagcgagatttctggccaaaagaacctctccgatggtgcctgggtaccactgaccttttctttttctttttttttttttcgagatggagtctcgctctgtcgcccaggctggagtgcagtggcatgatctcggctcactgcaacctctgcctcctgcgttcaagcgattctcctgcctcagcctcctgagtagctagtattacaggcacacgccaccatgcccgactaatttttgtatttttagtagagacggggtttcaccatgttggtcaggctggtctcaaactcctgacctcatgatccgcccacctcagcctcgcaaagtactgggattacaggcatgagccaccatgttggtcagtctggtctcaaactcctgtcctcatgatccgcccacctcagcctcgcaaagtactgggattacaggcatgagccaccacgtccggccaccactgactttttcattctttctcattcttcctgggccctcctgctgttgtaggcctccatgaagaagtggactattctgagaaactgaagttcagtgatgatgaagaggaggaagaagttgtgaaggacggcaggccaaagtggtaaggacccgttcctgccctatcagcatgagtgcatccctgcttagtgttgttgtgtacccagagcatttcccagtttccatagcaacctggaatggcagacagatgctgtttccactttgttttgagggtgacagctattgatgatggctgtgaaggaggggagccagggtttgcctgcaggtgtgactgtgtcctgtgcatagtcggcctcttcaccactgcatcagtgtgtccccaggtgtgttatgcagaccacgtcttcatggattgcttgtggctgtcgtgcccaaaaaggctgctgtggccaagcaagtttgggaaacctccctgggttcaacttctttttttttttttttttttttgagacaggctctcactctgtcacccaggctggagtgcggtggcatgatgtcagctcactaaaacctccatctcctgggctcagcgattctcccaccccagcttcccaaatagctaggaccacagatgcacgccagcatacccagctaatttttatctttctgctggagatggggtttgccacgttacccaggtttggtctcaaactcctgggctcaagtgatccactgtgcctggcctcaacttctttctttactccagattcctcggagccttgaacatgctaaagtacactgggggccgggcacggcggctcgtgctgttaattccagcactttgggaggccgaggcaggtggatctcttgaggtcaggagtttgagaccagcctgcccaagatggtgaaaccccgtctctactaaaagtacaaaaattaaccaggtgtggtggcgtgtgcttgtaatcccagctacttgggtggctgaggcaggagaattgcttgaacccaggaggcagaggttgcagtgagccaagattgtgccactgtacttcagcctgggcgacagagcaaaactctgtctcaaaggaaaaagaaaaaaaaaattaagtgcactggggaggtgaagaagcagaatgcatgccagctttcctgaatttatttgaccatgttaattttgtctctytttttttttttttttggatcatttccttggactagtttagttttgtttaatttcctttagaaaatactgcattgtactctcatccctctagtttttataatgttagtagcacttttaaaataataccccacaatggccaggcacggtggctcacgcctgtaatcctagcactttgggaggccaaggcgggcggatcacgaggtcaggagatcgagaccatcctggctaacacagtgaaaccccgtctctactaaaaatacaaaaaactagctgggcatggtggtaggtgcctgtagtcccagctactcgggaggctgaggcaggagaatggcatgaacccgggaggmggagcttgcagtgagccgagatcacgccacatgccactgcactccagcccgggcaacagagcgagactccacctcaaaaaaaaaaaataccccacaattagttgggcgtggtgtgcacctgtagtcctagctactcaggaggctgaggtgggaggactactggaatccagaaggtcgaggctgcagtgagccatgattgcaccactgcactccagcctgagtgacagagtaaggccctgtctcaaaaaattaatrataacaatcatacctatggttgtcataatttgtattttttgagtactagcaagtaagactttttcctttgcttcctttgtataatgcctgtttccttcacatttatcactgctttccgttaaaatgtaatgttttatattgtttagatgttaatgctttgctgttggtcttgcaaatatttttctctgttttcttgtcaataactgaatatttgtttagtcaaatctgtgagtcatctttttctttgttatttcatcctttacttaaaagcttcctaaagtaagtgcccatcttctggaaagagttggtaataatctttgctactctttttctgatgacacacaaaaaatgaaattctgtaatttcctttcatgctgtttgatttcagctgaagctttggatgcagtcgggacatacctatgggtcagttcctggaacactaagctcagaaggagctgtgatcaagaattaaaatcaaaggcaaagacataaactcttagagactgattggagcagtaggacactctgtgttccttgtctctttgaggcgatgggaactgcatattcccctgaaggaactggacattggttttggagacagttttgcccctractttgaccaagggcacttcaaaatcagagtgcccgaacgatctcctcctgaaacctgctctttttcttcatgttctctgagctggttggtgacctggtagagacttagtgcatgcatccatgtcttatttggcatctttatttcctcatacacaattggctcccaaaacttgccctgactctgtctcctcttttcattttctctggggccactgggacctcctccttttccagaccatccatgggtccaccagttcatctccatcctttcagcctgtcctccatggcccgtccttgacaccctgcccatagtcatcttctaaaaacacaggtcttttagacaggtcagcagctttactgtggtctccatttctsacaaagtcagataggaatcaccgttgtcccctctgtaattgttgtcccctctgtaattktcccctctgtaatctcctaagctatgttacctgcctcgtcttccctccctcgccacgtacgtgtgtgggtagacacacaggcccacacatctgccatccctgattcccgcttttctctgatctgcagtattaccgggcccttgyaaatgctttgccccagcaccattgcttccattgtgaggcgtccagacgagcatggcacccatccccttcttgtccagccacccctgcagctctgtttggaacacctcctccttttccatgctgtgtcggctctgcttgtctcctcttgctctttttattgtggcactgtttagtagtcatcttttgttcttttgaggggcatttattgagcaactggcttgtgcagagcatagggagggagatgtaccaaaaggagacggacacgcacctgggagtcctggttcaaatctgtgagctcctccctgtgaggggtgccccgttaaccttgatgagactcagctactgactttttaaatcaagagtgtccaatcttttggcttccctgggccacactggaagagttgtcttgagccacacataaaatacactaacactaacgatagctgataagctaaaatgaaaaagttacgaaaaaatacctcataatgtgtttttattttttttttttctgagacggagtctctctctgtttgttgcccaggctggagtgtagtgccgcgattttggctcactgcaaccttcacctctggggttcaagcacttctcccacctcagcctctagtagctgagattacaggtgcctgctaccacacctggctaatttttgtatttttagtagagacttggtttcaccatgttggcctggctgatctggaactcctgacctcaaatgatcagcccgcctcagcctcccaaagtgctaggattacaggcgtgagccactacgcccaggccctcttataatgttttaagaaagtttacgaatttgtgttgcgctgcatccagagcccagggccatcctgggccacatgtggttggacaagcttgctttaaagtgaggatcatgaggacttttttttgyatcggtgaaatagtgtgacatatcgtgcctggggctctgtttaatgagagtgacttgataaatggtggggctgaaccgtggaattcacatggaagtagtgggagtggtggtccattctaatgaagaaaatgatttggacagctgacttgggaattctcaaggcctctgaccagtgagatcagaaatgcttggcctgagtgcaaaaacttaacatcaaatgtggtttgtcctaggaacagttgggaccctaggaggcagcggcagttgtcartgagctctgcagacagtgcggacgctaagcggactcgagaggaagggaaggactgggctgaagcagtgggtgcgtcccgtgtggtccgaaaggcgccagaccctcagccaccgcccaggaagcttcatggctgggcaccaggccctgactaccaggtaccaagggcccttggctgtcctgtgtatttgtacttcattgagttgggtggctgggtttctgagaagtcctaagtgggcatttctttttcatttttatatttcttcttttgttaaaatgttttttcatagagacagggtctcactatgttgcccaggcttgtctcaaactccagctcaagtgatgccaaagtgctaggattacaggtgtgagccaccatgcccggctgttcttmctttttttaagataaggtcttgctctatccttcacctcccaccctcaagcgatcctcccacctcagcctcctgagtagctgggactacctgtgtgctgccacacctggctcatttcattcattttttgtagagacgaggtcttactatgttgcccaggctagtcttgagctcgtgggctcaagggatcctcctacctcagcctcccaaagtgctgagattataggcatgaggcactgtatttgtcttcttgttatagttaaaaaaaattaaaacagccaggcatggtggctcacacartttgcaaggctgaggcagggggattgcttgagaccaggagttcaagaccatcctggccaacacagtgaaaccctatctccaaaaaaaaaaaaaaaaaaagccaaagaaataattaaaacagcttcaaagtgatagaaaagttggaagtacattacaaacaatattttttctaaactgattgaacagtaagttgacaacctgatgagactctttacactgtggtacttgtttcctaccaagatggggacattccacccaggtaactacagttacttccaggaaattagccttgataattgattgtcrtttaatctgcaggccccattcagcttttaccagttgtcccattaatgtccttactcgaaataatccagttcagaatcacacacctctagccttctttatctggatcagttcctcagcctttccttcactttcatgactttgaggctttggaagattacaagccagtggaatgcccctcaaattgggtttatcatcatctttcttgtgaagaagtccacagtttccatccttggcagggatcttcaggcatgacctgacttttctcatttcatcccaccaaggcaaccacgacttcatcctgtccccctctggctacgtgcactttggtctcttgattaatggggtgcctgccaggtttcatgctgtagagttactcttttccctatttgtagttgataagaattttgttgggagaaactttgagactgaacatctcgtttttgatcaagcttttagtttactcatttatttacatcagtgggtgtaatctactctcacctggttggccattgggtgttccttcaggccagtgcgtgtcctttttccctgttctccatcctttttggagcccttccttcatctttcccggatgcatgacctgtcttgtcctgggtccgccctttctccatgaagtcctagttcctcttagtgaaggatgatatttagaaaccagtgtctgagacccagcaggctccttgctgctggggtgtcactgcttccgggcctcctcagcggacagttgcggggaatgtatgtaggtatatgtgtgtgcacaaatacacactttcatatttgtattatttctgtacctgtccatattggaaactgtgttctcattgatacctccagttccacagactttgttccacttcctcccagtgcatgtttgcacctcctttctgtgacagkgagaatctatctctcatcgtccctcgtatttatactcacttggtcagtctccccatgtatgaccaatctcatttctgctgccacactctctcccttgcacatatgcyctccttgcccactcagatgtcattgtccccactcctggatgccctgaatgtccctgctgggccaactctgcctatgaatgtccccctcatctagcttgggctttggccccacacctctacctgcatgccctcctccccttgcctgggctctaaccatttggagtgcagtcagccgccaggactccctggcaccaggctcctggcttgcattgccacacctagtgactctgggactggactgttgaggagtgggagggctggggaagggggagtcatgactttgaatacacttggtaaagcctgctattttcagtgctctttgctatttatttattattgtttttggagatggagtctcactctgtcgccaggctggagtgcggtggcgtaatcttggctcagtgcaacctctgcctcccgggttcaagcgattctcctgcctcagcctcccgagtagcgggattacaggcgtgcaccaccatgcctggctaacttttgtatttttagtagagacagggttttgccatgttggccaggctgatctaccctgatctacccaccttggcctcccaaagtactgggatttcaggtgtgagccactgcgcccggcctgctctttgctattgaaagggcttctattccacattcttataaaatgaaaatgcccctyagctacagtcttcttattgaatatttattgtatgccaggcacatacatatgtgctgggtacaagagatacagaagtgaaacaaaatagacacaatgccactgctcttggaaattattctgcagttaatccacattttcattcacatgttgaggttgctccgtattcctttttttttccttttcaccagtcaagaagtagtgctgatcagtattcaaaaggtttcactttaacctactcataacagcactgtaaattagctgaacatcaacagtgatgaaatctatatactaaatttatgtatccaaggcatcttctgaccaaatttctttcattctttcttttttgagacagagcctcactttgtcattcatgctggagtgcagtggtgtgctctcggctcactgcaacttctgccttccaggttcaagcagtccttctgcctcagcctcccaagtagctgggattataggcatgtgccaccacacccagctcatttttgtatttttagtagaaatggggtttcaccatgttgctttggctggtcttgaactcctgacctcaggtgatccacctacctcggcctcccaaagtgctaggattacaagcatgagccaatgcacctggcctcttctgactgaatttttaagaaaatttttaagaattctcaatttggccagccgcagtggctcacacctgtaatcccagcactttgggaggccgaggcgggtggatcacgaggtcagaagttctagaccagcctgaccaacatggtgaaaccccatctctactaaaaatacaaaaattagccaggcgtggtgccgcacgccggtattcccagctactcaggaggctgaggcaggagaattgcttgaatctgggaagcagaggttgcagtgagccgagatcatgccactgcactccagcctgggtgacagagtgagactccgtctaaaaaaaaaaaaaaaaaaaaaaaaggtctcagtgcaaattactttgcagaacatttagtctataaaatgattgctaatttcagggccttttaggaaagcacatcaaaggtcttgacggtgtacatgtgccctctgagtctattatttcctttccaggaaattatctgaaggaagtaatcagggctaggcgtgaaggctatgtgcagtggtgtattgaatcccatgggataaaggcagataggcagattttggtatgagccatgaactgatcaatacacagccgttagaaaggtatggatagaccctcaggttcgatggcaaagtgaaaggaaactgcacgcttcggttccaatgatattatataaaatgtaccttcatgcctctaaattggaagtttataatcttatgattacagtacttacctctggcttatgagaagttaatttttaggaaactccttgactacagtaaatttgttgtatatttcttttactgaagtataactcacctacaagaaaaggcctagatcctgtttccttgatttgatttttgacagctgtatacatttgtgttactagcattcaaaataggaagttctgtctttttctggtactcagatctcattagaatttcagtggccagagctcaggtgacagctgtccatcatttgtcccgttgccaggtctgcatgctgcttgacccctgcagaccagtaagaaagggtcccagtaactggcaaccagcaagaaactcagaaacggataaagaatccaaaagagattttttttaggcatgcttttttttttttttttttttcttaatgggatctagccttgtcccctggctggagtgcagtgatgtgatctcagctcactgcagcctcctgggctcaagtgatccttgccacctcagctcagtagctgggacccataagcatgtgcccatccccaactaattttcgtatttttttggggggctggggggtaaatacggggtctcaccatattgcccaggctggtctcgagctcctaggctcatgcagtcccccacgttggcccccacaaagtgtaggaattacaggcatgagctaccgtgcctttgctagacatgcttttttttttttttcccccagatggagtctcgctctgttgcccaggctggagtgcagtggcgcgatctcggctcactgcaacttctacctcccaggttcaagcgattctcctgcctcagtttcccaagtagctgggactacaggtgcactccgccatgcccagctaatttttgtatttttagtagagacggtgtttcaccatgttggccaggctggtctcgaactcctgacctcaggtgatccacccgcctcagactcccaaagtgctgggattacaggcgtgagccactgcgcccagccaacatgcttaataaagatcacttcgaagctttatgtctgacagtgaatttcattttcctagggctctttctacccaggggtttatgtattgttgtgcgggcaggagtagcagttttcgtgacccaggaatgatcagtgtgtggcttcctgttccggttcttagccttggaggcccttagcttgcatgcccatcagcagtggtgggagtgtttgtcgtgtgcgggtcgcatgttgctttgcaaacatggttttcaccttcacaatcctaagagcttcctttgttgtccccattttaaaaacaaggaagtgagatatggagagttggcacttggcctaaaccacatttcacatacagcagaggccagagcaggattcgaacccagctctgtctgccacacgcctgtgctgcctcttgaaggtgcttgaggatcttgggaggagaactgatcccaaagtgggagtggttcctgtatcccgggtcccggacccaccgccttatctcagagacattctcttggcagaagtcatcaatgggcagcatgttccggcaacagtccatcgaggacaaggaggacaagcccccaccaaggcagaagttcattcagtcagagatgtccgaggcggtggagcgagcccgaaagcgccgggaagaagaggagcgccgagcccgggaggagaggctrgccgcctgtgctgccaaactcaagcagctggaccagaagtgtaagcaggcacgaaaggcaggtgaggcccggaagcaggcagagaaggaagtgccctggtctccaagtgctgagaaggcatctccccaggaaaacggccctgctgtccacaaaggtaagagctgggccgtcttcccaccaactggaaaycctggcctgttgtcctcgtcttgttacttgcaactgccttccttcttagctagcagaacgtatggcttacaacgagatcgtattgggaagcatcagttattaagagcataggcctgggtcaaatgcctgggttctgatcctatttgaacttcttttttataatttcaacttttactttagtttcagggggtacattgtgtgatgctgagatttggggtatgaatgatcctatcacccaggtactgagcatagtacccaataggtagtttttcagccctttttccttctcccatctgaacttgttaaactagctggtgagcacctcacctctctgaagcctgtttcttcatctgtgaaatgggatgagtatgtacctgccagcacgcggaggggtgtacagcacgctccagtttctgggacattgaaaccatgcatctactcactgatgatactcatcatcgtcactattatcctcgctatccctgcctaatcaaagacacgtgtgctctaggactttaataaaaccacagatcctttaacatggaataaaaataagcccacttgcttggtagaatacattttttcctggtgttgattctaaaaggaatggatcacatggccctattttttttttgaaatggagtctctttctgtcatccaggttggagtggtgtgatctctgctcactgcaacctctgcctgccgggttcaagcgattttcccggctcagcctcctgagctgctgggattacaggcgtgtgccacgacgcccagctaatttttgtatttttagtagagacagggtttcgccatgttggccaggctggtttggaactcctggcctcaagtgatccacctggcttggcctcccaaagtgctgagattacaggcgtgagccactgtgcctgggcaacacggccctatttaagagtaatgaagcagtgctctataatgcagagtgtctcttgtagcagttttgaagaatataatcagctgttttctttataattttcttaaataaactcagatcagctcttgttaggagacaaggggatgtttgaggctctgaaagcttctcgggttagagagtcctagtgcccttctggccagggaactcatttctagtttttcttctgccctcctttcattaaaggttgagtgaggactgtgccactcttataggaaagttgcactgagcattttctgcctgtcaggcactgttttcagtatattattgtaattaattcaattcttacagaaacccttggtgaacacatggtagttattcttatttgcagatgaagaaatggccaaggagagcctgaaaaatgtgcctaggtcacacagcctttctcttgtttttgtttttttcctcttttaaaaaaatgttttttcctttatatccttgccagcaggaagtcatacacagcatttccatatgttgagttcctgctgttcagatgttggatatgtgggctgtcactgagttcatggctgttctctatcagtcctttttttttttgctggggggagatggagtcttgctctgtcacctaggctggagtgcaatggtgtgatctcactgcaacctctgcctcctgggttcaagcgattctctcacctcaacctcccatatagctgggattacaggcgagcgccaccatgcctggctaatttttgtactttctttttttctttttttttttggagacggattctcactctgtcgcccaggctggagtgcagtggcacgatctcggctcactgcaagctccacctcctgggttcatgccattctcttgcctcagcctcccaagtagctgggactacaggtgcccgccaccacgcctggctgattttttgtatttttagtagagacggggtttcactgtgttagccaggatggtctgtatctcctgacctcgtgatccatccgcctcggcctcccaaagtgctgggattacaggtgtgagccaccgcgcctgtcatttttttgtactttcaatagaaatggggtttcaccatgttggcgaggctggtcttgaactcctgacctcaagtgatccacccgcctcagcctcccaaagtgctgggattacaggtgtgagccactgcacccggccttattagtcctttttaataaaacatcttccacctgaagtcacatctcagctctgccactgaccgtgtgaccctggacgtcatctaacctcttgacccttagtgtcctagtctgtaaggtgacaacaggtgaagcctcctcacatgtgttgtggggagtccctgagcttgtgtacgtgatgcgtttggcacagggccagggttcagggacgtgactgttctagcagtggagcgtacgggccaacaggaagaagtacttgtttgtaaacacttggttggctgagcttctgtgagctcactgtgtcatttctctgctggyrtattctctaggctccccagaattccctgcccaagagacccccaccacattcccagaagaggcacccacagtgtccccagcagtggcacagagcaacagcagtgaggaagaggccagagaggctgggtcccctgcacaggagttcaagtatcagaagtcccttcctccccgattccagcgccagcagcagcaacaacagcaggtaaacagatgagatggtaaaagactgtgataaacaggcctgagtgccgagcagatgtttcccctcctcgtccccatgccccacctccaacttagaaaaaggccagaatatcccttatgtgcccccaagaccagtggggacgtcaggagttgtacctcaaaacttgtgaccttggtagatcagcccctggccattatttatttctctgagtggtggaggtccctgggaatgaatacagtctttgtggtttattgagcttgttttctaatattgttaaggaacctattcagtgctgtatgcagtgagctccatttttctagtgtgcaggctggttgttttatttcagagcagtgcaccttggacgttccttagaggacagtgtttcccaccctggggtcctcccaaggtgtaagggaggcctgtgagctgtttgaagagctgcccaagagaggcacgtcacctttgggttacagatgtaggtttgcaggtttcaagttggacagctcccttcctgatgttgctgctgaactagttgtgcatggccttggaggggtcagttatgcccctctcacccatatttcttcatgtgtaaaccaggaagaatgaatacctgcctttcagcatggcagagtgtttcatgccatatcgcctataaactattttattggtgtcaccgttattggctttttataaactttatttttatttttttataaattttaaaagggacctactttttgtcctaaagatcatgtggataatggttgtaattccacccatctctcctagtcctgatagtcttgaagcactcatcagcaatcgtgcctactagagtagtaataagtaagggaacacagtagtcaatactaaggaatagtgcattttggtgggacactgagatgatacatagacattacttagtgcacaccaaacagcaaggtgtgcagtaaattattactaatattaattgaaaatatttcaaaacgtgtgtgccatggagaaacaaaccaaggacttaaggcttttcccagtatctcacttaattacctttaaacttctcacctcagcctcttctctcctctgggcacctgggagccttccagggactgcctttaatgtgattttagagcatgggagtgtaggcgagcactgcacagttactcatgttcttggggtatagaattactgatgggggagagctctggaattacttgcgccaaacctagcagcgacaattgctctaggtaactccttggggtgcggaggaagtgatgggtaagtccttccttaagaatagaaggaattgccgggcgtggtggctcacgcctgtaatcccagcactttgggaggcagaaagatcacctgaggtcaggagtttgagaccagcctgaccaatatggtgaaaccccatctctactaaaaatacaaaaattagccaggcgtggtgccgcacacctgtaatccgagctactcaggaggctgaggtaggagaatcgcttgcacccaggaggtggaggttgcagtgagccgtggtcgcaccackgccttccagcctgggtgacagagcgagactccatctcaaaaaataaaataaaataaaataaataatagaaggaagtctgaaagcaccagggcagcctgtctggtcatattccctggagacctagggtgtagacaggaggtggagctgggagatggaggcccacagccttctctgtggactgggagagtgaatgactcaagtctcttgattgatgagctatatttattgagtgctcttaataggcactgggagtgccaacagaactgtccagggaatcagctcaggatgtgctgtagactgccaggcaggttggccgcctttttgtttgcggaatggaagggtgtgtgctggaggccgtttgggtgtcctcagagtgtgacgcagcagtgagtcctgcctcaaggccaattcagggttcctttaggaattagcgcccgaggtcactgatgggatagagcagggtctgaaatgaaccctcctgagtcaggcaagggccttgattttgaatagttactgataatttgtttacccatttgtgcaaatgttctgtatcctgagtgtggtgctgtgggcaagggtgcacagggagtctcttagggttcagtgagggttaccagcagtaaaatccatcagctgctgtgagtgcaacaaaggagcactggccattctgtgggagcagaggaccggggacctggtctcgtctgggggttacgacagactttctagaggaggatgtgtttaaactgaaaatctgcgtttagggatggagggaagaggcgcttacctaggggtcccagtgtgttcccgtggcctgaagtgcgtggcagggatatatggagcagaaagtggagggccagtcttgcgaggcaaagctagagaggcagactgggcaaagtcacacgggacccaaccctcactgtaacaccgtaggtcacgagtagcctcgtaggatttaggcgtcgggtggagagcggtggagaaccactgaaggctcttttgagctaggggttgacatattgggcgtggggtgtctgtgtgaaaagatcatcctagtcaaggatggaaaatggattgaagaggcctggagggagcagggaagggatgctggtgtattatttaacctcaggtggtagctgcagacaaggagagaagtggccaatgtccagacattctgtgggaggctgctgttcggttccaggagtgtctgatctaggtgaaaacctagcctgtctcgtgtagcacaggcacagatgagcctccattgtgataatggcatggctgtccaccagccttggacagggacctgagcttgcaagctgtaacacactgggggcttccccttgagcagctgcccatccctcccctccttggtcttctgttctaggtgggctttctgtgctgcctgctggaaagctggaagggcgtgtgttgggtggcatctctgtccctggccgcaccagcctgaccaagtctctctctctctgtgggcaggagcagctgtacaagatgcagcactggcagccggtgtaccccccgccgtcccacccccagcgcaccttttacccacaccacccccagatgttgggcttcgatcccaggtggatgatgatgccttcctacatggacccacgyatcacgcccactcggaccccggtggacttctacccctccgccctgcatccctcaggtaagcactgtggtctgacggtccatacctgtatcacccaggatagcgtggtggtcaagggtgtcctctcgagttaaacagatacacctggattttggtctggctctttgtcaagtacacaactggtctgagtttcaaagtagtcacttgcaaagtgtaggtacaataatagttctgtcataaagatttgttgggaaagtcatgaagatcgtgtatcataaattgctttaattaattttagatttctgctatgtcgttttgtccttcttctcattcttaatgttctttgtgctgtctcttttttctttgattagtctttcccaaggtttgtctagtgcctttttaaaatcagtatttgggcttcttcattcctctaacttatttgggttttattttaataatgcctgctttttcttttcttatttcctttaaaatattatcatatacttagtttattaatttttggcttttaagattctctttgcagtactaatttctaatgtagttgctctgtggtcagataatatggtctgtgtgatacagaccaggggtcagcaaacttctactaatgaccagatagtaagtcttttaggccttgatcagctagtcagttttggtgttgtaggacaaaaacagccataaacaatagtaattgagtgaacatggttgtttttccataaaacgttacttgtaaaaactggcagcaggctgagttttgtttaatggctgtagtttgctgaccaactcctgacttaggttgcttgacatttgttgggttttctctgtagcctcttccatggcaattcttttttaacattctacatttgcctgaaaagactgtattctctggttggagatagtccattaagttgagcatgctaattgtgttgtgcaaatgtcttcatcattgcaagtttttatccctttgaccagttactaaaaggtgttttaaaatgtcccactatgatgatggatttgtcaaatcttctttgggagcctgtcagtttttgctttgtctatctggaggcatacaggtttagaatttctgtatcttgttccttttatccttatgtagtacctttgttgtcattaatagtgctttctatctttattgcctactttgatagcaatataataattatagttttctgttgataagtatttgaagtcttttgttccaatttttactgttagcctctttgagcccttatgttttgggagtgtatctttgtatctacaagatgtgtatagctttaccactctgaaagtctatgacttttaattgcaaaagttggtccttttagatttattgggatgatgattattattattattatttgagayagagtcttgctctgtcatgcaggttggagtgcagtggtgcaatttcaactcactgcaacctccgcctcccgggttcaagcgattcttctgcctcagcctcccaagtagctgggattacaggcgcccaccaccacgcccaactaatttttttttttttttttttttttgagacagagtcttgctctgtcacccaggctggagtgcagtggtgtgatctcggcctactgcaacctccacctcccgggttcaagcgattctcctgcctcagcctcctgagtagctgagattacaggcacctgccaccatgcctggctgatttttttgtatttttagtagagacggggtttcactatgttggtcaggctggtctcgaactcctgacctcaagtggtctacctgccttggcctcccaaagtgctggggttacaggcatgagccaccatgcccagccttattgggattattatatttagatattccaactatgatatttcatgcattccattcttattcttctctttctgtgccttttcttctaattcctgccttttcttggtcctrttgtttttcttttgcttctacatttcatttctatatgttagtggttacrtgaaaattctaacatgcaccttcaacttagcaaagcatttggggaggtagaaatctgaagtctctgtcccttaaacctccatgaaagtaagcatgtgagtctgaatycctgggagggggacaattgtttccctgccctggtccaggccagacagacccgccagtctgttcctggtagtaaagcgcatgtgtctatctaatgtgccttttgaggatgtggcccttttgggtctttgttttaaacaatgtctcagttgtatctccctgccctgtatagaaaggcttcatcccctgtcctgagtgttaaggaccaagcctatatctgacaaatgtgcttttcttgcccccttccttggacaggtctttgaaccaggcagggtgcatgtgtgtgtgccttcaraggtcctcaggtcaggaaagattaagagccctatgatgtgtaggtgggtggggtgctgtatccacatgaaagtcagggtaactrttaacttctttggcctttggttgaccctgagattggagcagggctttctaaatgagatgatgtagatcagtctttgccttcttcaggactgatgaagcccatgatgccccaggagtccctcaatgggacaggctgtcgctctgaggatcagaactgtgtgcccccactccaagaaagaaaagtgacccccatcgactcaccccctgtgtggagcccagagggctacatggcactgcagagcaagggctacccgctcccgcacccgargtcgagtgacaccttggctatggacatgcgtgtcaggtgagatgaagcctggtcctgctgccttgccactgaaggargactccaggtcctaattgagagggccctgggatgagctaccatcctaggagacactgcccacgggagacgtgctccttgaagggactcctggttcctctggggaaggagagtgtgaggaggattgcttgaatgctttgtccaagaggctcttttcagatggtgagacgtaaggtgaaggagaagtcccggggtcctcaaatcctgggcacagggcaggcgggtgggggcttcacaaggcaggtggggtccagagcatgggtcttggctcatttctgtggaagtaaacagagttagccctgccacccccatagccccagactcttcacggcctcccaggctccagcttgctcttgctctttgacccggaggattgcctggctcctctgtctccagggggcacaccgtacccagcctgcggccacgacagtcttcactctcatggactccaggggccaccgaccaattcatggcctggcatttctgagacgtgtttaaagatagaacaaatgttgatgcttatgtttttttttggttgttgttttttgttttgtttttctagctttctttttaaaaagtgtttttgtttttgtttttgttttttctttttaaaactaagctctgtgttcagcatggaaaccaggaaccaggctccaatcgcattgactgatttttctggttccttttcaggaatgaaagctctttctctgcctcactcggaagggcagggggcgtaagtgctcagcgcgatctctttgaggagagaggggaggagtacttgagtgcttttgacaagaaggcccaagcagactttgacagctgtatctcttctcaaagaataggccaggagcttttgtttccaccccaagaaaatgttcaggatgcaggtgctcctgggggtcacacccaaaacctcaggtgttccccattggagcctgactttgtcccagatgagaaaaagccagartgtggcagttgggatgttagccaccagccagagaccgctgacacagcccatggtgttgagcgggagacaccccgggaggggacggcctttaacatctcctcctgggacaagaaygggagccccaacaaacagccatcctcggagcctgaatggactcccgagccccggagctccagcagccagcacccggagcagacgggcaggasccggaggtcgggacccatcaagaaaccagtcctgaaagccctcaaggtggaagacaaggagaaggagcttgagaagattaagcaggagctaggggaggagagtacccggctggccaaggagaaggagcagagccycacggcagaaaaggatgaggacgaagagaacgatgcctctctggccaactcctccaccaccactttggaggacaaaggccctggccatgccacttttggccgcgaggccaccaaatttgaagaggaggagaaacctgacaaggcctgggaagccagacccccacgagagtccagcgatgttccccccaygaagagaaataactggatctttattgatgaggagcaagcctttggggtcagaggacaggcccggggccggggccgtggtttcagagagttcacttttcgtggtcggcctgctggcggaaatgggagcggcctctgtggtgggggggtcctgggggcccgcagcatctactgcagcagtcagcgcagcggccgtggccggggcctgcgagagtttgcgcggccagaggactgccccagagccaagccccgacggagagttgccagtgagacccatagcgagggctcagagtatgaagaacttcccaagcgccgccggcagaggggctccgagaacgggaatgaaggctcgctcctggagagggaggagagcaccttgaagaagggcgactgcagagattcttggcggtccaacaagggktgctctgaggaccacagcggtctagatgccaagagccgaggccctcgggcctttgggcgagccctccctccccggctgagcaattgcgggtatggacggagaaccttcrtctccaaagagtcaccccactggcagagcaaaagtccaggcagctcttggcaggaatatggcccttccgacacatgcggatcccggcgacctacagacagagactatgtcccagattcctacagacaccctgacgcatttggtggccggggctttgaggacagccgcgyggaggacaagagatccttcttccaagatgaacacgtggcagattctgaaaatgcagagaaccggcccttcaggagaaggcgccccccrcgccaagataagccccctcgattccggcgcctccggcaagagcgggagtccctgggcctgtggggaccygaggaggagccccacctgctggcaggtcagtggccaggcaggcccaaactgtgttctggggacaagagtggcactgtgggccgcaggtcccctgagctctcctaccagaactcctccgatcacgccaatgaggagtgggagacggcctccgaaagcagcgacttcagcgagcggcgggagcggcgggaaggccctgggtccgagcccgactcccaggtggatggtggcctgtcgggggctagtttgggtgagaagaaggagctggccaaraggagcttctccagtcagagacccgtggttgacagacagagccgaaagctggagccgggagggtttggggagaagcccgttaggccaggtggtggtgacacctcccctcgctatgagagccaacagaatgggacgcctttgaaagtgaaaaggtaaaaccagacaccatctgggccctttttgttgttgtgttctgttctcagcagcactgagttcacgcatgcatgccgatgccgccgtgtgtcggggctgggggcctgcccccaggccgtctgtgcgcgtctccattgcctgcccccacattgcctgtctgcttctcgtggtggtgttattgtggctagagctcccacccccacccccaccccagtggtgctcttgaggccactgtccagcacctgacctgagagtccagtcatgtgtccctggagccccgccgaggggccgctgcagcgaggaacgttgcctgtgcacagtgccaggtgccggtcagtccaccagagtcctctgctccggagttgctgccaggcggcgtcctagggggcatcgctggcctcgtggctgcatggaagtggctcttcctaggtggttctgcttctccactgtgaggagacgtggccccacggtggggttgccacctcagcatggcaggagcccagcaaacgcagaggggagcaggctgcacatggtctggcgagcacctcttccacagccagagrcattcgggtgatgacctctgctcagggaccaggagagggtcccctgcacagtctgggttgactgactgcacttggcttgtgcctcggacagggaggtgcaggggctgctgaggccttccctgtcctcagcatactgaggaagatggcttcacacctccactctccttagaattcaaggcagagaaactcccagagaaggagccacagggaacaccgactctttcaggtggcatctaatccagctttccaggcgccagaggctgacccttggcttcacctcagttttctgccccaagggccctccggcagggcagtcctggagaggagcagaaatgctggcgtctccattctgagcatattccccttgtctctctcccccctacactctgaacatagcatgtgggagagccctggggagccactttccccaggagcaggcagagccggtgggggcagccttacacgtatgtttgcacacggacatggatgcaccgtggccagcctgccgctcctccccacccgaggagtcagctagaggaagtgggcctagatcagggtgccgggcttgtgtgcaggctgtgtgcacgtgcggtgttttccctccttscccagctctggttaacaagatcctctttcccttacagatccccagacraggccttgcctggaggtcttagtggctgcagcagtgggagtggccactccccctatgccctggagcgggcagcccatgccagtgctgaccttcccgaagcctccagtaaaaaggcagagaaggaggccaagttggctgctccgagggcaggtgaacagggagaggccatgaaacagtttgacctgaactatggaagtaagtcatcctcatatcttcaggggaaagaactcaggcagaaccaggggccatgcagtcctcgggcctcccgagtttgcccttgcactgagtaccttagctttcggaacagctcggccaggccctgggctgggttctggggctgtagaggtgagcagagtaggtaggattcccacygagtgttgctcacagcccgttgaatccccgtgacaccctgcagcttccgggctttaaagagaggaagcctggggcccagagacgttcggtggtgtgtccgaggtcacacagctgtaggagcagagctggggtttaagctctttgcgtgttctctcagttgtgcccttgggcctctttggtttggggtaacaatgtgttagatcagaggyggcctgagaaaagtgcggaagtcctgtccaggtttctgtcgagcctgatgctagatctcaggcgcctgttgaattgggttgttcttgtctcctggtgagtggaaagactgttccttctcgtgaaatcttggttcaggtgccatcattgaaaattgcgggtccagccccggggaggagagtgaggtgggttctatggtgggcgaaggcttcatcgaagtcctgaccaagaagcagcgccgcctgctggaggaagagagaagaaagaaggagcaggccgtgcaggtgaggggcggagggtgggggggcatggggctggagggcaggctggcagatgcccaggaaacccagagccagagggtaagggagttctcggtcaagctcaaggtggcagagaggaagaaaggagtatttagcaagcacacattgtctccccgttcctgctattaccaaggcccttctatcaatgtaggaataggtggtggcatcactgttatgcagtggaagaaaccgagtcttgaagagggtgacttctctagggtgataacagtggaaacttgtccaaggcaagatgcagacctccgtcacctcccagcttctccttcctccccactcctcattcctgagtggaatgagatttgtctccctcaagtcaagtggatcgtgaacgctatactaaaatggagtcagggctggacctgcacacagattacagtccgttggcctttcaggtctttcttggggggtgctttgcttggcatygcagttctgcttgaggttttgggagacgagcgttccacacatctctggagcattttcaggtggtgtgatttttggtacctgggatacttatcctggggagaatttgtcagtcttggtgcctttggctagactacagcatcctttcttcccctcaggtgcctgtcaaaggtcgaggcctttcctcccgtattcctcctcgatttgcaaaaaagcagaacaacttatgtctggagcaaggtgacgtgaccgtgcctggcagcagcctgggcactgagatctgggagagcagcagccagggtgagagttggggrtgtgaccccagctgtggcacccaaggtcacatcacacactgggtttgcttctggggaggatcctgcttttgagctacgaatatagatggaatacagatggagtacctgtttgctgtgttccgctgctgagctagtcgctgaatgccgtctgagtgatttgctgctgcaacccccaaacggatacacaattttccttgcctaaaatttggtagaagagcagagcattcattagtctggtgatctggaaaaggatggccccttgggcttagatcacacagtagtgggaatggccttctttgttggtcgtcgttttctcccactaacttatggaagagaagcaaatgacagatagaccagccgcaagagttcaggagctctcttctgtgctgtgcacccttttcttaacatggggaaggctctggaaacccctccctgaatgctcttctggaaaggcaaactgagaccagaagacggtatacgttacttcttagaacatttgttgccctgaaaactttttttttttaattctatatcaaatgtaatttttctgggaatttttccttataaaatagaaaactattttcatagaataggttcttcttgaggtttaggtgaggcagggccctgtgctgttagcccagagcatgcatagatgaataaaaacatggacattcgatatttcacagctcaggcccatgaggggagcttggagaggtcacctagtgccagctcatttttctgcaaagcagctgaagcttctagagggaagggacttgactcagggactccagggtcataggacaagcacccgagacactgagttctgggccttgattctttcactgtttccacatagcttgtcctcatgtgctcggtgaaaactttggttcttgcaaactacaaaataacattcaacatgcccagctttgatggaaaggaagcacaaccatttgataaaacatcaataacactacatttggtagtggctgagtgacaggtgtcatagtattggtgtccaaaaatgcccaggtgccagattggttgagctgccaggtgtgaatcagatgtgactctcaggtgtgagtcatcatccccttttgtcagatcttttactccagaattctgcaggggctcattggtttctcagaccaggggttgtgtccaagggatggcttcagagagcccttggatattaaaatagcatgtgaaaggattttttttttttttaaagatggggtctcactatgttgcccaggctggacttgaacccctgggttcaagcaatccttctgcctcagcctcctgagtagctgggattgcagatatgtgcccccaccccctgctagcatgtcaacttttgcatgcatatctatttttctgggctccggatccatggccattcaaaaagtggtctgtgagcttaaaaatttttagtaatacccgctgggatctttcaaagactctgtagaagccaccaactttggccaggagtggtggctcacacctataatcccagcagtttgggaggccaaggcttgaagatcacttgagatcaggagttcaagaccagcaacagagtgagaccctgtctctattgtttaaaaaaaaaagaaggccaggcctggtggctcacgtctgtaatcccaccactttgggaggctgaggcaggcagatcaccaggtcaggagatcgagaccatcctggctaacatggtgaaaccccgtcgctactaaaaatacaacaacaacaaaaaattagccgggcgtggtggcgggcacctatagtcccagctattcgggaggctgaggcaggagaatggcgtgaacccgggaggcagagcttggcagtgagtggagatcgcgccactgcactccagcctgggcgacagagcaagactccgtctccaaaaaaaaaaaaaaaaaaaaaagaaagatatattttttaatgtaaaaaaagagaagctaccaacttttagaaatagtataagtgaaaagaagcatgagcatagcggaaataacgacagagaatccagattggcaggagtgagggctctgccctgctcactctctcctgtaatccatgagatgttgagaaacacgttgggtgaggatgtggaaagttgggtaaggctgtcagaccagctcttccacgtcagagccgttcactgggtgtcacgggtagggggctggggtggcgggtgcaggggaggcaggggagttggatttctgcaagctgtgcctgtgcttgttctttaagagctcataaactctctagacgggttgctctttgatgccctgactctgtcttcctcccctggcagctctccctgtgcaggccccagccaacgactcctggaggaaagctgtcactgccttcagcagcaccgagactggctctgcggaggtgagtgtggccgctgcccacatgctgcccctgggatgagtgtgtgagtgtgtgctcaccatccacacggccagcttgctgtggcccacccaagcccctgccacagcagctgagcttggaattaggttgtttccatggggccaagctcatcagtggttttccatcttgatttctggcctgtgcatggggcgtgcatgagcaggagaaagagaaaaggggtaacaagggaggacccaacgctgggtgggaagagggattcagggcctcctctgaactggtgtcagcagccacgtagtctggtttgggtcacaagtgagatgggtttggcagcctcggtctggggcccatagaagatcctgtggtcacgagctctatcggggttggtgtgtttggccacacgtaagttgtcaggcatcctcagcagggcaggatcaagatcaggaccagacttggcaagggacaggcagctggggtagaaaagtctctgtgccacatgcagttttactctctggataatcgagttgggagtttgaggctataacccattttgtgctctgcacagcagggttttaagagcagccagggagatagtggcgttgacttgagtgccgagtctcgggagtcgtctgcgacctcctcgcagcgcagctccccatatgggactctgaagccagaggagatgagcgggcccggcctggcggaacccaaggccgacagccacaaggagcaggctccaaagccatctgagcagaaggtaacctggacgttccagtcacagtggccagggcctgggtggaaggggccatcgtctcatcatcttcctcaattcctgggacagtagaagctagagagtgtggtcattccagtctgtgtgtctccacctctctgcttttttatcaaggattcagaacarggctctggacagagcaaggagcacagaccaggacccatcggcaacgagcgttctctgaaaaacagaaagggctcggagggggcsgagcggctgcaaggggctgtcgtcccgcctgttaacggggtggagattcacgtggactccgtgctgcctgtgccacccattgaatttggagtcagtccaaaagtgaggctttgatttgttttcttgcttgctttttttactttttattttggtacttggagaggctgggggctcagatgggattgtctcctagaaggaatagaaggatgggagccaagcagtcttccagcggctagagtgttggtgtggagtcctgcacatggccagtgctctgttgagttgctttaaagattgcttcactgacaccagacaggccagtgatcttccctgtttctgtcaggccacccaagggacagggagaaagaagtgaggctggcgtcctgtctyctgtgccgtggggaaaatctggccatctcgctcatatgtggctccagtgaatgctgctcagtggagtttttgagtcgsggaaactgcatcacgttaatgtatgcctctggggaatgtagggccaggaggatctcagtggrctgtgtggccttttttattttttcaggactccgatttcagcttgccacctggttctgcctctggtcctactgggagtccagttgttaaacttcaggatgccttggccagtaatgtaagtccacacttccacttttggctccactcactgcttggggctggcaggccctgggtgaaggagacagcacatgtatttcaggctgacctgggctggcacgtgactcagttgctagcagctccatgtccttaaaaggtgcttaaatgttcctgcccaggttttgtraccttccagtggggatcatacagttcctaagggctggtttatttggctctctttggttccattgtctcctctgtgccaggtgcgagcccagactcaggctgccttttctgtggccaggggtaaggggcacagattgagtaggagagccctcctcaggaggccccatctcaccatccaagggtccctgccgcctgcaatctaactgttgtgatccagaagacctgctggcgctctaccatgggctcaggagctggcagttgcatctgttgtggccactcggggctgcagctgaggctgtcgcagtgacatctggttcactgctctgtcctcaccacctgcaggggtgggtgctagtgcatatgctgaatgaacgagtatcatttgggcagcgtttcccagaggattccaaggaatgtgagtgctgtacaatattcataggtgttgaatgaaaacaatgttttggaagtgctgggctctacgaggttctttactcgagagtctgcggtctctgtcacatgcagatggacaccggggatctgcaggaagcgggggcactgttgcatttccagcctctgttaccagagccctctttttcagtttgctgaggggcacagccttccctgtctggcccagggcatctccaggccaggtggcaggtgccttctgaaccagatgtttgtgtgcgggctgccagtccatatttatactgccgggacatggctctccctgtctggagggcactatggagtgtggatatgggggtggctctctgcagacttgtgtggaggaaactgatggaggcagccatctccaggagatcagtcatggtcctggctgccatcagtttcatctgggtggtcttgggtacatgtggccaatactgaagatgcatttggacaattcatagacacggagctstaggtgcttttgggaaaagccatggatgggtttgggcaagtcatagatacatttggacgagccttgagtgtgttcaggagagccatggatgggtttkggcaaagccatctctgcacctgtttgtgttccatggtttccttttcctcctctccaggcagggttaacacagagtatccccatcctgcggcgggaccatcacatccagagggccatcggtctctccccaatgtccttccccaccgccgaccttactctgaaggtaacaccagccctgagctgggtgagggcccacccagtaccttagcttacaaagaggcagaagggaggagtccccgaacccctaaascttagattggctctgtccactgccagcgtgatagtaattttcatccctccccctccccttgcttctgaagatggagtctgcgcgcaaggcttgggaaaactcccccagtttgccggagcagagctctccaggcggcgctggctcaggcatccagcctccatcctctgtgggtgcctccagcggggtcaactacagctccttcggtggagtgtccatgccacccatgcctgtggcctctgtagcaccttctgcttctatgccaggtatctcatcccctgagcaaggccttggggtccttctccatttattatcaagaaaaacggattaacagccccgaatgtcacctcctggccttgtcttaagtagcatgtagaagtagcaacttgtttttaggcccagtggtcgtagctcccatgtgctgcaggtaatgtgcacgtcctgcttccccacgctgggaaacagaactgggggataacagcgaggcactcctgcctactggtgacaggagcgagcaaaggcttgactttgagtcagacctgggtcatgtgctggagccgtgtcrcctcggctggtgagcagctcttgccgagccacagtgtcctctcctctcttacatgaaactccgtggggtggccacacccgtgaggccaggtcttacctggaaagggctttgtatcaacagagccctcagtcactggcagctacttttgtcctgattgctgccatccttatcgtgtgccagtgtccccaaggggaagcgtgggggttttgagggcccagctgccagtctcagtgatgtaattccaatagatccttctgaccctccactgtggactcaatagcagggagatgaagaggacagtgactgagagaccaaggcagccctggttaaagtagaatgccccttcgagtgtctggggtagttggtgagtgggaggtgggaagggtaggccagagcccacctgcctcctccctcctcctaggtctgacgctgcaccctccctacgttccctgaggtgcgtgccaggcgtgttgtgagcaggcgtgtgcttcmggcacacagggaacctagcagcctctgtacacacgccctcgtccccactgagtcccctgggtagagcagacctgtagactgtttccctcagggacattgagaagtagtgaggcttgatcctctwctacgtcccttttgccgctctgtttccaggcagccacctcccgcccctgtacctggatggccatgtgtttgcaagtcagccccggctggttcctcaaacgatacctcagcagcagagttaccaacaggtgacagcagcwagccaggtggcctggctgggggtggtggggaggagccagtgcaggrcggaattggcttgctcatctatttctcattgtctgtctggttttccatccccctcacatgtggtgaccagcacctggcccgccacggcagccaggaggcatttgttaagcgaataatcsagacagggaagaggagtggagttggctgctccagactctgcttagttttcctttctcaaagttctccctcctgtgtcctagccggggaattagctaaaatggaattttctttggtgatcaggtatccttctgatgaagagaagaaaggcctaaactcccaggcatggatgcattagaaagaggtagtcttagaaatgagcaggcgttggttatttatgcaggactggcatactttttctgtgctgccaaggggtgatttttggaagtctcccctctaatgctggtgctgggcctttgggatggtctagccgcccctcagacccatgtgcctccacagccacgacagtggacttccaggcagaatctgctccaagtgcaggcttgctgatggaggatgtggcctctgctgacctctttttaaaaacatgttcttaactgctgtattgtttggttaccaagattttggttcttgcataactgggtcagactgcatgtatctttctttttgtgcattgttaaattcagcgttatgtttttggaactcacctctgttgacgtacgtgctaggatccatttttgttgctgtgtagaattccagggtagggatatgctgtggtttggggttgctaccagtttttcattataggctttatcccaatagcaagggaagcccaggaatgacatgctggcatttgaattttgggcagtgttccagcagccatgtggagaggggcaggggaggtgggaggggaagaaccacctggatgggccttgcggttacctccccgacccygttttcccgttcacaggccgccgctgcccagcagatcccgatctcccttcacacatctctgcaggcacaagctcagcttggactgaggggtgggcttcctgtgtcccagtcccaggagatcttcagctccttgcagcccttcaggtgagctcatgtaccagcttgcggagctggcagctcacagccagggccttggccctgtgtgcagccttcgtcctgcagctgtttggtgcttgtctgctttggggccagtggggcggggaggggtgggagtttgctctgaatcactcttcagtccgttgttaactgtgctctaggagaggcctggggcgagctgataygtggtgggccgtgttttgcttttccatgtcatcttgcctcctttccttgctccttcctcctcctctccccttgactccctgtctcctccccaccgcgggcttctccgtcagtgtggctgccagtcattgtggctgatgtcctgtgcctcgtacagcctggatgtcttcacttgtttaatccagcagcatcagcgccatctaggagcttgttctcaggccccatcctggaccctctgagtcgcgctctgggggtggggccggggatctgtggtttagcaagctctccggggatctctgaagggtgggaccagatccgcagctggactcatccacctgatcccgaccatctgtctggcttttgcagatctcaggtgtacatgcaccccagcctgtcaccgcccagcaccatgatcctctctgggggcacagccttgaagcctccatactcggcgttcccaggcatgcagcccttggagatggtgaagccgcagtctggctcaccctaccagcccatgagcgggaaccaagccctggtctacgagggccagctcagccaggctgctggcctgggtgcctcccagatgttggactcccagctcccacaggtcaggaattcagtcactctacccaaagccctaggcttctttccttcacgaccttgccttttcttttcacccgcctctcagtgtgtgctggcctatcgtgctgttggttggtagccaccgtgcccattcctcagcgtgcaggaaatcagcctcttctgagtagccccatcaccttttttttttttttggacagagtctcgctctgttgcctaggctggagtgcagtggcatgatctcggctcactacaacctctgtctcccacattcaggcgatgctcctgcctcagcctcctgagtagctgggactacaagtgtgtgccactgtgcctggctaatttttgtattagtagagatggggtttcaccatgttggccaggctggtctcgaacccctgacctcaaagtgatctgcccgccttggcctcccaaagggctgggatgacaggcgtgagccaccacccctggcccctcatccatctctttattcttgagacctggctgtcccctaagcactgcctgctcctgcagcccccagacgggggctccttcctttctccctgcccttgtgcagtagggtgtggaatgggttaagagtcctctttgtgtagttgttgatgcttctagactcctcttcttccttcctccctgaaacgccagctttgaagcccacaccatagactgtgcctgacaagcccttcactctgctatggtgccatcaccacatccagtgtctgctgagaaatcttcctctccgtcaacctgtgggcagtatttggcacctttgaaggtcaccctccttgtctggtctggcttgcagtctgtctccactctcctgttccagttcctagtggttttgatgtctgcagagatgaccccgggtctctgtgccatggaccctgtccatgcagtttgtgccctcctcgccactggtgcccttgttcacatgggcccctgctctgtgcactcctgtctaggcttggctgctcccagtagctgtggctctcgcataatctcaactctcagtgtccctctcagttgtcacctctggctttttcaattcactccctctagtgacccaactccaaaattcttttttttttttttttttgagatggagtttcgctctgttgcccaggctggagtgcagtggcgcaatctcggctcactgcaacctctctgtctcctgggttcaagcaattatcgtgcctcagcctcccgagtagctgggattacaggcgcccaccacccaccggctaatttttgtatttttagtagagatgggggtttcaccatgtcaggctgatctcgaactgctgacctcagtgagccacccaccttggcctcccaaagtgctgggattacaggtgttagccaccacacccagtctctgccacccatgtttttgtcatcctcccccttggcctggcttcttcctccccatcagcagatctgccgagccacatggcctttgcatttcatccaagctgtggctcccagtcaacccccaccctcctagcagcttttcagacttgcatcttgcccctcgctgcctcccacccatgacctccctttctgtgtcacccaggaaacaggagcagtgacagtctccaagcccctgtggccacatccctgcctaggtgctgcctgtgcccctggggggccctgccccagcacatctccctctctttcatgcatcagatatcccttcccrtcagtacacagacgagctgcagtgctgaccccgtaatcccgccccccacacccctcgaaccactttcttcacccagtttccaggccgtcgctcctggctttcctgctgcctcaggcctcctcctcagtctcctttgctgtcccctctccttcccagtctgtaatggtcagcatgcccgtgggccctgctttgggtgtgtttcaagagtcatggctctaaattccttcatcttctcctcactcccaaatggacatctttagctcagatctgtccctggaattgaatctcaaatccaatggactttccagcatgtctgctatggtgtcttatggcatctcaagactcatcatattcaaaactcgattttcctcccggtccttctgcttgtccagtccacatcctccttggctccctgctccccctcacctcacccccttacccttcagcaggcctgtcagctctggctttaaaaggattcagaatccagctgtgtctcatcccctccacacccctgcatgctgtccagctcctgtagggactcctacctggcctccctgcaagtcagatcataccccaagtcagcactctataaatggcagcatsttcccatcattttcatcctgcaccattttggtgctccaaggaggagcatggtgttttgcggctctggccaccacaagtctcagtgatgtaattccaatagatccttctgaccctccactgtggactcaatagcagggagatgaagaggacagtgactgagagaccaaaagtggcccagcccccctaccccatcctgttcccctgtccttacagtctctgggcccacatccccacctcgcatatcttgttctagttagttaggccctgcagctaccctgttctcctgtcagcatgcttcaaaggacccccacagtctggaatccagcccagtcttgtttttaccaccacttgatgcaaaacagtaagagtcttgaacgtgtgtgctgtacaaaggaatgcagagatatacgtccgatgcagctttcatcttttgggacttggcttsgccattacttctgactttcctcactcgtcctctccttgcccaccccgccccgtgtgcacccataaatctggtgtgcacccacagatcctatgccgctctgcatcccgagtgtcctgcagctgtgtccagtgtgtgacacactatcctggcagtgtgcaggcccatgttggacagggccctgccgcttccttggcaccttgtatgctttcagtaagcacttgctggacaaaggcagaaagggctgaagatagacgcagcccttagcagagatgtggatgagacacacttaacgctgttagttcccatgcctgcagccagcttagtcttgcccgttttctcaccacctactctattccagcaagaagacgtgcctctgccatcgaaggtgtgaaatcctgggcgatctctcctgtgctgcagtagaaattagagcatgtcctgctttatgcaggctttgctttagttcttctgaagtgtatgaatctgaagtgcatgtgcggtcgctctttggtgcgtttggggtttctccatagcatcattccccctcctgactgtcattgtcgcccagcagctgaccatgccactgcctcggtacggctccgggcagcagccactgatcctgccccagtctattcagctgccacctgggcagagcctctccgttggggccccccgaaggattcctccgcccgggtcccagccgccagtcctgaacaccagcagagaggtaaggggaccccatctgcctctgaccctagggagggggccttgtgtmaccaactttttctagcaagctaagtacccctgtgtggtagaaagagccagtggcgtgggactgccagggcagaaaggaaggtgaccatgtgtggggccatcacagaggcaggtcctggggactctgaacatgtcgagggctgagggccaggaatcagcattcctccccagctccccaggaggccctgctatggacggccatgtttcattggctctcccacttcactttaaaaagaacaaaatattgtgatggttcttgcttctaagaagaagccctcttgagtctggcttagagggaaagggcttgcagatttctctagaacaggggtccccagtccccgggctgcagagctgtactggtctgtgggaaaattgtcttccatgaaactgggccctggtgccaaaaaccactgctctataagatgcctccctgggaattcccatggccctcaccacctctgccctgggttgttcagtaagtgtgtggtccagctgtctccagggcctcaaatgacagcttgttcctgcttggtctctctagccctctcagatggagatgaaaggcttccactttgccgacagtaaacagaatgtcccttcaggaggccccgtgccatcgccacagacctacaggtaaagccactccctggggactgcgtgctgtgtagctgagcagttgccagagctgcggcccagtgactcagaagaatctgggcccagggagagcckccagagacctggtccctctatgggccatgtgtcactgtggtgtttcagcactgggatgcacttgtgttccagttaaatttgggggagtgaggagtcaggagagtggttttggttttaatcattataataagatgctctggattggggagctttctggaaaggtaggaaaaggaacggctgacatttagtaggcatcaggactgacgtgacttcccattagatcctaaaaacaggacccactggccacagggctgcatcctggcaaggggaggagcgtggcctttcccagcgtctctttcctcagacttgccctatgacccctgccaggggactttttattgctgggcttatggggccattccttccatgctacaaaccagcaccctctttttgcttcctttgtgtctgtctccacctccagcaactgtctcaggtccccttagctggatactcaggtggctctgtcggatgttggcgagagcctctggtccactgccttttctgcccgtgctggtgtgtgaaggcagcacgctctggccctgggctccgagggcttgtacagtccacccttgttacatgtgggagattcctgagacccctctgtgtttacaaatgagtgaaacagacctgcctgacccatggtgccctgtgaggttaacaccatcgctgcagacgccatgaggtatccccacgactacacaggtacttgtgggcctgaggagcgctctgcaagccgggcccccatggtctgcaagttgctccagctgcaycccctctgcctygctgccctccctctgccctttgcctgtcctccatcacagcattccactcttgtaccttcatttccagagaaaggggtttttgtagattttcctcccattccatcttttctgttcttattttcactctcctggcttcatttatttctgtttttagtacgtttcgttttcctaccatgtctgtcacatagaccaaaacatcaggactgtgtgaaaaagatagctggacagcaccgaccatggagcggaactggaaggaggaaggcggctgcaggtctcagcagacgctgtcccgctgctgccacaggcagattccagcagcctctggctacagagccttcctcaaaaagcaaaacccagagacagagcctcacgggacaagagtcgcctgtgtctatgtagttgtaggaatgaatggcagcagattattctttggagcatatttagaaagtggaagccttaaactagtagctttgtttctatggtgttttaggggggttggggaaattgctataattgtataaagcagtgtttgccaaagtgttctggaaatagagctgctgagatgtgcgctgcaaaaacaagggttccctggtcaggtccttgggggagtgctgtccccagggtggcctgctggggagggtactcaccacacaggctgagcgggcctaggttgagagtcctgttgaactctgcacacggcacttaggctttttgaccgcagacgttttttttttccacgtagcacctaattaacatccctgggaactaactagtggtcagtggaacacatttagaagcatgttgtacattttggttcccccatccccttttctgaaaagtgaagactagaacaatactcggcacagttctggctcagcgtcaggcttctaggccttttgtctggggcactgcatcgtgttggtccagaccctgagacggccagtgtcgctttctgcacagcaggacagccatgcccatctgtacagggcctcagcctccctctcttgcggtgcgtctccttgagctctgtcctggaggtgccagggtggtcagtgacagccaccccctcacccttctgcgttctgggctgtcttaggtctgtggttgttttccatccaagagatccacggaccgtcccgagtgagcgcctctggccgcaggcccttccttccttgtgcctcctccatgtgctaggctttgactccatttctgtggtgacacgttgtgtattctcaacccctgcctttggttttttcaggcctagctctgctagccccagtgggaagccctctggatcagcagttaacatgggctctgtgcagggacactacgtgcaacaggtagaagatggctttccagacccttcagccctggacacttaggcccgtctccaagcgccaaaagagaagggactgtccaacctatctgagcgccccctgtctaaagacagccatgccctagcggttagagcacagaaccgggagctgggccgcccgcgtccctcctggcgaaggcatttctcctcttgacgggcgtctggatccttccttgtcctgcagagaagggaggatgctgattcctctgaggaggtggtgctggaaggtggaccagccctggcaggtcggggctgaggcgccctgggagactcggttaggtttgggggtcggctttaggagccggggtgcgcgcgctggttctagtcagtggtgtgtctcatctttgtcttggctgggtgggagcacaggtgaaattaagttttcccattttataatgaaaaggacatcgcagtgtcttttcctgcacgcactattctcttctctattctctaaaacgtgctggggctcagagcttaagcccctcagacgtgggtttttaatcagtcactgtgcctggctggtagagatgggaagtgattgctctcattggttcccctaggggtcatgaaagttgtgtggaatgagcttctaaagctttcttccagagttcagacctggtggggggcagatgcgctggctgctctgtgacttccccaccccactccccgtgtagagccacagaccaggggagccctgactaggaatggggccccagggaaaggttacagagtgggaatggtgggggggttggctgaatcgcggccagagatctgtgggggccaagtctgcctagggccccagcagacagtcgggggctccgagacgtgcagggggcacttggatctacttgaaggggccttttttgcctgtggggcaggaggtgcactgatttgaaaaggttcttccagttggccttgggaccagaactgcttccgccctgggatgtgccatcgcggaattctttgtggaggacccggtgtcttcctgcctctccgaatcactgcactcagggcttatggggagggagcagagacggcactcgcgccactttccttactaggaggggggtttctaagtctggtccttcaaccaagggactgacaayttaggggagctttccctgcaactcaggagcaggaagggagtggtgggaactatgtatccaaacacgtttcagcgtcagggtcactttgtttttcccattcatctgtccaaaggcaaaacaacgagtggatgagaaacccagcctgggagcygtgaagctgcaggaggccccctcggctgcctcccagatgaagcgaaccggagcgatcaagcctcgggctgtcaaagtggaggagagtaaggcctgacagtgcctggctgccacctcgcctctccctactgaggacggtgccgccatgcggcctcgacacagccgacactcgggagcctcaccagatccaccgtccaaatgcgtggcccagactgagagacctccctcctctccactcccgaaagctccgttgtcaaccagcttgcacccgtggatatatggcattgacccgcttgctttgatacgaaacaaaaaagcagacgactccttcatcccatctgctcctaccgtgactgtggagtgacgcctcctgtgcagtgcagatttgccctccctgcctcctccctgtcctgccgcgcagccagggcgccttctcagcagtgcttccggcccagccgcccatccctaggcacagtgatttggcagcagggtcattttactttgaggctttttgttttaaaatgtagccaaggtttttacaaaggggaaaggaaaagaaaacaaaaacgcaagctccatgtgtatagctgaacttttatatgtttcttgccagcccctccgctcccttccatctctagcctctgtcctgtttagtttgatacgtcactgcagtaccttaagaggtgactcttaagaatgcatcccctcctgattcctcagctggttcacccttgaggttatttgcaaaaagaaaaggaggttcttgagggcaccgattgcgagcattctggtgcctggctccccgcctgggaagcgatggggtgctcagagcagcaggcaggttgggggagggggggggtcatagttgggttccagctcctggcttgatgagcccagggcgcttacaggcagcccatgaagttgatgacagttttagcatgagaatcacacagggtccctgtcctgggctcctctaaagccagtggatgtgctgggcaccagagacaaatcatggagatggctgctggtggctcccaggttggcccagatggggtgagctgacatacyacaggcccatcccaggccccgtgggctctgcttctggggctccataccctgccctgcrggggtgctgtgtttttcacacatttctttccctgaagccttctgtaacctgtcattttccttccttcctcttccggagcctgctgctttctctggacctgtctccacctcccacacagctcatcgtgaacaccacttggtgatggagggagtggacccgtgtgtggtccccaagtgaggccactgggagtttgtccttttcctcctttgcttcactcccagcagcagacccaggttgtcaggacaggagggcctgagctaagcagtaggcatcagtctcgtttgtcttcagacggcgggggcaggtccagggtgaggctgggtggagggctgaccaaggtccaaagggcctgcgcagcctccgggagggcagcttctccagccagaggyttgtgtgagccatcgtgtgctgggctygtttttaagtaagaaacaaggaaatcactccagattctgtcattccaaggaaagggaaggggacagttcaggtttctcagctgttcttaggggtcactgagcgtctacctcctcctccagaggaggctggctcagaacacctagaggagggggccggggatgcaccccccaccagaggctgccttcagcgtctcacgggtgcaggacagcgctcaggcttgggctctaagctctgtgtctagtgtagaacatggggaaggagcatcttaggaactgctgaagtaacttcttactkctctcacaattctaaggaagcgggagaacggcctcctaccaacagcgcccaccccagagctgcctgggaaagggcagttttactgaaaggtgctttactgttcacctgcatctttcagcagctcccctcctgccctcacctggtcttttccctctttatcccaagcctttatgcttgagtcccttccccaggggctgcccacccgacagttccaggcattccctacctgagcttcttgtctgcttttccttctcccactgcaagcggctgcttgtggggcctgggatgagccctctctgtccccaccggccctccttgccaagccattcctgggtgagttcaggcctgcgggagccacacattcatctccacctggacacttgagccgcatggccagacccctcccacctgatgcggtggtgcgtgtgatttgtcaaaagaaagccttctggatgctgttaagatgtacccttcaggtgaacctggtatcagacccacagtacttgctgtttgagaaaaaataaaaacaaaaaggtcacctgttctccagcccttttctcttacctggtatttccttcctttctcctcccccaccccaaataaaaaaacaaaaaacactagaatttatttatatgtattgatgttgtaggtctaggtgaaaaaaaaagaagtaaatgtttcactgctctatttatatataatgtctgaattaattctgtgcaggaaaggccaggaaattgcatgtgaagttcggtgcagtcaccacctgtgtgtgacctgagctgcagtctcttcgctgagatgcaggttttaaatgagacttggggggctgagggcaggcctcaggcctcccagcgccccaacccctccttggtctaatgaaatgcagttcttagtgcagagatgttttaaggtgcaatatatctcttcctttcccgtggttttagagccaagctcaaggtagtaggacgtagggtcttattttgttttcaaacccccatcctcagagcgcagatacatgcagaggcttctgccaggataccacggggccttagtgggaacaggtggagaccagcacttccctttcctgctgctgaggtagggattggggggtcagaacccactcacttttgcctgttaaagttgccctcctgacgctggcagctctgccttggtcactggggatgcggctcgttgctcagccaccagtggccttgcggtattgtccaccatccactagagtgggatgaagtccagagtgtgggtatacatytcagatgcccatctacccactggggacttcaatgccagctgcatttggtttggttttcttaactgttggcttctccccacagcgttttttgtttttttttaaacattcatattgttttcaaacttggaattcatagacactctggctctaggttccttaagggggaaaacaaaagatgactttatttcacattcaagaaaatcagttcagttccaaagctgtggtccttccagccacttctagggacactggggaaccttgttaaacgttgacatcagtgctctccagccgtgctgtcaccctcctatcttctggatctgccttygsgatggtcagtgacagcttctggaagctgascacacacaggtgcacagccatgctgtggtctggcctgctacggcagcatggcagctctggtggagccttctcccttgccatttggttcccctgtgccaagtagctgcaggctgcccctcaaatcttcatttgtcccttttcacttcctgcagaacaagcctgggttagagggtctgctggaaatggcctttgaagaccaaggataccaggatgtgtgcactctgtcgtgttctgtgatgaatgggaaacgbaggcttccagaaagccagctctcttctgaaatgtgacggacctaagcaggaagtcatccaggacaggagtggctcagtgttggggatggacgctgtcgcccagccatgctccaccagggccaccaatgtgtagttggctggtggtcttcgggcatgtgagacctgctcttcactgtttccaccccacttggtggcctccaggatggtagtggcaccctcagagccccatcttcagcatgttctgaagcctcagagtggaaattcctgctaaggctctgtgtggacgcctttctcccgtgatctaaaggggacactgtactcaagcttttgacctcatgccttgtgtagtaaaaaaggatttgggggttttgtttggttcctgagagggttgtgttttgtttttgtttccttttgtttatgttttggcctttcctctttgtctttccatgtagaccagatatttgaaagggcagacgatggctagaggtgtaatgtgcagcttgtttatacggtattttgggaaacttaccttggatgggaaatcgaatcgtggattcaccaggccggtgctggcacactcaccctcgccctttccctccggttcagtacctattgtttctcctttcaaatatgtgattgtactagctctttccatatgaaagaattctccttatttaaataaaaaaagtttaaaaagataaagctgaacgtgctttctcaggttgtacatccctcgtttcttggtcatttgaccagagagacctacagatcaaagaattctaattttacagagttcacacggaaattaggagtggcacggctgaaatgccttaacagaagctgtgtgggtagagaagggattgaaacccgtggctaagaagcatcttccaaatgcggcagcatcaagcactccactctcttcccacggatggcatctggttgtgcacagtgcctgcctgtggccccgtcacttgccgtgagaaacgagctggtcagaggaggtaagcatttgatgtggcgtgttgtgttgtcacttctagcggtgcttttgcaggaagtggaggaggattatgctgtgctttggggtggggagggagcaagccaggcctggggtagcgaagggtaaaaggtaagaatgggctgaggcagcagttctcggttttgccattgcctcactgacctggggaaagacgtttcaccacctgagtcagtctccttaatcataaaacacagattgtaatggtatcgacctcatggcgtagtgtggattcaaagtcaccagtagcttttagcttagtgcctagaaccagctaagaaaacttataaattacccccaagaaataaaacgctgtttccatgaggaaccccagtccctcaacttccttctaagccttttgactatggaagagagttggggacctggccatgggcatctcagctttaactagccacactcactgccctgatttactgctccctagggacaggtggctcacaaaatctcaaacggagaccagccctgaaagaggctagtcctaaggttgggggcttgcaagatggaggctgtaagtcctgaggcaccaccactgttagcatggcatgaaccaaagcttaacagcccagccccactccctcctggggcccagggaaccctccctgcccactgtaaatacagttgcctgcaggctctggccacaaacccaggtgagccccagctccttgcctctctgtgggatcttgggtgagtcacataacccctcaagggtaagccataaagaagtaaccacgaaattctaactggtgtcatctaatgctatgttgcccaacatggaaaaaaagtcttgcaggcagccaagaaccataatgaaggttattaaacctgcagtgtgcccttttggtctgtatagattaacatacaaatagaccaggagatcaagaaggagcgaggctgagaagagtgatccatcagcctggttgcgttgctgtcagttaccctgctctgggtgccgactgttcagggaaaacatgggaaggggtgcattgacccaaccaaaagtaccatgtctgctccaaagcaggcctttgggaaggctcttgaccctcagcagagggggctggagaggctgatggatgaggaggagccctgggaatggaggaagaagcctccagtcttctgccacggagtttaggggagatgcccccactggagcctctgatggtcatgcagcccccactgatgtccaggtttttttggttttgttttttgttttgagacggtctcactttgtagtccaggctggagtgcagtggtgagaccaaggctcactgcagcctcgacctctctgccccaagtgatctcctgcctcagcctcccttgtagctgggactgcaggcagacgccaaggggccccgctaatttttgtatttttttgtagagacggggtctcgctgtgttgcccaggctctcctggactcaagcgggctcacggatcctcccacctcggccacccaaagtgctggggttacaggcgtgagccaccgcccccggccctaggtccgttttaaatgcccttaccctcagccacttcaccgctagatgtatgtgcaagcaggatcgtggcatcgatgtttttcggcaaggaaactaggagcgcccgcgggcgtgggggcacgtgcctgtggtctcagctgctctggaggccgaggagggaggatcgcttcgggcagagaggtcgaggctgcagcaagccgtggtcctgccactgtactccagcctgggcgacagagcgagaccccgtgtcttaaaaaaaaaattaaggtcggacgcagtggctcacgcctgtaatcccagcactttgggaggccgaggtgggcggatcacttcaggtcaggagttcgagaccagcctggccaacatggtgaaaccctgtctctactacaaatacaaaaattaaccgggcgtggtggcgtgcgccttcaatctcagctactcgggaggctgaggcaggagaatcgcttgaacccgggaagcggaggttgcggtgagccgagatcgcgccattgcactccagcctgggcaacaagagcgaaactccgtctcaaaaaaaaagaaaagaaaagaaaagaaaaaaactaggagcaaactggcgcgcccggcagaacgccgttgtgcagacgcagaattaagatcttcacgccagatggagtgaaaaagcaaggagcagaagatgggtgggagcccactgcgctttttaaaatctgcacgtctgcttagagtacacagaaatcctggcacacaaaacagtagcacccgagagaggggaggtcgccgcgtttcacacctgcctctcctccgggaccggcgccctcgcccgctgcgcacgcgcgtcaccctctcccagtgcgcacgcgcgctgctgcccgtctggccccgcaggctcggtgaatcgaacgttgagcagggcggtgggtggtgcggagtgccgagcggcctcacccccaaccgtcggcccagtcggacggttccgaggcgttgccgggagccgggcgcggctctgtgtggactcggagaaacgcgggtacatttggggacaccggggacgagagcccagcccggacttgggggagtccgtcagtgccggacgcgggtccctggcttgcggacgggctggggccgggggcgtccccgtctttccggagctgggggcggggttcgggcccgggcagatgcggcgttcgggcggccgagccccgaagtaagaactccgtggcgcgtgcagccctagggaggaagggcgtgctgcgggtgcagtctcagggtgaggacggagctggggccgacgcagcctcgggagttggtggacgggacaggtgcggcctgtggggaagaagggccggccagggagatgcggtctgcaaggggagaggaggcactcccaggacagatgggaccttttgggacgaaggcgctcaaggcagatgcagctcagggagggaagggcgcgtccagggtagatggggcctgaggagaccagcggggcgccaacggccagatgcggctttggtgtgagacagggtgtcccaggcctgatgcagcctcaagagaagcggagctcaagggaagatgaagcctggaggagaacgtgggggcgcagggtgcaaatgcaccctccaggcgagaaagggagcacccggggatgatgtgccgctgggatagaaggcagggaggcactgggggcagatgcatccttgaggagagatgaggaggccccgaggctcggccaggttggggtccctgggctgtaagcagctgagatggcacccaggagctgcccagggtcaggtagctgtggccgcactgtgggcttctggtcgtcggggagggaggggagaaaccctggcgttccttagcagtgttctcgcgcccaagacgtgctcggcaggttttgtggaatgagttgttgaaaggagtgaatgtccagtcctgagatcccctgaattcccacccgagttcactgctagtgcccctcaccccacatgtctacctgaaccaaggctccaggaacttcggtctttctcagcagcccggctgtgctgtggttctcctcgtgtgtccgggagccgggtggctggggatcccttctgtagcctctcgtgagccctcatggaccacggctcctcccttcttttctagggcgtctgcctgagcccgcttttctacaagatgtggggatttttgaagcgccctgtagtggtgacggctgacatcaacttgagccttgtggccctgactgggatggggttactgagccggctgtggcgactcacctacccgcgggctgtggtgtaagctaaatgactccattcccagggtgaatctagaattgtactttgtgacaggaggcgcccttactgaatagcataaatgggagagtgaaatcctggcttcttggtgataggtgtttttggcagtgagaggagagaccagtctgtccccaggacagccccagcagagtacaccttttaggtcttgccttctgagtctgtaacaggtgaaatttggcccattaaaggggtgcagtagaggaaaatctggttgccagccttaagtaacagttttaaagtctggacggcagaggattaatggatttggaagtaagtcttcactgttgagagcactttttagaatgtgtttttgtcataatgggaagtgattgctgttattattgaagggctctttattaactgattaatatgtgtgtgtgtgtgtgtgtgtgtgtgtgtgtgtgtgtgtgtgtgtgtgtttttgagacggagtcttgctgtgtcgcccaggttggagtgcagtggtgccatctcggctcactgcaacctctgcctcctgggttcaagcaattctctgcctcagcctcccgagtagctgagattacaggtgcccgccaccacacccagctaatttttgtatttttagtagagacgggatttcaccatcttggccaggctggtattgaactcctgacctcatgatccacccacctgggtctcccaaagtgttaggattacaggcgtgagccactccgccctgctgcatgttcttttttaactttttattatggaaaacgtcaaacatatacaaaagcagggagacaagtataatgaatgaccccccccacacacaccagtattttcattacccagcttcaccttatcagttcacagccaggcccctccctgcagtggtttttactttgcagcaaatcctagtattcatagataattcagcggtatatctgtaaaagatgaggatttttttttttttttttttggagacatagttttactctgtcgcccaggctgtggtgcaatggtgcgatcgtgattctcctacttcagcctcccgagtacctgggattacaggcacctgccaccacgcctggctcatttttgtatttttagtagagaaggggtttcaccatgttggccaagctgatctcgaactcctgaccttgtgatccacctaccttggcctcccaaagtgctgggattacaggcgtgagccaccgtgcctggctgaggattcttaaaaacaaaaatcacataaccacagttgcattatcatgcctgagaaattgacagcagtttcttggttatcttcacctctccctgattgaaaacatgttattgcagttgattcccacgttttcctttcatacttgcagccgtttcattgggtcatcgctagccacagacatgtgctgctggtgggggcgggggtgggggggttgggtaggtgggtaagcaggattagccttgcgtcccaggaggtctttcagcaggttggctcatagtatccacctaaatcaaacacaagggagagacagaatctgtatgggcaggcatgctgagtgccagctgtgcttggtgaattccccatgtctctgtgggtgggtgatgctgtatgcatcttaatatttggggatgggaaacaattggggcaaaagatccagcctttgctgatcactcactcaaagtcatttggaaacacatacacatttatcctcacagtttttgtttacagttaagattctaattgaatataatatgggttgttgtttttttttctagttttgacgaagtatattatgggcagtacatctctttttacatgaaacaaatcttcttcttggatgacagtgggccgccat

SEQ ID NO: 97935 - DNA, 57517 bp, Homo sapiens
cccagctaatttttatatttttagtagagatggggttttgccatattggccaggctggtctcaaactcctgaactcaagtgataacacccaccttggcctcccaaagtgctgggattacaggtgtgagccaccacactgggccaatgcttaatattttaatgtatctcaacaataaaaccaagaagaaacaaagccttttgacttgttagaatgtattaagtagtattttaaagaaactttatagttgtgacattgaaagactgttggggtggggggaggaaaatttttactttccatcttaatgtaaccttatgctattctgtatttttactgtatattgcttttacaataaatataaaatgaaatgtttatgttgacatttcagtgtgaactgtggattgtcaatacttgtttattgctcaatttaaatttttgaataaaacctaggactaagaagcaagtgtttaaaatcaaacactccaatgtgcagatgggtggatataaaaagaaaaattttaaaaataaaatacttatatactatgaagtcagacagttaaatgcaccaaagaatagatggaaggctgggcatggtgactcacgcctgtaatcctagcactttgggaggctgaggtgggaggattgcttgggcccaggagttcaagaccatcctgggaaacagtgagaccctgtctacaaaaaaaaaaatagactgaattggatgttatattatagcttatacacataataattacgagacaaagttttgctttgggattaattcatcttttagcctaccctatgctagggatttaagaagcacagcacaaatttcctgatacctcagagcttgcaatctagtggaggaaacagacattaaacatctattgtgaaatgctaagttatgaagaaaaagcataggttgtcaagagtgtcaaatcaagaactgacctagtaaggagtcaagttttccccacagatttttttttttttttgagctagagctgattagtgggatgaggagttataaagtcttatgtgtctgggggctggggggcaaatggcagagaacattatagatggatgactccctcagcaaaagtcctacgttgggagggcaccaagcacataatggaattgaaagaaggctgaacacagaagaaggaagagcatgggcagagagctggagaggcaggcaggggccacatcaggcatcctcacctaccatgctaagggaaaggagaaccaataagaaagatgagagtcatcaagtacccagtgtaatttaataaaactatggctaaattaaggtttaatttaaatctgtaaaaaatagagatggggttgcccaggctggtctcaaattcctggcttcacgtgatcctcccatcacagcctcccaaagtgctgggattacaggcgtcgtgatcctggcctataatgacgtttaatattctactgtcttttttttttttttttgagatggagtcttgctctgtctcccaggctggagtgcagtggcacagtcttggttcactacaacctccgcctcccagattcaagcaattcttctgcctcagcctcccgaggagctgggattacaggcacacgccacttcgcctggctaatttttgtatttttagtagagatgaggttttaccatgttggccaggccagtctcgaactcctgtcctcaagtgatccgcccaccttggtctcccaaagtgctgggatataggcatgagccaccgcacccaaccaggtgtgtttatttttgacagataaaacagaacttcccagtgtcagctcatgaaaaagaaaacccaatccacagatcctcaggtttaggtcactatggtaatttaaataacattctgtggccatagattgtcttaccacataaaactgtggttattataatgaaacaacaaaaagtcttctaatcaactatcattttccttgcaactatcaatttttgagggcagaggagagggaaagataacaaagtgaggagtaagaagaacataatctgtccaggacctcagcctatctatgcccttcagaaagtgactcccataattttaattttttttttttgaggcgcagtcttgctctgttgcccaggctagagtgcagtggcacgatctcctgcctctgcctcccgagtagctgggactacaggtgcccgccaccacacccggctgattttttgtatttttattagagacggggtttcaccgttagccaagatggtctggatctcctgacctcgtgatccgcctgcctcggcctcccaaagtgctgggattacaggtgcgagccaccgcacccggccaattttaattttacacaattataaactggggatgtctactacacgtgccccagtagctcttgtgtgccgaagatgacaaccagttttatttttattgagcataaatgtccaatgtatttatataaatcatacaagaaccttatgttcctccctaggagtttaaatatagtctatgaagctaagacataataaggaataccttggtacttttcattttttttaaacctaggtagcctggagaacagatagatctcatttatgcctgcattttgtggctagcgtctcacacatttggacctaagaaaaagaatggtagtttgctgataatttattacagctccgtccctccaactgttctttattaggtaccagcaaaatgtgttctgctgttgattgcctttactttcctggcctttcaaatcctttgaacttgcatttcacaatgccaatatcaaaatgaaataataggcaacagacaactgtcttttaatgtagcaattatatatttcgtcaattagaggtttgctctctaaaagcagatacttttcattttaaagtacataggataattctcaagaagtatttgctgcagtactggtggttatggctaaaaatagagcaatagtgaaaataaaaataagtgcctactctaaaaccaggaagatgcacagtgaaaactttgaaaaattattttgccatgaaataattttctaagcgttttccttgggatattgattttattgtatcgattgtattatattgtatggtattagattagattagattggattggatttatagcacccaggctacctccttgagaaacagcaacttacctagcaaatccacctttttcgcctttaagaatacgttttcattgaattcctatttgtccaaagatactaagtatgcccggtggacctaagagacaaacccaaattagggaaagtaagctcagatggaaagagacctttgggatttcattttattatgttttatatatgttttaataccttttcacagatttaaatccccagggtgaatactcccttctttgttagtacctggcgtgtgttcagtagtcaaagtaattaaaattagcacctatataatgagcttgtcatttttaatgttctttaccaaccagaatcctaatgaagtctaaaaggtttaggctgggcacgttggctcacgcctgtaatcccagcactttgggaggccgaggcgggcggatcaagaggtcaggagatcaagaccatcctggctgacacgatgaaaccccgtctctaataaaaacacaaaaaattagctgggcgtggtggcaggcgcctgtagtcccagctactcgggaggctgaggcaggagaatggcatgaacccgggaggcggagcttgcagtgagccgagatagcgccactgcactccagcctgggcgacagagtgagactccgtctcaaaaaaaaaaaaaggtttaaagtgggtacattaattgatgtaccactgtaggagcacctctagatactgaaggccacagtatcttggctcactgcaacttccgccttcccggttcaagcgattcttctgcctcagcctccggagtagctggaattaaaagtgctcgccaccacgcccagctgatttttgtatttttagtagagacaggttttctccatgttgcccaggctcgtctcgaactcctgacctcaagtgacccgcccgccttggcctcccaaagtcttgggattacaggtgttagccgccgcccccgtcctggtttttgttttgttttttacataaaacgcaagattctctaaaaatgtccaaattttggctatgtatatgaacatcatacatacgtattagattcaagctaatactcactcttctactctgctaacatggccagaagacataaaaaaaatttttttttgagacgtagtttcactcgtcgcccaggccggagcacaatggcgcgatctcggatcattgcaacctctgcctcccgggttcaagcgattctcttgcctcagcctcccgagtagctgggataacaggcgtgcgccaccacgctcggctaattttgtatttttagtagagactgggtttcaccatgttggtcaggccagtctcgaactcctgacctcaagtaatccacccacctcgcctcctaaagtgctgggattaccggcgtgagccatgaccccggcccagaagacataaatatttgccgggtaatgacaccttcgggaatgaacaatggttcttcgtttattatgtcaccgaccctaacaatgaccacacaatgtactaagtcaacatggctaagggtgcactatgggttatttgttgtgaatctctaagactccatgtgataaccaaaatactttattttgttttgagatggagtttcgctcttgttgcccaggctgcagtgcaatggcgcgatctgggctcactgcaacctccgcctcccgggttcaagtgattgtcccgtctcagcctccctagtagctgggattacaggtacatgccaccacgcccggctaatttttgtatttttagtagagacgggggtttcatcatattggtcaggctggtctcaaactcctgaccctcaggtgatccacccacctcggcctcccaaagtgctgggattacaggcgtgagccaccatgcccgacccaaaatactttttttaaaggtatcacagctccaggaaatagagcagtaaattgatctgtccttcagatcaccaggactttcataggctaaatatcttcacaacagacctccaaaaccttcaaggtcagaactgaacacacggtggcgagaggaactgtcttcacagcagctctgcttcctcggagacggccagagggaaaggccgttggccagtgccagtacttcgcccaagggagtacctgctcacattaacccagcccaagaagttcctttggccaagacgcacacacacacaccactgtccggttttctatttccttccagtgtaacgacaaccacaagctatcagcacttcactatttgctgtcccctcagcgggatcgggatgcagctacgcagcgggcccctggcgagccgcggtgtcagggcccttttctcctcttcccaccgtgggaagcgaattcagtggcgtcaagggccaagagccagacctgagtttgtctctcaccccccgatgctcgtctcccttttctcactgccttccgccccctctgatctcgacttctcgcaacctatccaggtcctctctgggcctctgccctgagtcagccccgaatcagacgggcttgactcgctgaaagaattcccctttgagaggaggcagattcccctctacatagacgacaccctgacgtcgaggggcttgcccctcgtccgtggggaagccttcccggcccgcggctggggcctgaggttgggccgatcacccctcctaccagtcctagttcgggtctagcggaatggctgggctccgagaagggcgccgggcccacgggcgggacggccagggcggccccgcaccctctgggcgcaaatttctccagcggggtccccagcgcggccagccccagtctcgcgagaggacgtgggtcccgcccggcgcccgaccccgcccggccccaccttcccctcgtcccccgccctccttcttccactccccgcggcgcgagcggctgactgcccgtagaggaaacgacattcggagctgcgctcccgcccasgccggccctgmcgcgggcctcgtcagccagtaacagggagcagaggtgggagttagcgaggcgaccacgaaaacggtgaaggtcggaaccgacagcctcctccgagaagggtgaggaaagggtctgagcctccccgttccctggactccgcagagccgctgcggggtcgatccctcccaggggcggggtcgcgctgggcaactgcagtcctggggccgactgggcggggtgcgcccagaagcggggagaaggggtcagttgggggcagagggcacccgggcggcgggcggcggggaacaggctgcggggcccaggccaggggtggggtcctggggccgggactcctgcagcgggcggggaagcccccggcaggccggtcccttccgcctctcctttggaccctgactggaggccggcgggcgggcgggcgggcgggagagagggagggagcgcggcgcgaggggggcgggtcccggcggcgctggcgctgattggctgagcgtgtgtggaatcgggtgatgggaaacgcagcccggctctcccgtaccctcccgctccgctccctgccccccgtggcgaatgtgctgcgcagcggcgggtgcttacgctcgcggggtttggctgttgcaggcaggagctgggaggaggcggcagcggcggcggcagaaacagcagcggcggcggcggcggcagctgggaggaggtggtgacggtggcaacggcagcgtcggggacgatggcgcgactcgtggcagtgtgcagggacggggaggaggagttccccttcgagaggaggcagattcccctctacatagacgacaccctgacggtgagcgggccgggccgggctgggcccgccgctcccctggcagctgtttcccctcctccccctcccccaggccgagcgctgcgcactggagaaagagtgtgttgcaactcctaggcgaggccttctcttcagcaggccccacaaactcgcctttgcagtgggtggctcggtaacctctgtcggccccaagcccagagctccgtacgcactccctctctccagattttccttcttttggaaccttattccttgaccctttccctttaggagacgctgcttttgccaaagcacacatctcagagaggggttgaaggatcttgggcgtttagggcctaccccatacagaaaccacctaccctcggggaggcttaattacctggtaatgtcgcagctgcactgctacctgtgtattttctgttttaatactggtagctctcaccacataagcttaattactgggggcagagtgacatgctcgtgcacagtcaagattccactaaaatggtttgatttcgttgtaaatagtctcgtattgcctaatgcattaaaactcttgaaatgattgtattgctaggccctttcttcaaaacgggctttcttcgcattatttagtttacaggtggacttttttttttttaaaggaagccaaattattgaatgtgtaagagtactataaaaagctgattgctcatcttgagtgtcaagacccagttccgggtactttattctttagatttggtagtgtagcattatcgaccctctgccctatgttgctgtactgtttcctttaaaaggaaatggctgaaatttgaattgaatctgaacaggaaatgagtgcagttgcttgccacttaagaaatgaaattaaccttttccgaatatcttttgaaatctgcgttttgatgatgctgaagctttggattatacatttgcttatttcgataaggtgcacctaagtctcttcatctcatcagtattcttttgctatcaaaggcagttgatcagttttgttcctcaatattttttttkgcaaatatctaccgaagttttttcaaatttyatgtaaaatgcaagtcattgtagagatgccagtctatgcctttatgcttgccagtctcaattaagacttgattgagctgcagtactttaaaaaggattagaagagctattgaatgacttaatttattagaagtttttaagtgacagcatttctaattattcaagtgcatttatttttcatgaaaaaaggtagaatgatttgttctgacataaagtaaatagtgttgatgcattagaaattgtgtgtcttgattatgatttctgtactttttgcattagaagtataatggacttgtatttttaaatagttgaaactagcactgtgatcatattaaataatgcatttctcagtttggacttcagatagggattcatttgttgatattttctttcttctctcccctgctaacataaacacttttctgaagcatatagttatgatatcagcctttaaggtttattgtcccacaatggctgtggagttaaaaaaaaaaattcagtgagtttggatataagattattatttaatgaataatcataacataggaaaacatatcaaaacatagggaaaaccaacataaatagtcttcaaaagacactagttcttggtatattcacataaccacctttgtgaatgcagcacattaatacatctgtcatatagcactttaaaatggccaactttttaagtgcttttatactgtattctctccacaatgatgtgactttccaaaattttccactgaaaaagatgtaaccttgcaatgtggtttagtatggaacttactttgcactgtatctggcggttgaattttgcttttattgtactgtggacttgtgactaaggcaaataaaacttaagctcacttaatttaaatatctcaaaataacatttaggaaaaggtgcagtttttctttgcttcagaatgggtttttatcacaaaggaatgagtgagacatttatttgtgctgggacttctgcacagtcattgaatgctgtgagtgaatgttagtgaaaattcttgtcaagggaaacaagtttctttcaggatattctaccaaatactactgaaagggagaatgcagagcaaaacacctgttgggagagaaggggaaaagggaagagggaaggaagatgcccctatcagagttttatgctctgcattgttcctttgatagatggcagtggatgcctgaagttaaccttaggttttgtctttgtccctagggtctgtaggtaatgcactgaggaaacattgtttgaacttatttcaaatagtagtcttaggattttgatagtagctaaatgttgcaatatagttacaatgtttacaggcagttgcagactttatcattttagttgggatgctgaaactttacccttagttaaactggcagttgtaatttggacttgtaaaatgaaattaacaaacttgtatgtaaagaagtagccttaggctgggtttggtggctcacgcttgtaatcccagcactttgggaggctgaggcaggtggattactggaggtcaggaattcaagaccagcctggccaacatggcaaaaccccgtctctactaaaaatacaaaaattagccagacatagtggtgggtgcctgtaatcccagctactcaggaggctgaggcaggagaatcctatgaacccgggaggtggaggttgcggtgagccgagatcgcaccactgcactccagcctgggcaacaagagcaagactctgtctcaaaaaaaaaaaaaaaaaaaaaaaaaaaaaaaaaaaaaaaaaaaaagtagccttaggcccggtgctgtggctcatgcctgtaatcctagcactttgggaggccgaggctggcagattgcctgagctcaggagtttgagaccagcctgggcaatgtggtaaaaacctgtctctactgaaatacaaaaaaatcagtgggtgtggtagagtgtgcctgtagacccagctactgatgagactgaggcaagagaattgattgaacccccagaggcggaggttgcagtgagccaagattgcgccactgcactccagcctgggagacaaagtgaaactccgtttcaaaaaaaaaaatagcctcttcttttatgtgatatgttgtgtccatgtttagaagattcccatggtagttcagtgagtttgaacacctgagtataggatagggctgatgtaggtgtacttgagaaaattccaaataagttggtggaatggtgaaatatttaagaaagttttatactctggctaaaatgttgttcagtgttactacaattataaaataacagatagaatacatatttgattttagagaaatctgaagaattaaagtttttttttttttgagacacagtctcgctctgtcgcccaggctggagtacagtggcctgatcttggctcactgcaacctctgcctctcaggctcaagtgattctcctgcctcagcctcctgagtagctgggattacaagtgcgtgtcaccacgcccagctaatttttttgtatttttagaagagatgggggtttccctatgttggccaggctggtcttgaactcctgacctcaggtcatctgtccgcctcggcctcccaaagtgctgggattacaggtgtgagccaccacacccggccaaaatatatattccttctaaaatcttgaaaaataactacaaaacaaattacccttagtcatrcttctcagggataagcacatttggtgtaatttcagtcctagacacacagatacagttaatatattctgtaactttttgtccttatttatttcactaaatgtaattttgaaaacattttttcttgtcattcttaaacatttttaatggctgtgtaatattccgttgtatgacattctgtaattatttttccactgttggacatggaggttgttctagtttttgctatgaataaactgtaagaacataaataatgcaaaaatctttgcattaaaatgttttctcaggcttttggaagtggaattactggttggatcaaaggataagaaccttttgtaaagttccaggtacatattgtcagattgctatgatatttctttttttttttttcgagatggagtctcactgtgtcacctaggctggagtgcagtggtgtgatcttggctcactgcaacctccgccttccaggttcaggtgattcttgggcctcaacctcctgagtagctgggattacaggcgcccgccaccatgcccggctagtttttgtatttttagtagagacgaggcgtcaccattttggccaggctggtctcgaactcctgacctcaagtgatctgcctgcctcggcctcccaaagtggtgggattacaggcgtgagccaatgcgcccggccagattgttacatttctgcattgcagtttactctcctaatttaaaccaatctaaatagactactctgataagagtttggggttttgttttttttttctttttgttcttgtttgcatgtacagcattaatctggtaagagttcttaatgtcttacactttaaaaaaatgataaatggtggcatatccacttgggaattagatgttttgtaattgttaaaagttagcatttaatgttttctttcaacttttaacagttaattttactgagggtgatagatgttacaaatagctgtgtggagtaaaaccaaaatgacagtgattttaataaatgcaaacttagtatattgttggttagaacttgtgagaatgcgctaaaaacaggttttttttgtggtcaggagaaaccagaacagatacttaagagtgaaagtgggtaattgattcaataaactttataaagcagtaattgcagcacaatgacttgttctatttgttgctagctatgggtagggaacctcttcatgaagctgaatgctaatgatgcctctataaaaccacacctgaaatactttacaggactgtcttcctttaggtaacctagaatctcaagattaagttaaggaagtggttttaaagaatgaagaacaaattgtgctactagcctctttgccttcccctttttattttcatctcttaaaacactgaacagcatatagtgattggccagaaaacagtaaggtaaaaagccattgtcctaagtgtttgaaaggcgaggacagagtatttagtttgagtgcattgtctccagccagagtagtgagtaaatacaagagaaaatttagtagtatgcaagctgatgaaaccaggaaagatagaaatagattagatcttagtatttttgctactaattaggtgaaaatgaaatgattggaaacaagttttgtttttaaaaataaccgtgttctttattgacttttttttttttttgagaccgagttttgctcttgtcgctcaagctggcgtgcaatggcacgatcttggctcaccacaacctccgccttctgggttcaagtgattctcctgtctcagcctcccaagtagctaggattacaggcatgtgccactatggctaattttttgtatttttagtacagacagggtttctccatgttggtcaggctggtcttgaactcacgacctcaggtgatccacccgcctgggcctcccaaagtgctgggattacgggcgtgagccaccggcttctttattgacttcttagaaagaattcctaaatcaggtattatccatataattaaaatattttaggctgggcgcggtggctcatgcctgtaatcccagcacttttggaggcctcggagagtggatcacctgaggtcaggagttcaggaccagcctggccaacatggtgaaatcctgtctctactaaaaatacaaaaattagctgggcatggtggtacgcctgtaatcccagctacttgggagaattgcttgaacctgggaggcagaggctgcagtgagtcgagattgagctactgcactccagcctaggcaacagagttgagaccctgtctcaaaaaaaaaattttacaaatcagctcgcaggtctcagtattattagatgtgttctttgatctccgtttcaatttttaaaacagttgatcagaatataaatacatactgagtcagaatttaggattttgcctaagaaccagactggagagattttgatttggttaaataaggaatattctttgtttcttaaattgatagctttgatctttaaacagtatagataattgtcattttttattacggctattggtatgtggtgaaatggtgtatatttgtatcaagcaaatgaaaatataaatcaaggtattagttacttaaatggtaggtttggagtgacctccaatattctgttgagttacatggctctaaaagtttatacctttttaatgacttgacagttaaatttttgtgtgtcttaaaccttttgatgattccagaaaatatgagttaattgaactattaactattttattgcttttattataatagttttctggaccaggatttccaataccaggattattattatttttttaaatttgagtagascatgttaattagaataaatacaataggcagtatggttcattagatattttgctcttttcagtcatcctcaccagattattgatagctacagcattaaaatagaccattgacttcagttttgctttgtgctgttgataaagttaatgtatgaaagtgcttmtaacaatgtctaatacacatgaagtgtctttattattacttattgctacccccctttagaggtattaataagactgagaaggaaaactagaaacaagatgtcagggttgataaacctgaaaattggataattgacatttggacatttcatctgtatgcatggaagaaaaaactttcagaatggtaaaagctattgaaatgggtcaggcgtggtgactcacgcctgtaatcccagcactttgggagtccgaggcaggcagattgcctgagctccggagtttgaaaccagcctgggcaacatggcaaaaccctgtttctactaaaaatacaaaatattaaccatgtttggtggcaggtgcctgtaatcccagctactcaggaggctgaggcaggagaattggttgaacctgggaggcggaggttgcagtgagccgagattgtgccactgcactccagcctgggtgacagaacaagactctgtctcaaaaaaaaaaaaaaaaaaaagctattgaaatggaagcatgtctctaaacatggtatagtgaatatagaattggaagcaaggagcattaactcttcccctgccataatatatagtatatatgcattgtaatacatttgggaaatataggaacacatacagaaaaagttgtcttactacctagagatagccacatctaatatgttttccttttttgaaagataaagtatacacactgaaaatttgaagtgtgttgcacatgcagtctggattatgttagtatttgcatcatagtctatcctttagtatctatttgtctctgtacttcatatatctcatattcctccgttatcaagaaaaactcttaaatctattgcttacgtttgacttagctgttaatgaggcctcattttgctgttagaacaaacatgttttaaatttctctaatatggaaggaaaggaatggttacatctattaaagaagcaggtctctggtgctggttggggaagggagtgatctttttaagatcgcattcaactgggtagggatattttgtttttgccttaaatcggtgtttttctcttgacttcactctttgattttgtaggagtttgtggtccttgttatgtggcaatgtggaaatagtttgtcctagtacgatatgtttgatctttaacaatgttttagttaagatatacatgtgttactttcattgttttgaaggcatatctttttcccccacattttaatacctgaaatcaggatgctgcttgaatttgatgacatcttatagtaaaaatggcttgtagtgatacataactatggtactaaaaatctgtggtgtgacaacagatcagtaaaatgtactaattacacattcccattatgtgacatagtgaagcctccttaagtttcatatgccttcctatggtagtgaattttgataattgaataagtatatcaatgtgccctttttgttcataattagagcaaacatttactatgtgccaggcaggtactgttctggccaggcacagtggctcacgactgtaatcccagtactttgggaggctgaggtcaggagttcgagaccagcctggccaacatggtgaaaacccatctctactaaaaatacaaaaattagctgggcttggtggtgggttcctgtaatcccagctactcgcgaggctgaggcaggagaattgcttgaacccaggaggtggaggttgtgatgagcttaaatcatgccaccgcactccagcctaggtgacggagcaagactccgtctcaaaaaaaaaaaaaaaaaaatggaaacttgtcttatgtacttgaattttttttttttttttttttttttttttttttttgacagagtttcactcttgttgtccaggctggagtgcagtggtgcgatttcagctcgctgcaacctctgcctcccgggttcaagtggttctcctggctcagcctcccaagtagctaggattacaggcatgcgccaccaaacctgcctaattttatgtatttagtagagatggggtttctccatgttggtcaggctggtctcgaactcccaacctcaggtgatccgccgccccccaccccactggcctcccaaagtgctgggattataggtgtgagccaccgcaccaggccatgtacttggatttaacaaaattttttgaggggctagggatgggtgcaaatctggctttcacgggtctatttctggagtttgtaggctgtatcctgttctcagaggggtaaagtaattgatttccgttctgtttgcattttaagatggtgatggaatttcctgataatgtgttaaatctcgatggacatcagaataatggtgcacagctaaagcagttcattcaggtaatagttttttcaatcagtgtttttaatggtgtatgtgtattttaaagactcatttaaaatttagctgtattaattttatataggattctctaggtcttaatattgcactggaattgctctttcaccattgctatagtaagcatgcatagttatttacatgatttatgtaactgccatgtgaaaaagaattggtggtggtgtgttaatattttacatgtccataagactttaattttaaaaccaggccatctttcctagtttttaaaagataaggtatataatttttcattaaaaacttgttggttttctgctgtactaattgttttgttcagacaaagtaatcctatattatgaattttctgatgtttgtttaattcctgagaaatatagtgctttataaatacacttaaatgcaatgtatagtggtccctcagtatccgtgggggatagttcaaggatccctaggcaaaccaaaatccacaatgcttatacaaaatgatatagtaagggctaggcatggtggctcatgcctgtaatcccagcactttgggaggccagggcaggtggatcgcttgagttcagtagttggagaccagcctgggcaacatggcaaaaccctgtttctacagaaaatgcaaaaaagttgggcagacatggcagcatgtgcctggggtcccagctcctccgtaggttcaggtgacaggatctcttgagcccaggaggcagaggttgtagtcagctgagatcgcatcactgcactccagcctgggcaatagagtgagaccttgtctcagaaaaaataagatgtatatttgcatgtaacctctgcacatcctcccatatactttaaagcatatttagattacttatagtacctaatacaatgtaaatgctgtgtaaatagtagttatactgcatctttagggaataatgacaaggaagaaaagtctgtacatgtttagtatttcctgtcaaatattttcgatccttggttggttaaattcacagatgtagaacccatggatatggagggctgactgtaattaagatattggaagatgacttgttagtttacttcagaactcttatttctacttttaggaaaactttgaatggaagggtaatggtaaatgtgagaaaatgcttcttgggaattgtcctactttcctatccgtttttggcaaatctgaaagtgttaactgcagttaactataactccatcaggtagaagttacttactagagtttgctcatttctctgcaacagtagctctcagttatttttctaccttgtcataaccagcagatacaattcataagcagcagcatgctagttacttccctacataaggaagataggccatgttttctcccattaattcgtaatatacctgttcatgcctctggattgggaattgctgctccatatgattaccatcctaacttgactcctgtagctaaacatagtgatagtaagtgtgttgttaaaagttgtcaaaacaaaacaaaacaaaaaaaacaggccaggcgtggtggctcacgcctgtaatccgagcactttgggaggctgaggcgggtggatcacaaggtcaaaagatcaagaccatccttgccaacatggtgaaaccccatctctactaaaaatactaaaattagccgggcgtggtggtgcacacctgtagtcccagctactcgggaggctgaggcaggagaattgcttgaacccaggaggcagaggttgcagtgagctgagattgtgctactgcactccagcctggcgagagagcaagatgccgtctcaaaaaacaaaaacaaacaaacttaaaaaaaaggtacagctgtattgtgcttttttttttttttttttttttttttttgggagaggactggcctaatactcactgaaccagccctacatttccagatgcagtactgctttttggcatcctaagcagagttgtttatataccctaaattctagagcaagggggtttgtggagsaaattccgtacagcatggacaaagctgactactttgcctttctgactcagttgcaggtagagctggtaaaccctggccaggttgtactttactgcacaaggataggaaccagtagtagtgaaagtgtaattttacgtctttttaaaggacactctttcattttctttccctctttcagcgacatggtatgcttaagcaacaggatctaagtattgccatggtggtgacatcacgcgaagtcctgagtgcactttctcagcttgtcccatgtgttggttgtcgtcgcagtgtggagcgtctcttttcccagcttgtagagtctggaaatcctgctcttgaacccctaacagtagggcccaagggagtcctgtctgtaactagaagctgcatgactgatgcaaagaagctttatacattattttatgtacatgggtaagtataatcaattaggagaaaatgggtttgttaaaatttaaaacagcttggtgacagtggcagcttattttcttgatggaaagattgagtctgatttaataattttattgagtaagttgtatgtaccagtggatgtaaagtttcaactctccacgtggggagaggcagacagaaagcaaatattcaatttgtcagggatgataagttagaaaaatcagtaagggaggtagagaatggagtgggggtagaattattgtggaggatggtcagggaaggcctccctgataaaatgacattgaatatagatttgaatgaagtgagcaagcaaatcttgtagaaaactgggggraaggcagagaagggacagctagtgtaaaggttctgaggttggggttttattggcatgtttgaggaatagtaaggaagcccttgtggctggagccagatgaatgaagggaacagtaataaaagatggggtcagcagagtaataaggccgggcgcggtggctcacgcctgtaatcccagcactttgggaggccaaggcaggcagatcatgaggtctggaggtcgagaccatcctgaccaacgtggtgaaaccccatctctactaaaaatacaaaaattagctgagcatggtggcgcatggctgtcatcacagctattcaggaggctgaggcaggagaatcacttgaacccaggaggcagaggttgcagtgagccgagatcacgccactgcagtccagccagggcgacagagcgagactccgtttcaaaaagaaaaaaagaagagcgactgggcgcrgtggctcacgcctataatcccaacactttgggaggccgaggcagttggattgcctgagctcaggagttcaagactagcctgggcaacacgctgaaaccgagtctctactaaaaatacaaaaaattagccaggagtggtggcgggtccctgtaatcccagctactcgggaggctgaggcaggagaatctcttgaacccgggaggcggcagttgcagtgagctgagatcgcacattgcactccagcctgggcaacaagagtaaagctccatctcaaaaaaaaaaaaaaaaaaaaaaaaggtaataaaaggtccagtcatatttttattttttcagacagagtttcactattgttgcccaggctggagtgcaatggctcgatctcagctcactgcaaccactgcctcccgggttcaagcgattctcctgcctcagcctcccaagtagctgggattacaggtgcccactaccacgcttgactttttttttattttttagtagagacagggtttcgctatgttggccatgttggtcttgaactcctgacctcaggcgatctgcccgccttggactcccaaagtgctcggattacaggcgtgagccaccgtgcctggctgaggtctttttttttttactctgagtgaggtgacaagctttgggaaggttttgagcagaagagtggcatagtctgatgaaatctggcttactttgacctctgtattgagaatgaatgacggctttggaggtagtgaaaaatggttataaaggatcctggatatattttgaggaatgagccagtgggattttytggatagattggttgtgagggaggccatcaaagatgattctcagatttgtgatgtaaagaatggacaacaggccttgcgtggttgctcacacctataatcccagcactttgggaggtcggtgagggtggatcaccagaggtcaggagtctgaaaccagcttggccaacatggtgaaaccccatttctactaaaaataaaaaattagccgggcgtggtggcaggcacctgtaatcccagctactcaggaggctgagacaggggaatcgcttgaacccgggaggcggaggttgcagtgaggcaagattgcgccactgcagtccagcgtgggcaacagagcgagactctgtctcaaaaaaaaaaaaaaaaaaaaaaaaagaatgggcaaatggttaccatttaccgagagggacgagactgaggagaaatgtaacagagctcatctttgggtgtgctaagtttgagatagcgattagacatccaaatagaattcagagaggtctgggttagagatgtaaatttgtctcatttagtgaatataaataggaaaagaagaagaggtctgaaaagtaaacccgaggctttcctatttagagatggtggtagggacttttgatatttactgtgcctgggcttgagaaaataagccttggagtgtttttgaacagaggaataatgtaatctgattcatattttaaaaggatcactgtagctgctgagtgaggcctggaatgtaaagggcagaaggtgcagcaaggagaccatttaggaggccagctattgcagttgactaagctagagattggtgggttggacagggatgataatggtagaggtgataagaagtgatctgattctagattggttaatttttatttagcttttattctatcttatttattaatttttttgagacaaagtctcactctgtctcaagctggagtgcagtggtgcaatcttggctcattgctacctccgcctcccagattcaagtgattctcgtgcctcagcctcctgagaagctgggattacaggcgtgcaccaccacacctgtctaatttttgtattttttttagcagaaatagagtttctccatgttggccaggctggtctcttaactcctggcctcagtctcccaaagtgctgggattacaggtgtgagccaccatgcctggcctcattttaaaattttctgtagagatgaaaattttgctatgttacccaggctggctttgaactcctggcctcaagtgatcctcttacctcagccttccaaagtgctgggattataggcatgagctactgcaccaggcctgattctagataatatttaaaaggtagaattggcaaactttgctcattggttggatggaaggtgcggatagtagtagtgtgtattccatatttgcataaaagttctgttgatgactcctcttcaaggatgtattgtgtttacataatgttttgtgaggtttttatatattttttaaagacatgggatctcactatgttgccctggctggtctcaaacccttgggcttaagtgatcctttcacctcggcctcccaaatagccgggactacaggtgtgtgcttctgcaactggtgtatttacataatggctgggcaagggaagatggctgagagtcaggtagcagtcagtgttgaaataacgtgagtgccaggcacactgctagatacagtggggatagagaaaagtggtttttttgtgttttgttttgagacttctctctaaaagacagtaaatagagattttaaaatttgaaagtaaaatgaattaaacccttaatatgttttatttttaattaggtccaaactaaatgacatgatagatgctattccaaaaagtaagaagaataagagatgtcagttgcactccttagatacgcacaagccaaaacctttggggtaagtagaattgaataccaagaggctttgtcattgttaagattatatatttgatcatatttagtaaaagaaataaacccactgtttgctttaattcattaattggttatactctatgacataggtcaaaataaatagatcctcttgttatgttggccattttgccttgatatatataaagtctcaatgtagatctgatttaaaaaaatttttttatgttaaatatgttttagaggagggaggttgaagtctttttttttttctttttttgagacggagtctccctttatttcccaggctggagtgcagtggcacaatctcagctcactgcaacctccacctccctggttcaaatgattctcctgcctcagcttcctgagtagctgggactacaggtgcgtgccaccacacctggctaatttttgtatttttagtagatatggggtttcaccctattggccaggctggtctcggactcctgacctcaggtgatcgcccacctcagcctccaaagtgctgggattacaggtgtgaggcaccacactcggccggttgaagtctttatggaaatgtatgcagctaatatgaacgttttcaaagtagtggtaatcattatttgatctacagaatagtcataatgtataaattatttatctttcttgtctctagctgtaatttaccaaggttttaaaaaaagtagttatgacgatattatgacaatatgtatttatgtaactaatttgtagttttctatatttattattattttttgagatggagtctcctctgtcgcccaggctggagtgcagtggcgtcatctcggctcactgcaacctctgcctcctgggttcaagctgttctcctgccccagcctcccgagtagttgggactacaggtgcgtgccaccaagcccggctaattttttgtatttttggtagagacagggtttcaccgtgttagccaggatggtctcgatctcctgacctcatgatccgcccacctcggcctcccaaagtgctgagattacaggcgtgagccaccgcgcccggcctattttattttttaagcaaatattgcctgataataatttgtagttttcttcttgattaagtgctatagtgtccaaggctgctttttcactttctcccagcacagtgccatagttgtcccctacaaaattgcctgggggtggggatagtgaggcgaagccatggagtgtgaagggactttctaagacgtgactttagttttggagagaatgggatattaaaaaactatacttctttattaattttatcttttaattatttttttgagacacagtcttgctctgtcactcaggctggagtgcagtggtacgatctcagctcatgcaacctctgcctcttgggttcaagcaattcttgtgcctcagcctcctgagtagctgggattacaggtgttcgccaccactcctggctaatttttttggatttttaatagagacggggtttcgccatgttgcccaggctgatctcaaactcctggcctcaagtgatctgcctgacttggtctcccaaagtgctgggattacaggcgtgagccactgcacctggcctctgaaaagttaatttttaaatatctcatttgtgtcattgtcacctttttttgatttttttttttttttgacctgaacttccgagttacaccattattgtatagacattttcctccctgacacaaagacttggatgaccaggcagtggtatgttaataatctattaagtttttttcccctataccgagcaacaaaaaatatttaaaacattttatcggccgggtgcagtggctcatgcctgtaatcccagcacttttggaggccgagacgagcagatcacaaggtcaggagttcgagaccagcctgaccaacatggggaaacctcatctctactaaaaatataaaaattagccaggcatggtggcacacatctgtgatcccagctacttaggaggctgaggcaggagaattgcttgaacccaagaggtggaggttgcagtgagctgagatcgtgtcgcctgggcgacagagcgagactctgtctcaaaaaaaaaaaaaaaaaaaaaaaaaaaaaggctgggcgtggtggctcacgcctgtaatcccagcactttgggaggccaagttgggtggattctctgaggtcgggggttcgagaccggcctggccaacatggtgaaaccctgtctctactaaaaatacaaaaattagccaggcgtggtggcaggtgcttgtaatcttagctacttgggaggctgaggcaggagaatcgcttgaatccaggaggcagaggttgcattgagccaagatcgcaccattgcactccagcctgggcgacaagagtgagactttgtctcgaaataaataaataaataaataaaataaattttattagtaaaattgtcaaacatagaaaagtaaaaaatacaatgattgaacctcccatgcacttttaccaagatttagtagtaatcaagagttgccacacttgcttcatttatccacctttttctttgtattttaaagcaagtcccaggcttcgtgttactctattgcatccttccacatgcatctctaaatatatggacattttttttcacacattgccatcataacacctaacaaaattaagtgtaacaatcgaatacccagttcatacttagattttacctgtttctggttttttttttttttttgaatgttggtttgtatgaatcaggatccaaacaagaaccacacattatgttcttgtagcctgaagaaaagaagttttcttaaggatagttgttattttgctgcttgatttgtcagtatcttttttttttctttctttcaaattctttttttttttttgagatggaatttcccctgtcayccgggctagagtgcagtggsgcgatctcggctyactgcaacctctgccgcctgggttcaagtgattctcctgcctcagcctcccaagtagctgggattacaggcacctgctaccatgcccggctaatttttgtatttttagtagacacagggtttcaccaggttggccaggctggtctcgaactcctgacctcaggtgatcaacccgccttggcctcccaaagtgttgggattaacaggcgtgagccacggcgcctggcccaatttgtcagtatcttttaaaaattttttattttttattttttcatcagctcattcttccttctcagatttgtcagtagcttcagagaatttctgactctaaatgcagagtacaggctaatttttcacattagagatgacctgttggctgaaggcctaaagtggtatgatacagtaaagagcttgccttctggtgctttttttctgttaagcatattctttgttgatgaactgagaagcaagtagcccagcattttatgcatctgtgttcattgctgccttccttcaaagaccaatccttccactcttgctctgcactccattttctttgttttcaatcactttgcttattcagttacctacttttgttaaatttacattcagctctgttttcctatctttcagcttaagaaacaaaacaaacctccacagattttacatccccttctagctacagttccactacatgggaagtcatatgttttagaaggctgtttgctgagtatggaatcagtgtgaatggacttaattgatcttaagtggtgtctgtctcttgattaaggtagcttcagttattcccacaggccacatagaatagcaggctaagcagtacagtatgcttagccaaggctccctctcccttggatggtcaccactattaaatgctactatgattctccattttatgtatttccactccccctcctgctgctacatccccaccccccatagcttttttaatttgtttagtctatttccagagaaagtataatacagttgattaggttttagcctaataaatagaaatctaggtcagcctttctgagagtattctctcatctatgcaagtaaacccaggttattgtctgtctgggagtaagtttgagatctggaagaaagatctaggctggagttgtaggcctgtagtttatcttagagaatgttatgtaagatcacctaaagggaaagagagtaaaagaattctgaggaatttaatggtagaaaagaaattagtaaagaaacctgagaaagagtagccagataggtagaaggaagccaaggtgtaaaagcgttccaaggaagtctgatcaactatattaaatgcggccaagttatcaaggacccaaaagtggacattggatttagtaacaatgagataattggtgatcttgaagagctgagctagtgattgagtggaagcagaatccaggttgcaatgattgaaaagtgaatgcaatgtaaggttgtcatggattaagctgtgaatggagagtatgggagcagaatcagaaagtggaaaggttatttttttggaaagtttgatcttaaaagaataatagaaggcataaggtctagaatgtttataaataaaatcctgatttgagatacagattttttttatagagcttttttttaaaaaaaaaatgccttcacattctaatgatataataatcattctttagctgatttctctttatgaacctttccctcaattatgagagcttgagtttgagagtttttcagttctgggaaattatgcattatactgatcaagtatagttaataaaaggggctgggcggggtggctcacactggtaatcccagcactttgggaggccgatgcaggcagatcacgaggtcaggagttcgcgaccagcctggccaatatggcgaaaccccgtctctactaaaaatacaaaaattagccaggtgtggtagcacacgcctgtagtcccagctacttgggaggctgaggcaggagaatcgcttgaacctgggaggcggaggttgcagtgagccgagatcacaccactgcactccagcttgggcgacagagtgagactctgtctcaaaaaggaaatatcagagttgagaatagaaggatgtagcatggaaagtggaacagatgatgtttttgttgtcacaaataaggggagctaaaccttggcctgagcccttgtgagagggagtacagagctgaattgtgtggataacttacattttaggcagagggttgagaaatacccatttagctacatagagtaagttaaaagttcagaggtttttccgtctctggcgtccaaggtgtaatgaattccttggactgtactgagacctgcagaagaacagacaggagccagttgttcagaatcatgaaaaatcaagaaggctgtgattgaatggagtgtaaacccacatttcccttggaatgcaggtccaagataaatgtgctgcaacaaagcaaaatgtgtggcaattttcatactgaagttgaaccctgttggggagggagagtgggaagtttttagtaagtttgttaaaaaattgtatagggctgggcttggtggctcacgcctgtaatcccagccctttgggaggctgaggtgggtggattgcttgagctgaggagtcggagatcagcctgggcaacatgacaagaccctgctgtctctacttaaaaaatacaaaaaataaaaaaataaaaataacctggtgtggtggtacacgcctatggtcctagctattcgggaggctgaggtaggaggatcacttgagcccctgcaggggtggggttgcactgagccaagatcacgccactgcattccagcctgagtgacagagcgagaatctgtctcaaaaaaaaaaaaattaccacatagttcttattaatttaggctgtataaagtgttcgtcttagtgtactatcttttagtaaatgtaaaacttattcactgtaattaatctatgaccttcccagctacttatacatgtgaaggtagatgatagttttgttaccatggtttagctttaaaaaggagtgattacaaaaaaaaaattgagctgagcatggtggctcacacctgtaatcccagtgctttgggaggctgaggtgggagaatggcttgaggtcaggggtttgaggccaggctgggcaacatagtagagaccttgtctctacaaaataaaagtaaaaaaaaaattacttgatgatgatctcattaagtagatcaaaacttcttagaattttcaatttgtggaagattggtctgtgtttaaaagggaaaatacttgataattttttcggtcattttgactttagaacattccaactatatttgctcatagaatacttagtttattaaccagttgctctcttgataactacagatgttgttaaattgtatcagataaacttgatagtcaagcagaagtttttatataaagatatgagcacacatttaaatgaacgttatattaatataaagtgagtatgtaatcatataatttgtaaacatgttctaatatcttaatcattaaagtgttcatgattttaatttagactatagaaattatttcttcagattatctcagtgtcactaagctttgtactatactacggtgaagggagcagtagcagtgtcagttcagagaagttaagtacagatgagaaatagtgaaggccacaggaaggacggcaagtataggatcattttccattatggacgtttccagggaacagccaggtaaaaacaagcaatactttaatctgttttttgtttttttaaggttttacccttctgtattctcccttttcactaatatttgttctttctrcagaggttgttggatggatgtatgggaactaatgtcgcaggaatgcagggatgaagtagttttaattgactcgagttgtcttttagaaacactagaaacatatctgcgaaaacacaggtaagtctgatggttgttccagtataatgtggaaggtgccttatgtgtcagtcacctagagtggcctgtcactgaactcctttgtataatagcattctagccttccctttaatacttggcactaggcggagcttaatattagagtaggcagttcctttttttttttttgagatggagtctagctctgtcgccaggctggagtacagtggcgcgatctcggctcactgcaacctctgcctcccaggttcaagagattctcctgcctcagcgtctcgagtagctgggattacaggcatacgccgccacacccagctaatttttgtatttctagtagagatggggtttcaccatgttggccaggatggtttagatctgctgaccttgtgatccaccaacctcggcctcccaaagtgctaggattacaggcatgagccactgcgcttggccaaagcagttgctttatgggatgactctcagggttagccttcttgtgttaagccagcatctcctattttgtgatttttttttttttctttttgagacagagttgcactctgtcacccaggctggagtgcagtagcgagacctcggatcactgttccctccgcctcccgcgttccagcggttctcctgcctcagcctcctgagtagctgagactacaggcgcatgccaccacgcccggctaatttttgtatttttagtagagacggggcttcgccatgttgttcaggctggtctcgaactcctgacctcaggtaatccatctgcctcgacctcccaaagtgctgagattacaggcatgagctgtgcccagcctataatggcattttcaaaattaaattagtagctttttacttaatatttgaagtatttcttctgtcattatcaggaccccaaaagagagttgatattcatgtgtttygttactataaaagtaacttcagatttttctttatagaacactacttttacaaaggaattttctttttttttttttgagacgaagtctcgctctgttgccaggctggaatgcgctggctcgatctcggctcactgtaactgctgactccctggttcaagagattctcctgcctcaccctcccaagtagctgggattacaggcacataccactgtgcccagctaatttttgtatttttagtagagatggggtttcaccatgtttgccaggatggtctcagtctcctgacttgtgatccgctctcctcagcctcccgaagtgctgggattacaggtgtgagccaccgtgcctggcctacaaaggaatcttctaagtgtcattaacatttggaaattcatagggaggagactccagtagaaaaggaaactggtgggcagggtgcggtggctcacgtctgtaatcccagcactttggaagtctcagtcaagtggatcaccttaagtcaggagtttgagaccagccaggccaacgtggcgaaaccccgtgtctactaaaaataaaaaaattagccaggcatggtggcacgcacgtgtagtcccagctacttgggagactgaggcaggtgaattgcttgaaaccaggaggtagaggttgcagtgagccaggatcgtgccactgcactccaacggagcaagactccgtctcaaaaaaagaaaaagcaactggtaaggtaacagcatctagagatggtgttcttggggcagttctactgtttaaatttgttacaagttgcgtttgtggttgtatgtcctttgactttgaggcagatatacacaattattttgggagtgcctctaaaaatcaagtgaatgataaaaactggtgtcattactttatgtggcagtaagctaatgacttcgcccgcataccaagtttattggtgtttttcttttttcaattaaaaactttctttctttgcctttttggtggattatgcccaagagagtagagaatgtgtcacttacttggagttttacagggactatacagacacaaaacatatatccttcctctttaaatatgaattgatcctcccaaaagatagtttttgcaggtgataaatgacaagttattagagcacatgttttggagtttcttataatggttttgtagattttcctatgtttagggttagtgttttaacatttttagatggattttagtccattttacagatatcttaacggttgtgagaaagtatggttgagagtaataataattaaggcagtgagtgatgaatttagggagattgtattgcatctggattctactaattgtaactgtacaagttagttgactttctgtgcctcaatttttgtcttctttaaaacaaacataggctgggcatggtggctcacaactgtagttccagcactttgggaggccaagtcaggtagatggtttgagctcaggagttttagaccagcctagacaacatggtaaaaccccgtctctacaaaaaagcagaaaaattagctgccatggtggcacaaacctgtagtcctagctactggggagggtgaggtgagagtatcacttgagcccaggaggttgaaggtgcaccatgatcacagtggccgtgattgtaccactgcactccagcttgagcaacagagtgaaacgccatctcaaaaataataaaaattaaaataaaattagcagctgggtgcagtggctcatgcctgtaatcccagcactttgggaggccaaggcgggtggatcacctgaggtcagaagttcaagaccagcctggtcaacatggggaaaccccatctctactaaatatacaaaaattagctgggcgtggtggtgggtgcctataatcccaactactcaggaggctgaggcaggagaatcgcttgaacccaggaggaggcagaggttgcagtaaactgagatcgcgccattgcgctccagcctgggcaacaagagtgaaacttcgttcccaaaaaaacaacaacaaaaaaagaattacggtagaggccgggcatggtggctcatgcctgtaatcctagcactttgggaggctgaaatgggcagatcacatgaggccaggagtttgagaccagcctggccaacatggtgaaacccctctctactgaaaatacataaattagccaggcatggtggtgcacttctgtaatcccagctactcaggaggctgaggcatgagaattgctggaatctgggaggcagagtttgcagtgagctgagattgtgctactgcactcaagcctgggtgacagagtgagactctgtctcaaaagaaaagtattacggtagaacatcggcagatactacacttgatcttagtcaaaaggctgagacgtgatagaacatcattagaaatgaggtgttaataaactgaaacctctgccttaagggttttttaaggctgggcattgtggctcaagcctataattccaacactttgggaagccaaggcaggaggatcacttgagttcaggagttcaataccagcttgggcaacatagggaggcccatttataaaggctgagtgtggtggctcactcctctaatctcagcactttgggaggcggaggtgggtggatcacaaggtcaggagttcaagaccagcctggccaacatggtgataccccgtctctactaaaaatacaaaaattagccgggcttggtggcgtgtgcctgtaatcccagctactcaggaggctgaagcaggagaatcacttaacctgagaggtggaggttgcggtgagccaagattacgccatttgctctccagcctcggcaacagcaagactccatctcacaaaaaaaacaggccgggtgccatggctcacgcctgtaatcccagcactttgggaggccgaggcgggcggatcatgaggtcaggagattgagactatcctggctaacactgtgaaaccccatctctactaaaaaatacaaaaaatttagccgggcttgatggcgggcgcctgtagtcccagctacttgggaggctgaggcaggagaatggcgtgaaccgaggaggcggaacttgcagtgagccgagtttgcgccactgcactgcagcctgggcgacagagcgagactccatctcaaaaaaaagataatagtaaataaaaataaataaataaatataaaaacaaaataaaaaaattagctgggcgtagtgacacacctgcagtttcatctactcgggaggctgaggtgggaggatcacttgagcccaggaaggttgaaggctgcagtgagccatgatcatgccactgcacttcagcctgggtgacagagtgagactctgtctcgaaaaaaaaaagttttaaaaaagtcatatgcaatgctgcttttgcaaatgggaaaaaagcttttacggcttttatatcctatttttaacttgctatttacttatgcttatagttgtacaatcaaacatatattaaactactatgagagtataaagcagtaaaatagggggaaaatatttcaagttttattattgttctctttgatatttgaccatttaattacctgaaaatgtgaacttgctgtttataacctgaaaatgtggaagtatttgttgttatttctgtgtccgttttttctctcctaaaggagagactttctgttcctgcgcgcgtatgtgtatattttaaaagaacacaaaataaggctaagcacagtgtctcacagttcagcattttgggagactgaggtgggcggattgtttgagcccaggagttcaagactagcctgggcaacatggccaaaccctgtctctccaaagaatacaaatattagccatgcgtggtggcacacacctgtagtcccaggtactcaggtggatgaggcggggagggtcacctgagcctactagggaggttgaggctacagtgagacaagagtatgccactgcactccagcctgggcaacagagtgagaccctgtctcaaaaaaccgtgaaacataaatttacctttyaaacagtttttaagtgtacattataattttgttaactatatgcacattgttgtacaacagatctctagaactttttcatctcaactgaaactatacgcattgaacaacaccttttttctcccctcaccccctagcaaccacaattcttctttctgtttctgagtttaattattttagatagctcatataaatgggataatgtagcacttgaatttttgtgattggcttattttacttagccattatctaagacaatacttagataatgtctaagattcatctatgttgtagcatatgacaggattcccctctaaaagctgaataatgtcacaatactgtgacattatttaaaaatgggcagtgtcatagtatatgtgatattattcacttttcttttttctttttttttgagacagtctcgctctgttgcccaggcaggrgtgcagtggcttgatctcggttcactgcaacctccgcctcccgagttcaagtgattctcctgcctcagcctcctgagtagctgggattacaggcacacaccaccacacctggctaatttttgtgtttttagtagagacagggtttcaccttgttggtcaggctggtcttgaactccagacctcaagtgatccattcgcctcggtctcccaaagtgctgggattaccgcacctggctattcacatttctttgtccattcatacattgatggacattgaaggttgctctcacatttcgcctgttgtcaataaatgctgcagtgaacatgagtgtgcaaatatctcttcaagatccttgctatcagttcttttggatatatacctagaagtgggattcctggatcgtatggtagttttattttgaagaacttccgtaccggtttccatagcagctgtaccgttttatattcctgccagcagtgcataagggttccaatttcttcacatcctcagtaacacttgttatttgttgttgttgttgttttgatagtggtcattctagttggtttaaggtgatatctcattgtgtttttgatgtgcattttcctgatgattagtgatgttgagcatcttttcatatgtttgctggccatttgtatataatctttggagaaatgtcgattcatgctttgcccatttatttatttacttttaagttattttatttttttgacaggatcttctttgttgcccaggctggagtgcagtggcatgatcacggctttgcccatttttaaattaagctattttttttgtgattgagttctagtggttctttatattctggctattaaccccttattcaatatatggtttgcaaatattttttcccattctttgggttgcctttttactctgttgatcatctttgctgtgccaacgtttttaagtttaatgcatagtcatgtgctatgtgatgacattttggtcagtgatagaccacatatatgacagtgggcccgtaagattataatggagcatactgcgttgcagatcaagtagaggaaatgattaatattcagtgatggtgctgggacatttggttttccatgtgaaaaaaatataaataaaaatatgtatactacctaggtttgtgtaagtacactctgatgttcgcacagcaacaaaatagctaacaatgcatttctcagaatgtgtcccattgttaagtgacacgactgtagtcttttttttttttttcaggcttaattcactttatttttcttgtataaaaaccctgtgttgtagccacagctggagcctgggtcctctgcatggagactctggtgtgggtcttgacgagatggtcagtgaattcctgacaggaagacttgatgaatacagtctccttccagaggtcgggggtcaggtagctgtaggtcttaragatggcatcaaaggtgtccttggtatagttacccagggcggcagtgtagcccctggctaaggtgtagcagtcatcaataccagccatcataagcagcttcttgggtacaggcactgagacgatgccagtgcctctgggcgtagggatgaggcgcaccagcacagagccgtggtggcctgtcggcttgcaagggatggtgtggggcttgctgatcttgttcccccagtagcctctgtgcacagggacaatagagagcttggccaggatgatggccccgtggatggcagtggccacctccttggagcacttaacacccagaccgatgtggccattgtagtccacgatggcaacaaacatcttgaacctggtgcgctggccggcacgggtctgcttctgcactggcataatcttcaaaacctcgtccttgagagaggcccccaggaaaaagttagtgatctcagattccttcatgggcagggagaagacatacatctcctccagggacttgatcttcatgtgcttgaccaggcggcccagcttggtgataggcatccactctttatcctcggccttgcctccatgagctctgcggcctcagccgcggcctcagccccagccccggccccggatgccactgccgaaacctccacggaagccactgcatttccccatcccaggcgatccccaccaccggctgccaccagcatcatctgccatttggtgttttctcagagaagcatctatttttgtttttgttgtgcatgtgtgcttttggtgtcatagccaggaaatcatcacttagtccagtgtcatgaagagtttcccctatgttttcttctagttttatggttttcagatgttaacatttagtttttaatccattttgtgttaatttttgtatatttttgcccatatttaaaactttagtgaaataacataatttaacattatttgtcagcattgttgcctctgtttaccaagtgggcttagagcctctaatgtaacatatatatatatatatatatatatatatatatatatatatttttttttttttttttgagatggagtttcgctcttcttatgcaggctggagtgcagtggtgcgatcttggctcactgcaacctctgcctcccgggttcaagcaattctcctgcctcagcctcctgagtagctgggattacaggtgtatgccaccacatactggctaatatttgtatttttagtagagacggggtttcaccatgttggccaggctgatctcgaactcctgagctcagatgatccacccgcctttgcctcccaaagggctgggattacagacgtgagccaccgcgcccagcccatatcttcattttaagaaacattgttatctactattggtccagcaaaacgtgtgtgcatgaaacaaagatatggcagtagaagggtaaatactatagtaagaagtctaggccgggcgtggtggctgatgcttgtaatcccaacactttgggaggctgaggtggggggatcactttgaggtcagaagttcaagaccagcctggccaacatggtgaaaccccatctgcactaaaaacacaaaaatcagccaagtgtggtggtgggcgcatgtaatcccacctactcaggagtctgaggcaggagaattgcttgaacctggggggcgggggttgcagtgagccaagatcgccccaccgcactccagcttgggtgacagagtgaaactccatcttaaaaaaaaaaaaacacgaagaagagtgtaaatcagaagtattaataataagagacaactgaaaagtttgttttgttttgttttgttttttttgagacagagttttgctcttgttgcccaggctggagtgcagtggtgtgatctcggctcactgcaacctctgcctcccgggttcaagtgattctcctgcctctgcctccggagtagctgggattacaggcatgcgccaccacgcccggctaatttttgtattttattagagaccaggtttctccatgttggtcaggctggtctcgaactcccaacctcaggttacctgcccgcctcggcctcccaaagtgctgggattacaggcgtgagcaaccacgcctggccagctgaaaggtttttaagctgagacacagataatcagatttgtgctagaaaaattattttggtataagagatgcgtcaatgctaggaagagtggaaacaggaaagtcagttaagaagctttaaaaaaaaaaaaaagtgggctgggtgcggtagctcaagcctgtaatctcatcactttgggaggccgaggcgggcagatcacctgaggtcaagagttcaagaccagcctggccaacttggcgaaaccctgtctctactaaaaaatacaaaaaatttgctgggtgtagtggtgggcgcctgtaatcccagcgactcgggagactgaggcaggagaatcgcttgaacccaggaggcagaggttacagtgagcctcgatggcgccactgcactccagcctgggcaacagagagagactctgtctcaaaaaaaaaaaaaaaaaatatatatatrtgtgtrtgtgtgtgtgtgtgtgtgtgtgtgtgtgtrtatatgtatatatgtatatgtatatatatgtatatatatgtgtatatatatatatatagcataggcaacttaaaccatgccagagggaattgaaaatagggacctacaggagaaacaagaaagaatgaatactagttggctctactcaataggaagacccagggagaagttggaattaactcagatttccagcctgggtgactctgaatggctgtgaatggcagtgttcttattaacagggattgagaaggcacataggaatagaacagcattacccttggacagtgaatttaaggtgttgcctattggacatctgccatgtcttgtcacttttcgatatgggtctggccctcaggcaatagcagagatttgaatggagctgtagagtcacaagtcatctttatagacatgttagttgaagccatacgcatagatgagctcatctgggagatgaatttaaatcaaagagatcaaaatttccttgtttcacttaactaatcttcttagccatttactcttattgtgagcctggcttttccacctgaccaagttcttcttgttccaggaattcaaagataaagaaaccaggctctattatttctttctgattgattgatatttggtttctaaaagaaattttcttccttctctacattcacaaactcttctattcttttgccacattttatacacttaagtttaaaccagtttccatgtatattttgtctatattatgtttgttattgagaaataggcatttttgggaagaaagaatttggcattttggaaataatcagaaaattaaaaaatgcacacaccactttcccattcttctccccaccccaacccctacccctatcctcaaatgcttagctagtgaaatattaaaatgttgtaatagaaattggagtcaaggtctccttgctgaagagaccatctattttcagagactggaaggagagagaacaaaccaatcaagagtcattggtttgttgcctctattgttttatttctgacctgygcaaatagcttttgaagtggagatatgctagttcttggcaactaatacttttctgggcatgcattttatgaaataataggtatgtatctgcctcattcttttaggctatgtgtttctctagtttaaaaataatttgccaatgaaggtctatctgtatttatgcaatccctaaatttgtatttaccttatgtgcgtatgttttaaatgtgtgtatggaggcttattttggatgctgtagatgggagagagtgccatcatctagtacactgttatatgccacaagaaataattgcacagccatttcttaattttaaggtttttcttttcaacaggttttgcactgattgcaaaaataaagtcctccgagcatacaatatccttattggtgaacttgactgcagcaaagaaaagggctactgtgctgcactttatgaaggcttgcggtgctgtccacatgaacgacacatacatgtttgctgtgaaacagacttcattgcacatcttttgggtcgtgctgagccagagttcgcaggagggtatgagtatgtaatttgctagaatgggctatctagcgctttgcttcattttattactgraagtttattttcatcaccttctgcctcagtacatatgatatatgtataaattaaagtatgcctgtaaagattttgcttctctttaaagtatgcatttcttaattgactgaaaatagggaaaaactgttctctggtgtttggttcagtcctctgctagttcttgcttgaagggaggcaggcttttttggctttcattgttacagactatcattttcatttgaaaatgattagaagggatttttctccctctatccatgcattatcatgtgtaaattttattcacaataatggtttttgcataagtcagatctttgcagtaggggattaagaaatgccttattgaatgtaattcacgaactgtgtatattatattattattactacacagaaacctaaagtagtatctctggctttgttgtaaaaataaaatcagatgatgatgttaatagaataaatcaaatgcatttccttttgtatttagggtatcaaccctcatttgagtgcctactttctgctagaatacaaagggcttttttatcgccaaagttctgtgaacacttgtaaagactggcctggtggaggactcttgcccatgatgaatcactttggcattgcctttctcaattcctcctcaaaacaaaaaacctaaagaaggaaaaaatgttttgctataattggaaagtaaaaggaactgttgtgtctactatgagctggacacttctatgtgattgctttgtgccctaaaacccatctttttagagccagttcctgaattactttatttttagcaatacgaggactaaattctacttgcatgtgtatttctcattggttgtggacatgcatgcttgtatagcaacatatacgttgagtgtaaatgtataactgtcttgttactaggtaagcacattgtgtttaaaacctgaacttgcagctgtgttatccatcttttactgtttcagttaaaggtattagtgtgtgattattcccttttataggcgaagagaaaggcatgcaaagacaatagatatagctcaagaagaagttctgacctgcttgggaattcatctttatgaaagactgcatcgaatctggcagaagctacgggcagaagagcagacatggcagatgcttttctatcttggtgttgatgctttacgcaagagttttgaggtaagaacagtgggctgttccagtatctmagattgcttagtcacgttattggactgaatcttaatgtaagccaccagtgcctaaaaggactgtccatcactgatagagcttcatggatttggctggatattgktacatggctttgggttggagtgggggtggtctagggaactgggatttagaagaagttgatggatttaaaaaaatgtttttaatcctgttaactttgctagctttggtttttagactttctcagagtagaaaactgaagatgtttaataagatgctgctatgaaacataactagtgaggctgggcatggtggcttacgcctgtaatcccagcactttgggaggacgaggcaggcggatcacctgaggtcaggagtttgagaccagcctgaccaatatgatgaaaccccgtctctactaaaaatacaaaaattagctgggcgtggtggcgggcacctgtaatccagctacttgggaggctgagacaggagagttgcttcaacctgggaggtggaggttgcagtgagccaagatcacgtcactgcactccagcctgggcaacaagaacaaaactccgtctcaaaacaaaaacaaaaacaaaaacaaaacaaaaaaaacacacataactagtgaaaagttaaatgcccccaaggattaagcaggaaatgttaaaaccttcagtgagtttcattttgcctgctaatgtccagtagtatgaagtaaatgctgtgtgaatgccatggtataaggactatttttctttctttcttttcttttcttttcttttttttttttttgagacggagcctcgctctgttacccaggctggagtgcagtggcatgatctcggctcactgcaagctccacctcctgggttcacaccattctcctggctcagcctcccgagtagctgggactgcaggcgcccgccaccacgctcggctaattttttgtgtatttttagtagagacagggtttcaccatgttagttaggatggtctcaatctcctgacctcgtgatccgctgcctgccttggcctcccaaagtgctgggattacaggcatgagccacggcgcccagcccttactcgttttctctttgtatttttgtaccttcagagactagatcatctaatcaggttaaatagttttttcattatgtcagtaaatggtatgtttacttttgttgtgttaaaattctgaaatttaggccagatatggtgtctcatgcctgtaatcccagcactttgggaggccaaggtgggcggatcacttgaggccaggagttcgagaccaacctggccatgatggcgaaaccctgtctctactaaatatacaaaaatcagccagtgtggtggcgcaygcctgtggtctcagctacttgagaggctgaggcaggagaatcgcttgaacctgggtggtagaggttgcagtgaactgagatggtgccactgtactccagcctgggcgatggagcaagactctgtctcaaaaaaaaaaaaaattctgaaatttaaaactagaatcttgctggtttggaataggagtgtgtatattaccacagaaaacaaagggaccgggcacggtggctcacgcctgtaatcccagcacttcgggaggctgaggcgggtggatcacgaggtcaggagatcgagaccatcctggctaacayggtgaaaccccgtctctactaaaaaatacaaaaaattagccsggcgtggtggcggrcacctgtagtcccagctacttaggaggctgaggcaggagaatggcgtgaacccaggaggtggagcttgcagtgagctgagatcatgccactgcactccagtctgggcgacagagcaagattccgtctcaaaaaaaaaagaaaagaagttctgaccaatattcaccctcaaccttatttttataatagatgaccgtggaaaaagtacagggtattagcagattggaacaactttgtgaggaattttcagaagaggaacgagtaagagaactcaagcaagaaaagaaacgccaaaaacggaagaatagacgaaaaaataagtgtgtgtgtgatattcctactcccttacaaacagcagatgaaaaggaagtaagccaagagaaggtaatatttcttaatatcaactcttaagtgtgtatgtattgcttgtagatagaagtacaggccaggtgtggtggctcacgcctgtgatcccagcactttgggaggcccagggtggaggtatcacttgagcctaggagtttgggaccagcctgggcaagatagtgagatctctatctctatttattttattttatttttttaataaaaataaaaagtacagtcgtcccttggtatctgtggggtttgattccaggacttcctgtagataccaaaatctgcagatgtgcaagtccctgatgtaaaatggtgtaatatttgcatatagtctatgcacatcctccttatacttttatttctgagacagggtctcactctgtcacccggactggagtgcagtggcacaatcatggctcactgcagcgttcatctcccaggctcatgtcatcttcccacctcagcttcccaagtggctggaactacaggcttaccccaccaggcccagctaattttttgtatttattgtagagatggcgttttaccatgttgttcaggctggtctccagcttgtgggctcaagcaattctcccacctcagcctcccaaaatgctacaattacaggcatgaaccaccrtgcctggcctcttgtattcttaaattatctctaaattataatacctaatgcaatgtaaaagctatgtaaggctgggcatggtggctcacgcctgtaatcccagctacttgggaggctgaggcatgagaatttcttgaacccaggaggcaaaggttgcagtgagccaagatcgctccactgcagtccagcctgggcgacagagtgaaactctctcaaaataaataaaaactgtttaaatagttgttatactgtattgtttagaaaataaggacaagaaaaaagtctgtacatgttcagtacagatgcaggttgattttttcccccccaaatattttcgattcttggttgaatttatggatgcagcacccacagatatggagggttaactgtatggctttttgctagatttgggcatttttactatgcttttccagatgtgagctcctgcagtttttatatcagcttttttcctactgtagtctgtataagccagaattttaatgtcatgtctatgttttattaagacaatgttgagtagttatctctttacctgactttaatgtattattagatcaaagtcaaaatatagaaagccacctctgtgcatgacctagagcagttctcaagtttttggtcttaggatccctttacattcttaaaaattaaggtactcaatgagcttttgtttatgtgggttatacttaccaatatttactgtattagaaattaaatgataaattttaagctactccttcaaaaataatgttaactaaatattttttcaaaaataactattttctaaataaaatgagagtgagaagaatggtattatactatatatattttttgcaaatatctttaatgttcatcttaaaaggaataagctagattccttttttttttgagacagagtctcgctctgttgccaggctggagtgcagtggcatgatctcggctcactgcaacctccgcctctcgggttcaagcaattctcctgcctcagccacccaagtagctggggctacaggcgtgtgccaccatgcccggctaatttttgtatttttagtagagacagggtttcaccatgttggccaggatggcctcgatctcttgacctcgtgatccgcccgcctcagcctcccaaagtgctgggattacaggtgtgagccaccgcgcctgacggaatatactagattcttatatctgcttctgcattcaatctgtttccatttattggcttggttgaagcatatgaagaaagtctagtctcacacagatattatatggtaggaaaagtattttattttggagcagagtcttgctctgtcacccatgctggattgcagtggcacaatcttggttcaccgtaacttcctcctcctgggttcaagcgatttttgtgcctcagcctcccaagtagctgggactacaggcgcctaccaccatgcccggctaatttttttttgtatttttagtagagatggggttttgccttgttgcccaggctggtctcgaactcctgagcttaggcagtctgcccgcttctgcctcccaaagtgctgggattacaggaataagccactgtgcctggctgggagcagtattttaatataaaccttttcagatagttgtggatattcttcaatactacactttgaccagtggtagtttctaaaagattcattgcaatatggaatctggcaccttatcaatgacctttttgtactctgttaaattagaatccgttggactatattggactttgaatagatcttttactcatgcattgttttgtaacatcatgcattggaatttatttcaaagttcactgaattatgcaggtcagaaaagtccaagtattaggaagcttcaagttcatagcactgctggttgcaaggccaaaattctgattgttgtttcaatgtttgagttttgtcattgacaacagttgttgttcattgtttcctttgaagtaacagattgacttcattcatttttgagaaaatgcctgctaaatatccaagtctctcagtttgtctctcatttattcgttcaagtgaacttgatgttccaggaaaaaagttcagcttgcacctcaaaaagtggcacaagtacgtttccttgagacagctgcaatagaaatgctttaagcatacttcccatttgtcacatacttttttttttttgagacggagtctcactctgtcgcccacagtggagtgcggtggtgtgatcttggctcactgcaggctctgccgtccgtgttcaagcaattctcctgcctcagcctcctgagtagctgggattacatgcgcctgccaccttgcccggctaatttttgtatttttagtagagacggggtctcaccatcttggctaggctggttttgaactcctgacctcaagtgatccacctgcttcagctgcccatagtgctgggattacaggcatgagccactgcacctggccccacatagactgtcaaaaagatttctgttgacagggcgtggaggctcatgcctgtaatcctagcactttgggaagccatggcagaaggattgcttaaggccaggagttcaagagttcaagactagcctgggcaacataacgaaaccctgtctctacaaaggaataaaaaaattaggcctggtggtgtgcttctgtagtcctagctacttgagaggctgaggcagaaggattgcttgagcccaggagtttgaggctgcagtaagccatgattgtatgactgtactctagcctaagtgacagagggagaccgtactcaaaaaaaaaaaaaaaggaaaaagtatatgtatttgtggttgatatctgatacaattaatatttttacagcttcctcagagacattcataagtgaaatatctttttgtgagagcgcttgacagttgaagaatacagtgattcttagcacactttggttagtactgtcttgatttgtgctaaggactaatatctttacccaccattacttttgtactgtcagtgtaaatgtcagtacagtgaaaatgccacatcttactattaggatgaaaatagttttgatctagggaataaaatgtagctgttatggagtaaagctcttgactctctcttaatgttgatccttaaaggaaacagacttcatagaaaatagcagctgcaaagcctgtggcagcactgaagatggtaatacttgtgtagaagtaattgttaccaatgaaaatacatcatgtacctgtcctagcagtggcaatcttttggggtcccctaaaataaagaaaggtaagtaaataatttctttttaaaatgaactcttaactctattctttcttactgttaaatgtaagagcttttagagattctgtgagctagaattttaaaactgctttatagttccaagaatatcatataatttagtcagatacttaatatttcctttttctttatgttctttgacttatttttgacaaaaaygaaaaatggtaaattcctaatcatattttcattatttaatttactttctacttaaaaaaaaaatccttcattggaaatgttctacttttaataagccattaattatgagatttttctgtggtccccaaagagttcactctttgtcctaatatacttattggtatgttaatagtaactctcacttgatttattctcaggcttatctccacactgtaatggtagtgattgtggatattcatctagcatggaagggagtgaaacaggttctcgggagggttcggatgttgcctgcactgaaggcatttgtaatcatgatgaacacggtaggctcacattaagtttcccagttatttctactacatggctgacttaagaacataaataagaaggattattgatttctgcaggtgatgactcttgtgttcatcactgtgaagacaaagaggatgatggtgatagttgtgttgaatgttgggcaaattctgaagagaacgacacaaaaggaaaaaataaaaagaagaaraagaaaagcaagatactgaaatgtgatgaacatgtaagtgtcataacttgtaattcttaaacctttgctgttgaggacagaacacgtgttttccttggagtggcatatgtgcagcttagctgctaggatttactttttttagaatgagttctttwtgcagttccattgggtgctcatcgtgtgagagtgtgggttgggggcagagagagatgtgatcatttgtgcaacagtccttgtgagtcagaaattcaattgttctttttatacttttaaawttataagctgtgtaatcttaaacaatttgtttagtccctatcatattaggttctatgaaggtgaagtgaatgtatattggcaggtgtggcatagtgtctagtacatagtaagtgcctggtaaaataaaatgaatgccagctgctactattacttagtattccttctaaaggtttaatactatgtcaggatttttttgagatggagtctcactctgtcgcctatactagagtacagtggcataatcttggctcactgcaacctctgcctcccaggttcaaacaattctcctgcctcagcttcctgagtagctgggattacaggcgcatgccaccatggctggctaatttttgcatttttagtagagatggcatttgaccatgttggccaggctggtcttgaacacttgacctcaggtgatccacctgcctcggcctcccaaaatgttgagattgtaggcatgagccaccgtgccccgcttttttttttttttttttaaagaataattgctattatatcatgcctttttacctgtgaaatcctttgctgtggtatcagatccagaagcttggaagctgtattacagatccaggtaatcgagagacctcaggaaataccatgcacacagtgtttcaccgtgacaagaccaaagatacacatcctgaaagctgttgcagctctgaaaagggtgggcagccattgccttggtttgagcataggaaaaatgtaccacagtttgcagaacctacagaaacgttgtttggtcccgattccggaaaaggtgccaagagcttagttgaactccttgtaagtattccatgtggtcttactgtacataactgtttgggaayggggtggatgtgggaggggatagtatttgagggcttaaggtaggtagttgaaggaagcttatgagaaattaagggtagtatttcattattgtttggggacttcatttctgtccttccactcgtggtttatgcaactactctggaacacgtttccatggccgcctctgtctcagtagaagacattataggtattccttgagttacagtggggttacattccaataaacccattataactcaaaaatactgcgagttgaaaatacattcaacatcccaataaaccctttgtaaagttaaaaaaaaaaaatcccaaataaggctgggtgcagtggctcatgcttgtaatcccagcactttgggagaccgaggtgggtggatcatgaggtcaagagatcaagaccatcctggccaatatgatgaaaccccgtctctactaaaaatacaaaaattagctgggcatggtggcgtgtgccagtagtcccagctacccgggaggctaaggcaggagaatcacttgaagccaggaggcggaggtttcagtgagctgagatcgtgccactgcagtccagcctggcgacagagtgagactttgtctcaaaaaaaacctgagtagaaccattgaccattgttaagtcaggaccatctgtagttaggagaaaggatagaggtagcattgtattcagtagtctgcctccttgaagtaggttactgtaagcaaactttgcctttctgattggcaagttatggtagccacccttccataccagaaagaatatacaatttgaactagaggttgctttcttcttttaggtgtcatgtagggtaagactccagtcctgagactttttacctgatccccaactgacccagtgcrtagtataggtggcccttggaggaggggaggaagaagagtggtgtccttttcattagagtcctgatggaaccaaatccttcggaatactagcttttttctttttcttttttttgaggtggagttttgctctgttgcccaggctggagtgcgatggtgcgatctcggctaatcgcaacctccgcctcccaggttcaagcgattctctggcttcagcctcccgagtagctgggactacaggcttgtgccaccatgcctggctaattttgtatttttagtagagatgggtttctccatgttggtcaggctggtctcgaactcccaacctcaggtgatctgcccacctcagcctcccaaagtgctgggattacaggcgtgagccaccgcgcccagctagtttttttcttttttatggttgtaaagtttagttttaatatttatttattttttttttttgaggagtctcgctctgtcgcccaggctagatagagtgcagtggcacgatcttggctcactgtagcctctgcctccaaggttcargtgattctcctgcctcagcctcccaaaatgctgggattacaggtgtgagccaccacctgtataagtttaatgtttaaaagttttaatggttgtaaaagtttacttcttaagtagaaaatggttatcttttacttagtttgtagagatgactgtttcaagataggactaactggagatacgtctggctacttaaaatatggtaactagttgtaacatctttaattagttattttttcaaggccaaggtatggtggtagtttgctaggctcataggcttctaggagaaattatagattcaaggtttcaactcaaggagttggattttattctcactactttcttaggcagaatgacatgatgcttattctgcaaacactccaattaaaggctttatgtgactgatgtgaaactaaaaagttagactggtttaatttttagctgtcctyctccattacataacattttgcattcttaagtcatagtcttaactactgctttaatttgcaggatgagtctgaatgtacttcagatgaggaaatctttatctcacaagatgaaatacagtcatttatggctaataaccagtctttctacagcaatagagaacaataccgacagcatctgaaggagaaatttaataaatactgccggttaaatgatcacaagaggcccatttgtagtggctggttgacaacggctggagcaaattaaataaataaaatagctctgtctttcaatgaaacactcacgatgactactgcgccttctctttcgaaaaactcttaatttagtgacttatggcaaaattttatcttaaatcaatgtgattctttcttgttttgggagacggtggaggtatcctcattagttctttcttcaggcttgtgtctttagttgcgtggctgcgcaggcctgccatatgatttaagccatctcttttcattaaatgtttctcttcctgtgagacttactaaagcaacttagtggcaaaaagtaatgttgtacttataattctgtacagaaatgacaatgagctgaatatatggttttacaaagtagacatccacttgcaaaatgtttggatgtaatgttaaagcgcaatgtgcaaaatttaaaataaagaatatttattaatacgcacagtaaaatttgctgtacatgtttctacttaatatgtggcagtactttagtatttgccacttgtggacttgatgcttggccagtgttgatgttagaaaggatgaaggacagagatacagattgttgaagacaaaaatcttcctttgatgagaattgacaactgagaaaagcagttttccagtctttttcttttgaggagatactttaaatacttgctaccatcttactttcccatgagactttaattgctattattaaaggttccctaatacataatacaaagtacttcttaaattcagaggttcatattgacctagaagaataaaaacaaaacttggcagaatttcaaccaagggttgcccgataagtaattgctcaacatgtaagactgggctcagaaggctgcactgagagctaaccacattgtgggctgtttaaatgcatgtgaggttcagccttatctggtatccagtaacaaagtcactgtggtcttacagtttactcctgtcacagctgtgagtactaaaggagagagttccccccaggagtagcattttgctgccatttaaaagatccagtcaaatagctccgtagacacatgatgcttagagatttgtgtctacatgtttataatacttggtggcagcataaaatcatgggacaatcagtacttctgtgcaatggaggtggagtgaattttatgtgcttttaatcagattttgagttagatttcaagtgggcagcagcagaaacttagattgaattttcatagtgccatttcttggatccacctcctgagttgtctttcaaatctaaatgttgtataggaatggggcagaggtaaaaggactcctcttggaccctttttgatttcatcccagaatctaaaaaatgactgtgggtctcccacagcccttggctcagaggtgaatcccctcttcaccactgttaagagtcaaatgttcttttgagatccctaaaaggaaaggctgatttagtttagttttaatctttgccattggggccaaacacaggataggcaaatgagtgtttttgaatgaataaaccagccacattcaccgcttactccattgcttgctggaagggagtcaggtggttattcaaagatgctttttctttaagagaatggctatattaagtacgcagttttcagcacttttagtaaagcgagctctactctgaacaaaaccagcaacccgagaagcgataatgatgtgaagacagttgaggagcacatccctggcgtaagactggactgcctgtggtccaaaccatgcttcaccacgtcagtatactcatctttaaaattaagatactaatatgtgccatctcagcgcggttgtgtagattagttactatatttaaaatgcctgctacaccataagcagcaaatgttagatactgttttaatctttggcatatatcatgatacatttgctacagtggggtaggggtaagcgtgggggtctagggcagttagacacagtgggccatttagggacagaataccccagtacacgtgtacttaggagtatttcagttctccgtggctagtaaagccaagggatcaggtagggtgaatgagtccttcccaaggtcacctagcattgatggcggagacactcggcgttttctgggccgaatcccttcccatcagccaccggcgggtttgggagggtgtggaagagtgttggagtcaccttaagtgcccttaattcctcatcctggcattagggttcaggagtagagaagggagactaagcgggacgcttcagtatgcgcccttggggctgaaggaacctccccgctaaacctcggtttccctgaccccaaagggcagcgctcactggggaagcggcgccgccagctgccaggacgctcccgcgcagcccggtttccctacgccggggcggggcagaggggcggaaggggcggggcggccgggccgcggcggcctccgactggatacggcggatcgccgggggcctgagggtggagtcccggccggaggcaggccgggactctggtgggtctaggcgcggatcggacccaagcaggtcggcggcggcggcaggagagcggccgggcgtcagctcctcgacccccgtgtcgggctagtccagcgaggcggacgggcggcgtgggcccatggccaggcccggcatggagcggtggcgcgaccggctggcgctggtgacgggggcctcggggggcatcggcgcggccgtggcccgggccctggtccagcagggactgaaggtggtgggctgcgcccgcactgtgggcaacatcgaggtgaggccgggccgagggcggggacgtcgcgggcgggtcgtttccccggagtcgggttcacctgcccgccacgccggggccctttgctctagtcggggcggcctctcggatcccttaaggcaggcttctcccttccccttaagtctcatctttgaaggagccgtttgccctgacagcccctgctcgagttaccgaatctccgaccccggcatctccccacccgcccctcgggtctccccagggtattggcccgaggaaggggaagccggaggtcgggggtggtggtctcgcccctgtggccttctcgcccccggcggccaagtgcctctaatctccagaagtcacccaccacgcagggcaaggtggctggccaaccagatgggcaggagccaggactgaggttggggttggggtgggagctttactgaagagcctcagccccgccccctcacctcgggggtaactcatgcccagtggcatgaggaatgaatggaatattcattagtgggccctcctccactctcctggggcgaacagagtgggtgaaatcgggcggaaaccttgagaggataaagcaacctggaactccttactctgctcttgacgtggggttgggagccctcagagctcagagaaaaatcaagatggccattttggagcagggaggaatttctgtgctaggctctctctggatgtgccctgtaagctcattctcagtgtcgggctagtgcttagctgcagggctttatctccaccgtgctcaaagtcctcaggtagggaaagggtaaggaggccttgggtgggggcagagggagaaggtatacaggaaggaggactgtcccctcccctgctgctgaccaaaggtatgctttataacccagataatcccaaggtcacctggctccatcactgccccactctttcctccctttatcctattctgaggagctcaggacccagccccagccttggagcccagaggatcaggccagggattaaacaactggattctgtaattctgaagccactcttgccttctcacctactcccctaccgcaagctagccaggaagggggggcctgagccccaaggggatccccaggctgatcactcagtcccagggtgactccatgtctgagaggagaatgcccctgttgtgagggggtgacatgatgttgtagatcattactgaggggaggtagggagatcaggtggcacaggtggggcaacaggaaggcagtgacagggagaaatacattctgagctcatcccttctggttttcttgtggcaggaattttgagtctagaggaggaagcgggaagatgtacaccaggggaggggaaagctgcagtcttccttgcccacagtctgctttgattgattcagtcattgatgttaaagcagaatttgggttctagcttcctacagagaaaactcctgtttcctgaagtgatcaaatgtgggtaaaatctggtgaaggggggtttctgattctcagaggactataccttttgaactcacagaaagtcaaagcagaaaagaatgtcccaagacacccgatcctgtcctttattcctggctcagcttgggaggaggaaggggctccaggccagggcagctggccaagctggccttcctctagggcaccgcacgccccttccccctcgcccacgtctacacagtcaccatcacaaggctcaagtgcccagtcactggcttccaaagaaggccacagaacgtattttcttcttgcctctgaatgtcagcttccccctgggctgcctctcagtggctctgccttctcaggtctttcttggcatgctgagggcctggagatgcacagggggtgttcaatggcacctgccacctgaattgcctcatagtctcctgagaaacctcagaggggagggtggtgcaccagggctcagagagaaagaatctgtcctgactttctgacccctcctttaggtagggagagaagattggcagctgggcttggttgaaaggcatgtctgagaactctgagccagttggctgcagtttgcgaggggaggggaatagttcagagatgagggactggctgacacaatgcagaagaagctgggttaaccagcccagtgactctcgggactggtgtagaagcatgaagtggtggagaggcgcatattacctatgggcagaagaggtgttcctgttgaggaagaggcagaaaagagagagcactccattctctaggtccctggcccctgttccacccaggacttgagtttatttatttatttatttatttatttgagacacagtcttgctctgtcacccaggctggagtgcagtggcgtgatctcagctcctgcaacctccgcctcctgggttcaagtgattcttgtgcctcagcctcccaagtagccaccacacccagctaatttttgtattttcagtagagatagggttccaccaagttagccaaggctggtctcaaactcctgacctcaactggtccacccgccttggccttccaaagtgttgggattacaggcatgagccaccacgcccagccaggacttgagtttatagtgaggtttctccattgataacagccttttcccttcatcactcggggagcactgtcatcccttagactttgaccaaagaggacagacttaggggatgggcagtccaacatcttcgtggctgaaagtcagctgccaaaggagcatgttttatgagtgtgacgggggtcggggtctgaggctggctagggagccgtgggagtgagctgctcaccccagtcagacccctgttgggtttcataggagctggctgctgaatgtaagagtgcaggctaccccgggactttgatcccctacagatgtgacctatcaaatgaagaggacatcctctccatgttctcagctatccgttctcagcacagcggtgtagacatctgcatcaacaatgctggcttggcccggcctgacaccctgctctcaggcagcaccagtggttggaaggacatgttcaatgtaagagctccaagcctccatcttccaggtggagggtggggaggagagaggggagccaggggtttgtgaaccagagtgctgctggggacgggacatctaggaagagggagcttcgggttcccacctggggcatcttgactctctcttggcttcttgccctaccagagggatagagagtggatgaatggccatatcagctcttctcttctttgagcccctggaggtagttctttttttttttttttttttttttttttgagatagagtcttgctttgtcacccaggctggagtgcagtggcatgatctctgctcactgcaacttccgcttcccaggttcaaacgattctcctgcttgagcctcctgagtagctggaattacaggcacccatcatcaatgcccatctaatttttttgtatttttagtagagacagggtttcaccttgttggccaggctggtctcaaactcctgatctcaggtgatctgcccatgttggcctcccaacgtgctgggattacaggcatgagccaccacgcccgacctgaaggtagttcttaaagtctagagtgatttccttgtgttagaagaaagattgttaggggagagaactgctgcctgttgaatgtttcccacttgtcagtcctgtgcctgggtgcttgggaacg

SEQ ID NO: 97936 - DNA, 22198 bp, Homo sapiens
gaggcagggtttcaccatgttggtcaggctggtctcaaactcctgacatcaggtgatccacccacctcagcctcccaaagtgttgggattacaggcgtgagccactgtgcctggctggttaaactgtctttaaaaagccatcggaaaagagaataagaataaataaatgaaataacaggaaaaggtgttttgggagtaccgtggtcttggtgtccttcaaagactggatggtataattggcttgttccatgttgaatgactgttgggcaagattgtcccgctgctgctcatacctttttagagtcaattgagaatggcaaatatatgaaccagatagaaatcctcaagaacaaagtatccccacactaaataagagtatttaaaaaaaaaacaacggaacaaaaaacttaaaaattaggtatcacgcagaaaaattggcaaaaacaatttaatcactctaacacaaatatcatttgatgtgtccctccagtctttttcctttgcatgtacagtcatgcatcgcttaacaatggggatatgttctgagaaatatgttgttaggcactttcatcattgtgcaaacatcagacaatgtatttacacaaacctaggtggtatagcccactattcacctaagctatatgatatagcctactgcttgctcctaggctacaaacctgtacagcatgttactgtactgaatattgtagccaattgtaacacaatggtatttgtgtatctaaacatcctatagaaaaggtacagtaaaaatacagtattataaccttataggggccagagtggtataatgcagtctgttctgtcattcattgacaaaaacattgttatgcagcacatgactgtattttagttataacactattttccacttaacattatagcatttgcttttttctgtgttgctgcatatctttttttttgagacagagtttcacttttgttgcccaggctggagtgcaatggtacgatctcggctcactgcagcctccaccttcctgggttcaagagattctcctgcctcagcctccggagtagctgggatcacaggcatgcgccaccacgcttggttaattttgtatttttagtagagacgggttcttccatgttggtcaggctggtctcgaactcccaacctcagatgatccgcccacctcggcctcccaaagtgctgggattacaggcatgagccaccgcacccggcctgctacatatcttaataagtctttataattattttctatgataaatatacagaagtgaaattcttagagcaaagggtaaaactatttttaaggctcttcatacatatagctaaatggttttccagaattttgaactccttgaagacaggcatattttattttgtttatttatttacttatttatttgtttagagccagtcttgctctgttgcccaggctggagtatagtggtgccatctcagctcactgtaacctctgcctcctgggttcaagcgattctcctgcctcagcctcccaagtaggtgggattacaagcgcatgcaaacacgcccagctaatttttgtatttttagtggagatggggtttcaccatgttggccaggcttatctccaactcctgacctcaagtgagcttctgtcttggcctcccaaagtgctgggattataggtgtgagccactgtgcccagccccaggtgttttattaattttgcacccataattaggtaatccatctgacctaatgtgtggtgttcaaaatgtttttaaaatacagttttatatcaaattataatattacctcaaagacttatgtcactatgttctttatacaatattggaaacaatctaactatccaactagaaaaagaatggtccgttcatggtgcaagcaaatggtagaatattataatctcattaaaaagtgtaaagtttccaaagaatatttaaaagaacagggagatgctcatgatataacattaagtggaaaaggaaaacctacatatacacactacaatttcatttcttctaaaaagttatatgcacacataccacgtatgcagaagcagaggaaagaaactggaagaaattagcattttaaaggtggttatttctagtagtaagaatctaggtaaattttattttcttctgttcatatttatgtattttccaagtttctacaatgaacctatattctttttataacaaaaaaggttacttaaaactagcaatgccaccaattaagaaggtaaatcatttcaccacaccctcaccagtctaggcattacaatttctttttccaatttgatctaatctaaaaggaggaagatggcatctggtatcttataaaaagtcattttaatataggaagagagacactgacaatctttctggctcctcgatagctaattatacctgacctctataaccctgcagaggatctcatcagctgaacagtctacagaggtaggcaccaaagatactagttagcttctgctcaaaattgggacatagtcacctaaaacaaattaaggatctttaaatttattctggtgggagggaacaaacatttaggattcctaacttcacaaacaaaaacaaaaaaggtacactctaaaataaataataggaaaaccaaaccctacagatctggtcagtccaaaacagtagtcactaaccatataaggctacttaaattatttaaattgaataaaatttaaacttcatttccttagtcacactagccacatttcaagtgctcaatagccacatgttgctaatagctactgtattgaacacacagatatagagcatctccatcatggcaaaaagttctatttagatggaagttgttacaacagataacaacccagctaactgtatttaattacacgtcaatgaaaatttgtaattaaatcaagagtgcttagaaaatagtatgaaaacctgaaggaatggaagaccatttctcttttagttaaacctgctagaggtagaaattgtgtgtgtaacttacatcctcttttgctttaaaactcgcaaggctttctgcttgaccatattctggagagaaaaacagatttaataaaaataaggtggaaaacacatatacggtaaaagaaatttcccatagcctcaaactcacatgcctacttcctctcttcttcaaagtagtaggcataatggctcctggattctgtacttcccctcccaaaaacaggtatctctaaggtccagtctttaagcctttgctcctatctgtctttgcatcccacatcccagagtcctcaactactttctcttttcctaatgcatattatctctgcctctagccccaaaagtgctgagtctgtatatccagttgccttagggagattcttcacttgtacagcccatcaacttaacctcaacaattccaaactcctgaaccttatctcacctttgaaataagtaacaatggcccaccaatctctcacctctctaggttgaaaacctttttatcaaccttatctttcctctttctgttgtttcttcatgcacagtcatcctgttagctgatttcagaactcactttcaaactgattctttggtttcctaccaccatggtttgggctttcattgtctcaaatctaaatgggctttcctacctctggttgctcttcattccacaccatccactaagatggctgggaaaagccttccttttctatagaattctgtagatcattttatttgtcttctccagtgaggaaggaaaaacaggtattattacttcacagatgatcataactcatatttactgagtactactttatcctagacatagtggtacacaggtcacatcaattacctcatttaatcctcatactgtaaggtgggtattatctctgttttacagatggggaaagagaggttcagtgatacccaggctcacatggttaataagttatggatctggaaaaaacaaggtagttctatatccacagtccatgtgcttaaacacagtattttatgtttctacctaacaggagtggaaaataagtgactttatcaaggtcacaactagaaggcagtgacagtgtattagaacactggtcccagatgcctagttcagtttttcccagcaggccactccttaagcagtctaatataccaacctaacctgaccagcttagcaagtcattgatcttgagcacagcctagtcttcctctccagattaccaccttctcagtataatatgctaattctcatgtacatgcttttagacgtgtgaccagcatctctttccaccagatcaatccccagcctcccttccatatttgattgcaaactctcctccctaaaggatacaccctcacatgttttctccttaccagactgtaagcatctcttctgtagggatgctcacagcccctgcactaggtcctatttcacttattttttgagacggagtctcacactgtcactcgggctagagtgctatggtgtggtctctgctcactgcaacctccgcctcccaggttcaagcgattctcctgcctcagcctcctgagtagctgggattacaggcgcctgccaccatgcccagctaagtttttgtattttcagtagagacagggtttcgctatgttggccaggctagtctcaaatgcctgacctcgtgatccacccgcctcagcctcccaaagtgctgggattacatgcatgagccactgcgcccagccgaactaggccctatttctataggtgctaaaactaggctctgccagcaccttgtgcagcagttgctgcccaccttacctttgcaggaccctctctcatcttcttgatctgatccttatacttcactagctcagcatccaatcgagaaatcttcttgtcaatggattctgctctactgtccaccttaggggaaaatatcaaatgcactggtagttactgcaatacacttattccagaaggggcaggtagagaggaaggaatacagaggaagaaaagaggagcttaaggggaagggtgaaaaacagtggttcacaaagaagggtattcccaaccagaaaccctgggctttataaattattctcttaccccccgccacactgccccgattctgatataccaggtagccttcaagtgggttggggcagaaaataatttgagaatcactgagttgagttggaatttccctagaatcagagactagccaggctgagagttcctccaagaggcacatgaaatgggccagtgccaagtgaaaccagctgattgtagatctaatgccattccctaaatcggggatggtggcttaatctgaggggctagggttctgagttttgtgttactgagatccaggacgaaggcacagatatgttgacctaggatatcaagctgagtcctgatgtggactggggatgacagatggaagaagggtaagggatcaggcaggatgaggtgggaagggtgtatgggcctagggctgggtgaggtgagaggatcaaggcgagagcgagtggacgggcaatgggcatcaaaacgggttgggtgctggcagggcaaggcagtgatggggttaggggttccctggtttgtggcgttaggaatgacttgggtaacagggatgaaggggagaaggtgagatagagagggacgacgtgtaaggggcccaggacccgaaatgaagtggaagaatatgggcccggggctgggggtgggcggggtcgggtgtgtcagaggtcctgagcctacttatgcatgatcaaatgcccaccgtgccaatgcagtcagtcaggctgggcggcggagccttgggtttcgctttcccgaagagtcggttcatcttgagcagccgcgaagaaacccaaacactagagcaaaaccagaaacggaagcagagtcactcccgcctcgacttccggcccctccgtgcgcaagcgcaatatgcctcctggcgtttcccgattctttttccggattttcagccgggtcttccggggatggagagcaaaaggacttggtgctctcggagagagcctgcagggggcggggtgttggtagaaggagtgggaggggttttactgtagcaaggcggggcctcagttgagtgggtggggcctggaggcaactaacgcggcatagggcgagggcggggccggcaggccggggcggggctgggaagtagtcgggcggggttgtgagacgccgcgctcagcttccatcgctgggcggtcaacaagtgcgggcctggctcagcgcgggggggcgcggagaccgcgaggcgaccgggagcggctgggttcccgsctgcgcgcccttcggccaggccgggagccgcgccagtcggagcccccggcccagcgtggtccgcctccctctsggcgtccacctgcccggagtactgccagcgggcatgaccgacccaccaggggcgccgccgccggcgctcgcaggccgcggatgaagaagaaaacccggcgcygctcgacccggakcgaggagttgacccggagcgaggagttgaccctgagtgaggaagcgacctggagtgaagaggcgacccagagtgaggaggcgacccagggcgaagagatgaatcggagccaggaggtgacccgggacgaggagtcgacccggagcgaggaggtgaccagggaggaaatggcggcagctgggctcaccgtgactgtcacccacagtgagtgtcgggcgccaggtgggctccatgcaggtcccgaaagcccggcggkgtctgtgggtttagtcacgtgtcctccagaagcgtgtgaccttgcgcttgtcctggcgtccggaagcgtgggttattggttgtgtccgtggaactgtcttttgtcccgggcttgtgtctgtacacttttccatgtggccggtgtattttgtctctggtcatttgtgcgatcctgggtgtttgagcttctccgtgctttacgtcgtgggcctggttgtgtttgtgtgcccgcgcagttattgtgccctttgtgtcaggcatatattgggccatgtggtctacgactgctccgtgtgtgataagtcagaacttcgtgcatgccggggtgctcctcgtgtgctgagtgccttctccgtgtgcgccgcttgagttggccgtgggtccaagcgttgtactctgggcaccctttgggtctgcctactgttggagttgacacaccaccaaatgaagtcagtacaccggagagctgagtccatgaggtttctctagaaccagcyaggggaggcccaagggtctgggaatctggagacctggattctagatcctgcggttttgagtgaccttgggatggacggcttctttctaagaatccggtttytcctctgtgaagtagatttggtaaccctggctcctgctgacctcacggagctgttgggggaaccaaaccttggtgtaatgtactgtacacaggctccctccttgctgtccgcatccctggaaaagaattggcgtctcttcttcagaaagaaaggctctgctgttcgtatgcatttgtctgtttacttagcacaaatcatggatgcactcaagtgtgttcagtgggagagacttggaggaaaacagtcacttgcccattacagcaagcgagacgagaccaatacaatacagggtacagggcagtcaagccacaggaagcagatggcttgtgatgaaaaaggtgggcttgggaatcagctagatctgrtatcaacttctsattccaacagttgagtctccataggcagtccttaacttgcctgaagtcacagtttgctcatctgtgaaataagaagtaataggtagatctacttcgtggggtttatctgaggattaaattagattatgcatgaaatgcttaaaatgttagcagatatcattcatattgttagttattataatagaggaaacagagatacttgaggaggtcaccagaggaaagctgggtggcatgggggcaggctctgtggagtaggtggcatatgagctgggccttgaaggctgggtaaataaatgtgataaagtgtcatcctatattggtgtatgtgaaagaatcatattcgtcaaatgcttttctttctccccaggcaatgagaagcacgaccttcatgttacctcccagcagggcagcagtgaaccagttgtccaagacctggcccaggttgttgaagaggtcataggggttccacagtcttttcagaaactcatatttaagggtaagcatttctttttctttctttctttttctttttttttttttgagacgaagtttcactcttgtcgcccaggctggagtgcaatggcacgatctaggctcactgcaacctccgcctcccggattcaagtgattctccygcctcagcctctcaagtagctgggattacaggtgcataccaccatgcccggctaatttttgtatttttagtagagacagggtttcaccatgttggccaggctggtctcgaactcctgatctcaggtgatccacccgcctcggcctcccaaagtgctgggattacaggtgtgagccactgcacctggccaagggtaagcatttcttttccggcttttccttatggccaaaggacagttttaaaactgctgaacttttcctaatagtcactctgttttcaaactgggacaatttttatttatttgtttattcattcagttcttcaacagatatttattgaggacctgctaggtattggacactctcaaacacctggacaggtgtcagatttgaagtcttatgatgatggcagaaatctcaccattttcgatgaagctcatgggcagtcttccctcgctaggttagatcatcttcccattatatgttaccatggtactccctgctatttttgcatcacttctatgaaattactattaaataatcattttcttagttgcttaacatctgatttctctgttaaaataacagcctccgtgagggtggagatactgctgtgtttccagtgcctcccattgttctgactcaaaggaggttttgagcaaacttacctgaggcctggatgtggcgggctcagtggatgcatgatgctcatttctgccaggacccacaccctcctggcccctgccctctgtcttcccacccccctgagaatctatcattctggtatccactggggaaagacttaccccattgggtgtcagtcattataaagaatttagtaataggaggcatttttatttatatttcatagtgtaacatattgtctttaatttttaaaaatattttatttctgaattataaagacaatagaaattcatgtttcaaaatagaggaatgcatgaaaaagaaaatgttcccctggataaaacccctcataataacactgtgtcatcagcattcattgtggtattggggtttcctgcaaaaaatgagctttaatggctactgtagaccttaatgcctactgaagactttaaagtcttctgtagtgtggttcgttggtccctgattcctgaatatttggctctttccagtttctcactattatgaaaaggttgcactgaatattatcgtatagtagttactgtggagtcgcatgtccaattatttgtttaggataaatatctggaaatgaaattactgggtcatgacaccctctaaaaagataccagttctcattagtgaacacacttgtctatttcctgtatcctgctgaaatttattttcagtgttgtacaattattacaacttggcctacctttctcctctttttaggaaaatctctgaaggaaatggaaacaccgttgtcagcacttggaatacaagatggttgccgggtcatgttaattgggaaaaaggtaaattgctttttccatcagaaatcctcagaatcaaatgactgaagtcttttatacatgtttctgtttagaagaccaaactggggacccagattctgcattgataaaacacctctctaaacaaatacaatctttattggttttacaggattaccagttttgttgttctcataccctcctgctcctgttggttagaacttttgctctaggaattaggagcggttgtgctgccttaataatatgttttttgttttggtggtggaatcttggtctggttaaaatggtgcctgggacaggtctcattcacttggagtagaatttgcaagagtcttttgttaaaataaacttgtagatattaagaataatcactctgttccagttcaggagcctctctccctttaaccaaccttttaactaaaatctcccacaagggaaaaccttcgactggaaagraaggttcagactaaagaactgaggggaaaaaaagacagatgaggtcagcaacccttaaggtgatgagagagggctgtggccagccctgcattgtgacacagcagaattatgagcatatgaagttcccttattgtgagttaggtggctgagtagagagagggcagataaacaaagtgaaggcaaaaaaaatctaatccagacttggaactgccaggagactggaactcaggacttgccacaaagagaartgaataatttgggatagcataactaagcagaaagctgctagacctatctatcaattgtttacctgagagaagagggaaatattctaaatttcttgcttcagggtcagggagaatggtgatgggcaacaggcagaaccaaagagtcaagtttgaagaaactataggacttttacttggagctgacacagagcgtatggagcgaagtgtgaactcaaggaaggcaccatggcacatgcctattgtcccagcaagttgggagtctgagacaggaggatcacttgagtccaggggtttgaggctgcagtgagttatgatcatgcctgtaaacagccactgcactccaacctgggaaccgtagtgagaccctatctcaaaaaagaaaaaagtctgaacttaagtctaatctacctcttttggactgtgtgatctcatgttactttactacattaagcctcagtttcatcatctgtaaaacagcagtacttccctgatggagttgtggtaaggcttaaaaaataggtaaggtgcttaggatagtgtgtggcatgtaggaagtgttcaataaaagtattcatcgttgttaaccagcatcacattaaacaggagmgctcaattggaggctgccatttaggaattccatttaaaggaatggtagaattccacctttcttgccattctggactcctcacaagtgtttactgaaatgtgattaccctccaggcttcagtcttggttgttgatcagtatagggctgagactgaatctggcacttggattgtctccattctctgcacccaagctgtcagggccctcaccagaatgtttacctaacaccttctctctagtctggagtctttgtagatggaaaacttgatgtataaccctttgacttgatttccaagaagcaacagagttaaaactgttatttctaggtgagtggcttcatgcaggtrtggtcaggtatttttcctgacagakgctgctgttcttgttgattgctttttcttttttcttttttttttttgagacagtctcgctctgtcaccctggctggagtacaggtgcacgatctcagctcactacaaacctccacctcccaggttcaagctatactcctgcctcagcctcccgagtagctaggactacaggtgcacgccagcatgcctggctaatttttttgtttttttagtagagacagtgtttcaccatgttggccaggctggtcttgaactcctgacctcaaatgatctgcccatctcggcctcccaaagtgctgggattacaggcatgagccaccatgcccagcctgttctttttgactattggctttattttcttcttaaacattttagaacagtccacaggaagaggttgaactaaagaagttgaaacatttggagaagtctgtggagaagatagctgaccagctggaagagttgaataaagagcttactggaatccagcaggtaactctcttcatggaccttaactttctgccttctatcagagcttcctggatataacttgtggttatggggacatgttctgcagtcagactccctgggttcagatcctggattcaccctttctcttactgtgaacaagtttatctttgtctcaagttcctcatctgtaaaaatggaataatggtgacatttccctattaggattgttgggagaattaaataatgtagattgagcttgacacatactaagtgctttataagcatttattgtcatagttattgtcaaaccccagccagcatccatttatgctcacaggagagcacctgccttgctaggatcatgtattgtctgaaatagaacaagtagcttctctctgggctgttgtaatgtgtttggcaaggcaaataacattttgttggttcatagaaggtccaagttgaacatgatagtggggttgggggagtcatcctattcaattccttatattagagatggggtactaaaacccagtaaggattaggactagctcaagaccacttttatttatttttccctctcattttatagcattaattggggtgtgtttgtgttttggcttttttttttttttttttttttgatatggagtctcgctctgtcacccaggctggagtgcagtggtgcaatctcagtggctccctgtagcctctgcctgccaggttcaagtgattctcctgcctcagcctcccgagtagctgggattacaggtgccgcctgccaccacatctgtctgatttttttgtatttttaatagagatggggtttcaccatgttggccagactggtctcaaactcctgacctcaagtgatctgcccgcctcggcctcccaaagtgctgggattacaggcatgagccactgcgcccggcctatatgtttgtgttttaattacagaatacatggctgactgtacaaaagttttaagtacatgtataggcactaatatggaaaataaaaattacccatggggcaccaactcasagatgacgattaccaaagcctgaaatatatttttcatcttaaaaaaatttgatataatgttatttacactttataaactattcttttattggataaaaaattaaacattttcctgtgatggtatttttcaaagctcgcatgcatttcatcttgtataaatgtattatttacctagccaactctgtattgttcatttaatattatttttaccattatgtgtaatgcttctttgactgtccttggacgtaaatcttttttgaccattcctggtttttttggtagaataaattctttgagttggaattgctgggtgatgtttaaagctcttgctacgtgttgtgaaatctgtgtctgtagctcgtggctgtgataaacatcctcagagatccctgctatccaactcttgtcaccagctaactggtcattaggccaagctgtgtgagtgaaccattagacaatttgataaaaataagcactgctgccattctttagcatgcgtctgtgccacaagttagtgacacatgtacatatattccctttacctcacagtaaccatctagggtgtgggcatcataatcttcatttttaaaatgagggtactgaggcatgaataggctaaataatttgctcaagatcacaagttagtaaatggcagtcagttttcaggcgtaggctttgaagactctaaacctgtgcttttaacatctgcctcttcttgtgactgggggcttcactggagccaagcctcaggaggcatttgcagccacagtgggtcatgcgaggtagagcagactgcaacctgatagaattcttggactggcccacggccagcctttttaatttttccaagagttaaagttgtggatctgagatgtggcctggcctgccagggctatggtgggctcagtgtgattgcatcattagtattgtggcatggagtcttccgtcagcctcagagaacccttgcaataatgcattatttccccgcagggttttctgcccaaggatttgcaagctgaagctctctgcaaacttgataggagagtaaaagccacaatagagcagtttatgaagatcttggaggagattgacacactggtaagtaaatattcagctgagaagaactagttttctttgactttatttcagtcacattcactctttcagtaatttactctcctattgcctgagcaaacccatcacttgagaatattaagcatctactattgtgtgccagtcatgttgctaggtcctgggtgaatgcatgatgataagacagttcctgctttctaggcactcacagccctccagcataggacttttatcatttacacttatgtttgccagtagcatctgtaatcgtcatgaagctgggacccaaggagtccacgatctcatggtccaggaaacagaggatttaactttctctgatgaatatgtgactgataattctgcagggctcattacttatagatgattcagccagacccaggtcatgtgaggccattgaaaatcattaactcttttgcagatgatagtaatgatatctctagcctgatgcttcattcttgaaggtgaactgcactgtgtacttctgttggccagggtgggtgtaaagaagcagcagcaggcacttttcctgtcacaatgagcccatggtgtggccagggcagagtatccatacataggaaacaataaaagaacaaagtctgtgttamagatcagttcctatggcccagacattgagaacacagggagcttttatagggacaagagccatggaaaggccatacaggatacagacccagggaaagggttcctgaaaatggatatcacatttacattggtgacctgtgacctgttttgtgtactgtgggtgtttcttatgtgctctcatgtcattttcactgaggattatttgttacatgtttactatttactaacttgtattatcaacttactcttccatagatcctgccagaaaatttcaaagacagtagattgaaaaggaaaggcttggtaaaaaaggttcaggtgagttgtgtaatagtgcacgacaaggtgtaatatgttaatgtgtaggtatgtgtgtttatctgttcaaaatcaggtagtgtaggagcgtggtgtgtggtatgggcttgttttggttayatttatcagcaggaaccccaaacgtcagagaagagccacctgtgtccctgtaattatatttgaatttaaactatttagggagggaactcactggagagcaggtagggctgacacattacacaattccaggaggcagtattcatgcacacagtgcttcctgcgattgtgcagttgctgtgcagtggccctgaggcaaagctccctgcctttaccaccttttaggggattgctggcctagagcatggtcagaatgctggtcstatgctccctccctccccttaccttggaacccaggccagtggcccatctccattcatgcacaatctgttttgagtctcagccatgggttccccagaatgggtaagcaaggagccttgtgtgggcagtggtcggctacccctggatgggcccttactgccccgtgtgtattttctaggcattcctagccgagtgtgacacagtggagcagaacatctgccaggagactgagcggctgcagtctacaaactttgccctggccgagtgaggtgtagcagaaaaaggctgtgctgccmtgaagaatggcgccaccagctctgccgtctctggagcggaatttacctgatttyttcagggctgctgggggcaactggccatttgccaattttcctactctcmcmctggttctcaatgaaaaatagtgtctttgtgattttgagtaaagctcctatctgttttctccttctgtctctgtggttgtactgtccagcaatccaccttttctggagagggccacctctgcccaaattttcccagctgtttggacctctgggtgctttctttgggctggtgagagctctaatttgccttgggccagtttcaggtttataggccccctcagtcttcagatacatgagggcttctttgctcttgtgatcgtgtagtcccatagctgtaaaaccagaatcaccaggaggttgcacctagtcaggaatattgggaatggcctagaacaaggtgtttggcacataagtagaccacttatccctcattgtgacctaattccagagcatctggctgggttgttgggttctagactttgtcctcacctcccagtgaccctgactagccacaggccatgagataccagggggccgttccttggatggagcctgtggttgatgcaaggcttccttgtccccaagcaagtcttcagaaggttagaacccagtgttgactgagtctgtgcttgaaaccaggccagagccatggattaggaagggcaaagagaaggcaccagaatgagtaaagcaggcaggtggtgaagccaaccataaacttctcaggagtgacatgtgcttccttcaaaggcatttttgttaaccatatccttctgagttctatgtttccttcacagctgttctatccattttgtggactgtcccccacccccaccccatcattgtttttaaaaaattaaggcctggcgcagcagctcatgcctataatcccagcactttgggaggctgaggcgggcggatcacttgaggccaggagtttgagaccagcccaggcaacatagcaaaaccccattctgctttaaaaaaaaaaaaaaaaaaaaattagcttggcgtagtggcatgtgcctataatcccagctactggggaggctgaggcacaagaatcatttgaacctgggaggtagaggttgctgtgagccgagattacgcccctgcactccagcctgggtcacagagtgagactccatctcagaaaaaaaaaaaattgagtcaggtgcagtagctccttcctgtagtcccagctacttgggaggctgaggctagaggatcacttgagcccaggagtttgagtctagtctgggcaacatagcaagaccccatctctaaaatttaagtaagtaaaagtagataaataaaaagaaaaaaaaactgtttatgtgctcatcataaagtagaagagtggtttgctttttttttttttttttggattaatgaggaaatcattctgtggctctagtcataatttatgcttaataacattgatagtagccctttgcgctataactctacctaaagactcacatcatttggcagagagagagtcgttgaagtcccaggaattcaggactgggcaggttaagacctcagacaaggtagtagaggtagacttgtggacaaggctcgggtcccagcccaccgcaccccaactttaatcagagtggttcactattgatctatttttgtgtgatagctgtgtggcgtgggccacaacatttaatgagaagttactgtgcaccaaactgccgaacaccattctaaactattcatatatattagtcatttaattcttacataacttgagaggtagacagatatccttattttagagatgaggaaaccaagagaacttaggtcattagcgcaaggttgtagagtaagcggcaaagccaagacacaaagctgggtggtttggtttcagagccagtgcttttcccctctactgtactgcctctcaaccaacacagggttgcacaggcccattctctgatttttttcctcttgtcctctgcctctccctctagctcccacttcctctctgctctagttcattttctttagagcagcccgagtgatcatgaagtgcaaatcttgccatgtcagtcccctgcttagaaccctccaatggctcactttctctttaggcaaaagtctttaccccatgccttctcccatctcatctcaaccccctcatttgttggctgtctgctgtcagccactcttctttcaggtcctcagatgcactgcaccctctcctgcctgggggtctttgctcctgctactacctctgcttgaacagctcctcaccttccttcctccaaccctacccttgtataggtgacttttgttcatccttcagaattcaactcacatgtctcttgcatggagaaccctcacctactgtgttgagaccctgtccagcccccaggtgggatcctctctcgacttcccatacatttctttcacagcatttacatagtccatgatagtttacttgtgggattatttggttaatctttgcctttaacaccagggttccttgggtgaaggagcttctttatcttggtaacagcattatttcaagcataacttgtaatatagttatattacatatataacatatatatatataacataacatatataacatatataacaagcataacttgttatatagtcttgtatatagtaagacctcaataaatatttggagaacaaatgaatgttgaatgcacacatcaatagtgaaacttctatagctgcatttggcctcagaatctccgtcagcattggaatttacagccttaacagcctttattgtcttaagggttgagaaaagaggccctaatgcatggactgctgggcagatgtgataggtgattgcacaggccccacccacgcagatctgctcacccaaggggtttctgcctgtgaaactcttctcccgtgagaaggggagagagcaccccttcttctcccgtgagaaggggagagagcaccccttcttctcccgtgagaggggagagagcaccccttcttctcccgtgagaaggggagagagcaccccttcttctcccgtgagaaggggagagagcaccccttcttctcccgtgagaaggggagagagcaccccttcttctcccgtgagaaggggagagagcaccccttcttctcccgtgagaaggggagagagcaccccttcttctcccgtgagaaggggagagagcaccccttctcaggtgcccacttgcctgggacatggtaagtcttaccacagggagaacagatgggaatgtgtgctcccacaaacgaattcttcggcctcagggctggaaggattctcccacattgttttttgtttttgtttttttttgagatgggttcttgctctcttgcccaggctagagtgcagtggcttgatctctgctcactgcaacctccacctcctgggctcaagcgatcctcccacctcagcctcccgagtagctgggaccacaggtgcgtgccaccatgcccggctaattttttgtgtttttggtagagacagggtcttgccatgttggccaggctggtctcgaactcctgagcttaagcaatctgtctgtcttggcctcccaaagtgattggattacaggcgtgggccaccatgcccggcctcgacattgtctatttagttaatggtttctacttatccttcaaggcacaacttaaaggttacctcttctgagactccttcatatagtagtcaggacctttgtcaaaagtaccagaagccaagctgggcacagtggctcacgccagtaattccagcactttgggaggctgaggcaggtggatcacctgaggttgagagttcaagaccagcctgaccaacatggagaaatcccatctctactaaaaatacaaaattagccaggcatagtggcgcatgcctgtaatcccaactactcaggaggctgaggcaggagaatcgcttgaacctgggaggcggaggttgcggtgagccgagattgcgccattgcactccagcctgggcaacaagagcaaaactccatctcaaaaagaaagaagaaagaaaaaaggaagaaagaaagaagaaaaaggaaggaaggaaaaaaaggaaagaaagaaaaagaatcagaagcctaattccaaagagactgggcaaaatagaaactttatggtcatgatatcaagttatcccatgtaattttgggaaggtcaaaggcagccgggcttcaggaactcaaacactgcctgtaatcactctgcctctgcatgcctgcatcatcctctcattcctccttcttccacaaagcaggacatgtgactgctgacaacccctgtgttgctcatcctacagcttcagtgccagaggggaactgcctctgtttgcttgtttctaatttgaaagatcctggggaagaatcttttggctaatcagcaatggccagggcagcagggtctcatgccacacataaggtctttaggggccaacacttaggttttggggtagttcccagagagggggccacagagtccacatctgtaagtggtaaattaggtattccttccaggtggtgcctggcacattgttcaggcttaatctctgattcctcagatgatgagtagaagcctgggaaggaagggtcactgatgagatgcttggctgggctatgccacttgggtataagaggggtgtcccacttagggcagaaacttttagatgtcaccaatatccactttctcctcctacaaaaagtgaactaatttttagtttaatgcatggccaaccagatagactgtatttctcagtctccctgctcagaaggccatgagactacattttagctaatgtggtttatacagagtgtgtatgtcttaagggaaatgtcttcagaggcaagtggcgtgccctttctctctgtggcctagaatgcagatgtgatggctgtggttggagtagctgtcttggacctgaggtagaaactgtgatgcggatggcagagtaacaaaatagaggagcatggagttgtcatactacataggtctatgtgtaggagaaatgaagttctggctataagtcactgttattttgggttttctgcctctcacagccaaacttaatcctacatcattcatatgcaggtatgaaacaggtatgaatcagtcccagtagaaggccttattcatagatggcctcctaggcctgccacctgcaaatctatcagcaacaattcctgctcagtgttcccattccagtggtccaagagaaagtagcttcctgccttcctgtgcccattctctcagacatgtgtcttctacagagcatttcctgccctttctgcccactctgcagcaggaatcagagtctgtgtgaaactgctttcacctgcccaggcctctctccatacccctttctcctgccaccattatcaagaggctctgcctaggggctttggccaaaagaggaggtattcaacatataccacaggagggagtctctgtctatggtgacaattctgaacactgtgtgtccctgtgggacattgtgtgagtgcatgtgtgcaggacgtgcctggggctgtgtctaatgtcagaatatttgacaaccagtcagagcagatgttgaccaaaagagcagagcagcatctcgaaatcatcccacagtgccaggaattaaccccagactgtggaaaccgagagacccaggtgtttccaggggacaatctgggtggctagggtatgggggggcactcaaagggcttggggcatcacctgttttcgattgtgaaaaacctagttcaatgttacaacaagcagttcagctgtactgtgtacactgcctgaatatcagccattgctgtgccacgtgtctgtgtgtacatgccttggagtgctggcacaacccaggaggaagccatggggggcacaggatgactctcacaaagcttttttttttcttttttgaggcagggtttcactttgtcactcaggctggagtgcagtgatgcgatcatgggtcactgcagcctcgacttcctgggctcaagcaatcccctcccacctcagcctcctgaatagctgggactacaggtgcatgccaccaagcctggctaattaaaaaaaaaaaaaattgtaaagacagtcttgctatgttgcccaggctggcctgaagcaatcctgccaccctcagcctcccaaagtgctgggattataggtatgagctactgttcctgatttcacagaggctttctgaggctgggccgtgcaccccagcagtggcagaggatacagacctcacctaggttcttggcctgaatgatagtccaggctggggcagacaggagtactaggcagcatcctggggtcagggactggcctctcaggcaggcagaagataactgggacctctgaggggacatgtgacagggttgaggagcaccagagggacggagagaagctggaca

SEQ ID NO: 97937 - DNA, 20413 bp, Homo sapiens
ggctgtttacctcaaggagctgggcaccaggccaatctaagcagatggcatgaaggctgctgggtgaggctggggagtgttggcccagccaaggcacaggacccaggttttcactctgacctggggcagaagatgcaggaattgcccagctttcctgcctgagccctgttttaggtcatctgtgtcctgattgtattgattccaggacctgtgcaggtgcccagggcatttaggtcttggcctctcctctgcctccaggaatccccacttaaaccctttccttggtatcacagcagctacacacatctcatctcacattctcctctccagggccctcacaggtgccctgggagtcaggctgctggtggtacaaattggtgaacccaacatgggagatggaagaacatgtgcaggcccaaagaggggaagggatgcacctaagctcacctaagaaactggtagctgggctgggagctgagtgtacaacgaggccctcacctcccgccactgacttccttgttctttccattctggctctactggactccttggtgttgtagctgccaaccctgttcccaagtcaaggcttttgcacttgcagttcctctgcttggcaggctcttcccctgccacctctgcaggactcgtttcttctctgctcatgtgctactattcaaagagaagcctctcctttgtcactctcctcttggccacttgatttctcttccacatcacatgtcatgtgtttattgttgtctttctttgttgtctatcaccccactagaacgtaagctccttaagacagggactttctccatcttatttatagctgaccccctggtgactcagaacagtgcacagaatatggtagatacttcataagtatttgttgaatgaacacacaaacccagattgcctcactcctggtccggagctctctcctgtacctctctatgtctcagagaagccagaggaggaaagagtgcaggaggggttggcttaggctggagggtggcagccttactcctttgccagagacacaacaggcactgtgacccaggccacacctcctggggcctgtgtgtatctgggggctctcttgggcactcacggcatcccaggggcatggagggatcagcacttacctcctcttttcccaaagcaggcaccatctctgcccttgggcccactgtgttcttcccgttcttggatctgtcacgcaacatttttttgagacagggtctcgctctgtcacccaggctggagtatagtggtgtgatcacagcttactgcagcttctacctcccaggctcaagcaatctttctgccttagcctccagaatagctggtactacaaggcacgtgccacactgcctggctaatttttaaaaaatttgtagagatggggtctcactacattgcccaggctggtctcaaactcctggcctcaagccatcctcctgccttagcctcccaaagtgctgggattacaggcatgagccaccatgcctagcctcaacacttattgagcacctactgtgtcccacgctcaggactgggcaccagggcaatagagataattgaaacattgtcctttttcccagacagcttgcagcttagtcagcagatggataagcaagggccaccaaagtgcagggggaagacacggatggaggagacagaaggcacaatgcgagtggggcattcagggtgggtgacaacagtcatgaccttgttggtgaaaggcagttaggaaggtttcagaagagggaatgtttaagctaggtttcacaggatgggagtagggggatagagaagggagacccagcattgccagcagacagaataaattgtgcaaggggttcagttgaactgaagaagtgcaggtccagggtggggcaaggtgaaggtgaagctggaaagatgggttgggatcagatgttgaaggggtgtggtcaccaggctaaggagtttgggcttcttcctgttggcagtggacgccattacagtgttttgggcaagatgacctggtcagctttgctctttaggacgcttgtccgggacgctgcgtgcagagtgatttggagtggcaggtggagagccagggatatgagacaggacaccattgaggtggccaggttggagacaacagtggccaggactagggtagagtggggggtgtggaggggcagggatggattcaagagctatgtaggaagcagaacctagaccctccatgggaaggcaaacaaggctgaggggtcagtgcctgggattccactgccggaggttgctgggatgtgggtcaggggagcagagatcaaggcttatttagcccccactgaccattccagactcctgtcatggccctccccggctccctggccccactttgcccacatggcttctctgttcttcagatgtgagaagcttcttcttgcctcagggctctcacacattctgtttcctctacctgcagcactgttccacttggctacagcctgccctgcccactcagcccttggcgtctctgatctcagatggataggtcactcttggatcctctcacagaacagagcatgtgtggttcatgggactcactccagcagtgatgatacaatgctgctgcccgttcagtactgtgcctctacttaaccaaagctcctggaggacaggaactgtatctgactcactctctgccatatccaagcactcagcatggagcatggcacttagccgcttgttaaacttttactgaatacatgaatggtgaattaatggtgaggttttcttggatgcactgacatccttaatgggctgttcaatagcagtcggatataggagctaggttcacactttgatgggatgacagattacgaagtttgttactatgagtgaatctagaaggtatttgtctgaagaggagaccttggggtgggctgggatggtaagtgagctcagtactccacaggctgcccttgactttactctgtactttgaaggatgcaaaattcaagcgtcctggctccttgcagcaactagaatgttcagtagccatttctgccacgtggatagaaatctaaggtccaaaacaaggaagggatcaaatccctttgctcccctctgtcccttcctcactgtaacctgggacactgacagacagacctgtcagtgatcagatgagaaatggagagaggcccaggagcttcacatgtgcaagggtaggaggcaggcagatggcagacctgctcagcctaaaggtgcttgtgcaagtacaggaggttcatgcaagtacaggaggccagagacaaagctataagccccaaggactctcagggaggcagacctcttgtgtgaggaaggactgtctttgttcgaagccatccaacaacgaaactggtaggtagtgagctccccatcaccatgaatgacctcccagtggggctgctgtaggaaagccctagtggaagaagggagatgaaacccagatgaccattattttttattttattattttatttatttatgtatctatttatttattttgagaccgtctggctccatcacccaggctggagtgcagtggcgcaatctcggctcactgcaacctccgcctccctagttcaagtaattctcctccctcagcctcccaagtaactgagattacaggcacacgccaccacacccagctaatttgtgtgtgtgtgtgtgtgtgtgtgtgtgtgtgtgtgtatttttagtagagatggggtttcaccatgtcagccagcctggtctcgaactcctgacctcaggtgatccatgcagcttggcctcccaaagtgctaggattacaggcgtgagccaccacaccaagcctatttttatttatttatttatttatttatttatttaggcagtttctcgctctgtcaccaggctggaatgcagtggcacaaccttggctcactgcaccctccacctcccaggttcaagcaattctcctgcctcagcctcctgagtagctgggattacaggtatgcgccaccacgcctggctaattttttgtatttttggtagagatgggtgtcaccatgttgaccagggctggtctcgaactcctgacctcaagtgaatgcacccgcctcagcctcctcccaaagtgctgggattacaggtgtgagccatggtgcctggccccaagatgacctttaaagtccaattccccttttataagatggcgtttttgctttaggacaggaagtcatcattaaatattttctctacctgcctaagcaatggaaagatagctgccacctgcctcagaggtatccctgggactgtgcagtttcctaaggaggaacggaaggatcttgaagctgagtcaaggatcactgggggcctcaagctagtcttggccacaggtctggggcttctatgggtctgtagaggtgactggatggctggtgtccccaaagggactgttctttttttaattaaaaaaaaaaattttttttagagttggggtcttgctatattgcccaggctggtctctaatttctgggctcaagcaatcctcctgcctcagcctcccaagtgttaggattacaggcatgagccaccgcacctggctggggctgtcctcaaacaagaatccttcgccttgtcattggaatattcttgcaacttatctgcaggcttgaaatctttcgaaataaagtttttctttaaaaaaaaaaaaccacagattctgatttaaatatttcagagcgaagctcagcatctgtatttgtaaattctcccccagggaaatccaatctgcagacagagctgaaaaacactgatctaaatgaattagagaaacgtgtatgtaaataaaatgtattttatatatcagaaattctttgagagcaaatatccaaattacttattaatgtatactatgtaagtatgggggagttttagaaactgatttttctttaaaagaatcttgtctttatttaacctatgaagatacagatgaggccgcgcgcagtgactcatgcctataatcccagcactttgggaggccgaggcaggcagatcacgaggtcaggagttcgagaccagcctggccaacatagtgaaaccccgtctctactaaaaatacaaaaagttagctgggcaggtggcaggtgcctgtaatcctagctactcaggaggctgaggcaggagaatcgcttgaacccaggaggcaggggttgcagccagccgagatcgcgccaggcacaccagcccgggcaacagtgtgagactctgtctcaaaaaaaaaaaaagcaaatgaacacataatacctgcaaagcaagaaggcatcttccttttaatgttttattttgcctttgttttgcctgttagttgtgcccactttgcggtacaaaaaaataagtgaaataaaagtaagtaaaaatgatcatttctgcttacgtttacagctcatttcatattctgcaaaatgttttcccgtctgctatcaccgccgccatcctcacagcagcctgggagaaaggcagagccaaaagtctcatctccacttcgtgcatgggtgatctgaggcccagttaagaaaagtggctctaccgaggtcccagagttggttgctggaggcactggcaaaggaatccaggctccagcccccttctctgcctcctgccatcttccagttgcttttttcctttctctctttctctatctctttccccttctctctgccttgaactctctctctttctacttcaactttcctctccttgctccaaccctcagattggagtcagctttgcaagttgtccaaactttttgtcactctggaaacctgccagccccatggccacagccccatctcatcaaaagctcagcatctgcacctagagcaagccctttccggatgtcagcgtgcaaagattaactctggtctctccatctggccctagataagataagattaggagagcggcactataaataggcccccatccttcctcaggcscaggccccagccagctcaggctacactatcccaggatcagcatggccgtccgccagtggrtaatcgccctggccttggctgccctccttgttgtggacaggggtgagtgggcagaacctggattctctgtggctttgtgttggtaggtgagcttggggtgagagcagaagcagggcctggagcaccctgtgaggcctcagctttttccatgtaccttcattctgcatatgcaccctccactgtgctggggaaagttctgggctgggagaaaagaaacttgggttcaaatcctgactggcgcagaattaccaaagtcccctaccctcttggggcctcagtttctccagctgtaaargagggcattgttccagttcaaagctgcactgagcaactattgggctggaggctgtggggacagaagggagcaggtaggtcccagctctcaggagagactgayaagtatgctgggtgcagggtggtggatgctaagagagacctggccraggtcttctgagctcccgatctctctgaaaggctgtggtttgggacttgggcagccatgtgagcacgacagagccctttcccaggactggacacatatacttggggcagggccctctcaggatctgggccatccctgcaatctcacagctaccatgtcaggcactgttctgagcccttaagacagattagtgacccaaacagaaaaagcacggtcctgatggagcataaatccaatggggtagaggaaaaggggaaaggcaataaacaagatggttacaatgtatgttaaacggtatgttagaagctgataaaagttaaggaaaaaatacttrgcagggtgatgggcactggaagggggttgcaatttcaaatcaggggaggtatctctgagagtccgatgtttgagcaaagcttgaaggagatgagggactaagccatgtggatatctgggagaagaagattccaggcagagggaacagctcaggtgcaaaggacctgaggcaggggcatgcctggagtgactgaggtactgtaagaccagtgtggcaggaggggacattgtacggagtgataggagaggagatgagagaggcaaattggaactgtaccgggaaagaccttgttggccaacataagaacttggcttttcctctgactaaaatgggaggcactgaaagctttgagcagagagttatgtctttcaagggttgctctggttggtacattgagaataaactgaacagggaagcggggagaccagttaggacccgcctggacaaaagccataagttataaggcaacgcctggcaggatccagggccactgacctcatggccagtcccacacccatttccccagctggaaacagacctgggcacagggggaaagggaaackggtctggggacctgttcaggagcagcctgcttacgcccagcctggcacctacacctacctactccttgagcagttgggaacactgaaaagcctgctctgaagaagtttggtttttgtttgtttgtktttgtttttgttttttgcacatttcagactactgcctgggctgagtgaggagggggcaytttgggtcaaggtcaagggcagcctgggggtaaatgtagcttttccccacatcccccagaaagaaactctgacatcttagagttctgaacaccccctcctcccaatacactttaatttttttttttatttaaacaaaaatttttttttcaagacagagtcttgctttgttgcccaggctggagtgcagtggcacgatcttggctcactgcaacctctgcctcctaggttgaagcaattatcctgcctcagcctcctgagtagctgggattacaggcacatgccaccacacccaactaatttttgtatttttagtagagacggagtttcaccatgttggccaggctggtctcgaacttccaaccccaagatttgcccgcctcggcttcccaaggtgctgggattacaccaatgcactttagtattcaattcctgaacacccacagtgtrggacattgaaccaagtgctgcgcaaaggcagacataaaggaaccccaaggagctcaggtgcatagggaggcggggtgacccagtgagtgggacagtacatggtggtgtgaaagaagcctccatccagatctgctcaggaaactgttggggacgtcaaggacagcttcactggggggcagcatcaagccttgaaaggagggtatgattcggcgggaggagaacggagacgaagacatttcagggaggggacatggcatgagccaaagcagggcccaatctaggacccgtgagcagagaggaatagctggggcatggagaggtgtactgggaagtcagcccaagaagcaagtttagggtcagcttacgcagtaccctaaacataagactaagcagctcmggtccatagggaggcttagtgatcaggacagggaaccacggaagggctttatattttttaaatgcttttcttttccctaacagttaaatatcaagaaatgcacaaatcttatcactcgatgaatcttgacaatgtatacactcgtgtaacccaaacccccatcaagatacaggacctcttgagacaaggacttagggaagaaaaataaatacagaacatttccatagccccagaaattcccctatgtcagtcaatccctgcccccatcccagtgctctgacactttttttttttttttaagagacaaagtctcactctgttgcccaggctggagtgcagtggtgcaatcatagctcactgcagcttcaacctcctggattcaaacgatcctcctatctcagcctcacaagtagctgggactacaggtgcgtgccaccacactcagctaatttaaaaatttttttaaatttatwtttatttatttatttatttatttttgasacggagttttgctctgtcacccaggttggagtccagtggcacaatcttggctcactgcaatctctgcctactgggttcargtgattctcctgccacagcctcctaaatagctgggattataggtgtgcaccaccacgcccagcaaattttgtatttttagtagatatggggtttcaccatgttggtcaggctggtctcgaactcctgacttcaggtgatccacctgcctcagcttcccaaagcgctgggattacaggtgtgtgctactgcaacctgccctcattgttaaattttttgtagagatgaggtcttgctatgttgcccaggctggtctcaaactcctggcttcaagtgatcctcctgccccagcttcccaatgtgatttttttccatcatagattagttggcctgttctaggatttcacataaatggaatcatagggtatataatcttttgtgtgtggtttcttatgctcagcaaactatttttgagattcagccacgttattgcatgtatcagttgcttgttttaattgttcagtagtgccccattgtatttatttatccattctcctgttgaaggacatttggatcactttcagtttgggcaatttgacatggaagggttttaagcagttcagtgacaggtctaggtttgcattttgataccccaatgccaggcttaaacagcacattggggtgacttagtctaagtttctgtttccctctctctgtggaaataccctgtaatagcatctccaggaaaatataaaactacattgccttgcacacctccagtgatgggaaactcactacttctggagaaagcctctttcactgtggcatagctcccactgagagaaaattctgcttcatatggaacccaaacctgcttccctgcagcctcctcacagagatgggctctgctttgtgaggttgaaaagagtccatctctccctcagccccaggatagcccttcagagacttcagggagcatcctgcccttctctaatttacataaacgcccttccttccacctgtgccattagacatagctccagttccctcatccacccatcatgcttgtcagtcacatcacagtttgctcatgtcctttaagcagttcagccagaccttgaggggtacaccagtgtatgtagaaagagtcaggctctggactgcaacagacgtgtgggaaaatcctacctctgccttaacaaactgcattgcgtcacctctttgagcctctttcgtagttcgttaaactgacctatgccccaggaaacagattctgagctatacatgcaatttactggggagcgttcatgggagtaacatccatgaaggatgagggaagttgacttccatgcagcacaacagaggcttcagawgatcctacaggcagctttgggcgaggggatcaggccctttgtaaccacatcaacccgacatgggatatgggctgttcctgggtagtggatgcagccctgggcaaggcagcttcattctctgagggtaattcctaggaagagacttgcagtgagtggtcaatatttctggcagcaggggaaatgagtgcctcagacttgcgcgagggctcttgatggcagaacacagcatccactactatctcctttcttccctctgttacacagcagtaagakaggggtggagaggagttaaaatcatgtgttytcaatgcccggcacataataactgctgaattgctattttataattattatatgggacayaacaattccagtgggatctaactaacaaggaataggctggactgtcaccttcctaatttttgaatttctgtctctgtttatggaacccaagatcacatyagctttctggcagccccattgtctggtggctcatcacctttccttgaggaattccaggttgggtagttgctggaccaagctccctgaagcagaagcagtcctcagacccctagacctggggtctagagccrgcataatctaattcttgcttctttgtgtttcagaagtgccagtggcagcaggaaagctccctttctcaagaatggtaaggcagctgcgtgttgttctcaccttctctctgctgagaggagtcctctcgtccatgctgagaaaccagttattcttctccacgatcctgctcagacaccttcaatggctccaaggtggccaaggtggcctcctggcctgcacattccccacattagcccccaaggctgagtaggcccagccccctcacccaagtcccaagattggcctcaaagcccttatgatgtcccccacctggtgtccaaggccccttccatcagtgagatctccccacccaggcttagcaggacagggtgtgctctctgctctgtatagtgcagacaggcaggccacagagttcaggccaaagaggggaccctggcacactgaaagcacctgtggagtgtgccagcctcccaccaccacattccatctgattgtctaaacaccaagttgtccccgaatcctgattccaccttggcccttggcctaatgcccccagtgacccagaaggcagtggtactggcatccttgagactcttgagattgccccttcatgtagtggaatgaggaggctcggagccaccttcccatccacagcctcagcatcgtccccgtcagtccatcagaayccagccccgcttattcagtgccaaagagccaaatagtttacatacattatttcaattagccctatgtgagagaaacgccactattataatttttacagatgaggaaactgagactcagagagtggaaatacctcaattaaggttatacagctaatcagtggcaaaattcaggtttctagggttcgggccttcacggttgcaccgcacaacctttctcagcctatccctgtctcaggcactaatgccagtcctgactgagttctcaccttgacctcaggcctgtcctaaaaccctttcagacagcctcaattaagccccaagctctgccccatttcttcagccttcgcacactttgcagcctttctgacatgggcctgatagatcatgcaggccagggagagttcaggagcccccagggagagaggggcctcctgggaatgatgggtggttccgtatcctggggtcttcaatgggaccagcavaagttctgattagtgcctctgaagagggtgtgaacaagtccccaggagcttgagggcacaaactcactccacacacatagacataaacacaggcatacgcttgaatgcctgcacaccgggggctccagagacacaggtacacatatgtacacatccagccataggcacacacgtggtcatgcacacgcacatacaagcaaacacaccaaggggctctgagtggttggtttcatcttcactggacccacactgggggccttcttgactctgatacctcactggggccccactggttccgagcagaacccctgtatccctccccactgcctctgaatccctgagtcctctccctcccttctcttccacagcccatctgtgaacacatggtagagtctccaacctgttcccagatgtccaacctggtctgcggcactgatgggctcacatatacgaatgaatgccagctctgcttggcccggatgtaagtctgccccacaacccctgcttgcttgggtgggccccatctctggtgcacagtctgaaaggagcaagacttgacctgcttcttccttcatacacgcttgacctgagaagagtcctccaacatatgcccctaatagaatgagtgccagattaactcaaagaaggcacatggttccaagcagaaatctagaagctggtggtggatagggagtaggggcagaaaccattttccttgttctgccttgattgactaggtgacctcatctgttttttcattcgtctagccagcaattatttattgagcatttactatgtgctaggcactggggctagaacagagcctaagttagacagcatcactggccttctggaacatacaattggtgtaagggggaagccaggctgatagtcagccaattgcagcacagaatttttttttttttttttttgagacagactctcactgtcactcaggctggagtgcagtggcacgatcttggctcattgcaacctccgcctcctgggttcaagtattctcctgcctcagcctcccgaatagctgggattacaggcgcccaccaccacacctggctaatttttttttttttttgtattttaagtagacatggggtttcaccatgttggccaggctggtctcgaactcccgatctcaagtgatccacccgcctcagcctcccaaagtgctaggattacaggcatgagccaccgtgcccggccttcagcacagaattctaaggratcagtggggcacacaggaataagtagaaattagctaggaaaaaggagcaagggaagataattccaagtagatgaatttgaaaaggtctacaaggaaaagtttacatttgaggaaatataagaagttggacatgttggagtataaggtttaagggagaatcagggagaggcaagaagtgagtccagaaagatgagcagggctagaacatgacctccctacatcagatcacctattggctcttagtttcttcatcaataaaacccatcttctatgatcctgagaactaaatgagaccatggaagtgaagaaagtcctcggaagctgcaaagctctggatagatgtgaaagtttgtatttgaggaaatataaggaacatcaggatgttgtcctagcttagagaaagatcatgctaatcaaagactcatggttaggaggtacattgggagtggaattgacaggcttggtatgtgactgtatgtaaaggctgaggggaaggaggcagcatactggtttctgatttgtgggcttgggtggccagtggtttcatgggctgagatgggtggtttgggggtctgtaccagttctgtggggggcagtgatgtttgtggacagttgagcccctaggacatcccactggatatggacaactgcatgaacaggtaggacataggtccgagctggagacagatttggcagccatcagcgtgcgctggtggtggaaaccccaggaagctaaaatcccccaggggaagggtgtacaaaaaaggaaaagctgtagaaggatgtgcccatggacccttgggatctgccctgtatccatacactgcatatgtgggcgacgctcagcaggatgtctggatggactgtgccaggtccctgaatggtacactacagctcctgagaaggtagcctcatgcctgtcttctttgatcctagaaaaaccaaacaggacatccagatcatgaaagatggcaaatgctgatcccacaggagcacctcaagccatgaagtgtcagctggagaacagtggtgggcatggagaggatatgacatgaaataaaagatccagcccaactgagtgaagtggtcagtgtctctggggacactggttgcagaggggataggaggtggatcttgcattgtcgcctctactctgaatttgatgtccagcttctctccgtccctctggtgctcctcaaccctgtcacatgtcccctcagaggtcccagttatcttctgcctgcctgagaggccagtccctgaccccaggatgctgcctagtactcctgtctgccccagcctggactatcattcaggccaagaacctaggtgaggtctgtatcctctgccactgctggggtgcacggcccagcctcagaaagcctctgtgaaatcaggaacagtagctcatacctataatcccagcactttgggaggctgagggtggcaggattgcttcaggccagcctgggcaacatagcaagactgtctttacaattttttttttttttaattagccaggcttggtggcatgcacctgtagtcccagctattcaggaggctgaggtgggaggggattgcttgagcccaggaagtcgaggctgcagtgacccatgatcgcatcactgcactccagcctgagtgacaaagtgaaaccctgcctcaaaaaagaaaaaaaaaagctttgtgagagtcatcctgtgccccccatggcttcctcctgggttgtgccagcactccaaggcatgtacacacagacacgtggcacagcaatggctgatattcaggcagtgtacacagtacagctgaactgcttgttgtaacattgaactaggtttttcacaatcgaaaacaggtgatgccccaagccctttgagtgcccccccataccctagccacccagattgtcccctggaaacacctgggtctctcggtttccacagtctggggttaattcctggcactgtgggatgatttcgagatgctgctctgctcttttggtcaacatctgctctgactggttgtcaaatattctgacattagacacagccccaggcacgtcctgcacacatgcactcacacaatgtcccacagggacacacagtgttcagaattgtcaccatagacagagactccctcctgtggtatatgttgaatacctcctcttttggccaaagcccctaggcagagcctcttgataatggtggcaggagaaaggggtatggagagaggcctgggcaggtgaaagcagtttcacacagactctgattcctgctgcagagtgggcagaaagggcaggaaatgctctgtagaagacacatgtctgagagaatgggcacaggaaggcaggaagctactttctcttggaccactggaatgggaacactgagcaggaattgttgctgatagatttgcaggtggcaggcctaggaggccatctatgaataaggccttctactgggactgattcatacctgtttcatacctgcatatgaatgatgtaggattaagtttggctgtgagaggcagaaaacccaaaataacagtgacttatagccagaacttcatttctcctacacatagacctatgtagtatgacaactccatgctcctctattttgttactctgccatccgcatcacagtttctacctcaggtccaagacagctactccaaccacagccatcacatctgcattctaggccacagagagaaagggcacgccacttgcctctgaagacatttcccttaagacatacacactctgtataaaccacattagctaaaatgtagtctcatggccttctgagcagggagactgagaaatacagtctatctggttggccatgcattaaactaaaaattagttcactttttgtaggaggagaaagtggatattggtgacatctaaaagtttctgccctaagtgggacacccctcttatacccaagtggcatagcccagccaagcatctcatcagtgacccttccttcccaggcttctactcatcatctgaggaatcagagattaagcctgaacaatgtgccaggcaccacctggaaggaatacctaatttaccacttacagatgtggactctgtggccccctctctgggaactaccccaaaacctaagtgttggcccctaaagaccttatgtgtggcatgagaccctgctgccctggccattgctgattagccaaaagattcttccccaggatctttcaaattagaaacaagcaaacagaggcagttcccctctggcactgaagctgtaggatgagcaacacaggggttgtcagcagtcacatgtcctgctttgtggaagaaggaggaatgagaggatgatgcaggcatgcagaggcagagtgattacaggcagtgtttgagttcctgaagcccggctgcctttgaccttcccaaaattacatgggataacttgatatcatgaccataaagtttctattttgcccagtctctttggaattaggcttctgattctttttctttctttcctttttttccttccttcctttttcttctttctttcttccttttttctttcttctttctttttgagatggagttttgctcttgttgcccaggctggagtgcaatggcgcaatctcggctcaccgcaacctccgcctcccaggttcaagcgattctcctgcctcagcctcctgagtagttgggattacaggcatgcgccactatgcctggctaattttgtatttttagtagagatgggatttctccatgttggtcaggctggtcttgaactctcaacctcaggtgatccacctgcctcagcctcccaaagtgctggaattactggcgtgagccactgtgcccagcttggcttctggtacttttgacaaaggtcctgactactatatgaaggagtctcagaagaggtaacctttaagttgtgccttgaaggataagtagaaaccattaactaaatagacaatgtcgaggccgggcatggtggcccacgcctgtaatccaatcactttgggaggccaagacagacagattgcttaagctcaggagttcgagaccagcctggccaacatggcaagaccctgtctctaccaaaaacacaaaaaattagccgggcatggtggcacgcacctgtggtcccagctactcgggaggctgaggtgggaggatcgcttgagcccaggaggtggaggttgcagtgagcagagatcaagccactgcactctagcctgggcaagagagcaagaacccatctcaaaaaaaaacaaaaacaaaaaacaatgtgggagaatccttccagccctgaggccgaagaattcgtttgtgggagcacacattcccatctgttctccctgtggtaagacttaccatgtcccaggcaagtgggcacctgagaaggggtgctctctccccttctcacgggagaagaaggggtgctctctccccttctcacgggagaagaaggggtgctctctccccttctcacgggagaagaaggggtgctctctccccttctcacgggagaagaaggggtgctctctccccttctcacgggagaagaaggggtgctctctccccttctcacgggagaagaaggggtgctctctcccctctcacgggagaagaaggggtgctctctccccttctcacgggagaagaaggggtgctctctccccttctcacgggagaagagtttcacaggcagaaaccccttgggtgagcagatctgcgtgggtggggcctgtgcaatcacctatcacatctgcccagcagtccatgcattagggcctcttttctcaacccttaagacaataaaggctgttaaggctgtaaattccaatgctgacggagattctgaggccaaatgcagctatagaagtttcactattgatgtgtgcattcaacattcatttgttctccaaatatttattgaggtcttactatatacaagactatataacaagttatgcttgttatatatgttatatatgttatgttatatatatatatgttatatatgtaatataactatattacaagttatgcttgaaataatgctgttaccaagataaagaagctccttcacccaaggaaccctggtgttaaaggcaaagattaaccaaataatcccacaagtaaactatcatggactatgtaaatgctgtgaaagaaatgtatgggaagtcgagagaggatcccacctgggggctggacagggtctcaacacagtaggtgagggttctccatgcaagagacatgtgagttgaattctgaaggatgaacaaaagtcacctatacaagggtagggttggaggaaggaaggtgaggagctgttcaagcagaggtagtagcaggagcaaagacccccaggcaggagagggtgcagtgcatctgaggacctgaaagaagagtggctgacagcagacagccaacaaatgagggggttgagatgagatgggagaaggcatggggtaaagacttttgcctaaagagaaagtgagccattggagggttctaagcaggggactgacatggcaagatttgcacttcatgatcactcgggctgctctaaagaaaatgaactagagcagagaggaagtgggagctagagggagaggcagaggacaagaggaaaaaaatcagagaatgggcctgtgcaaccctgtgttggttgagaggcagtacagtagaggggaaaagcactggctctgaaaccaaaccacccagctttgtgtcttggctttgccgcttactctacaaccttgcgctaatgacctaagttctcttggtttcctcatctctaaaataaggatatctgtctacctctcaagttatgtaagaattaaatgactaatatatatgaatagtttagaatggtgttcggcagtttggtgcacagtaacttctcattaaatgttgtggcccacgccacacagctatcacacaaaaatagatcaatagtgaaccactctgattaaagttggggtgcggtgggctgggacccgagccttgtccacaagtctacctctactaccttgtctgaggtcttaacctgcccagtcctgaattcctgggacttcaacgactctctctctgccaaatgatgtgagtctttaggtagagttatagcgcaaagggctactatcaatgttattaagcataaattatgactagagccacagaatgatttcctcattaatccaaaaaaaaaaaaaaaaagcaaaccactcttctactttatgatgagcacataaacagtttttttttctttttatttatctacttttacttacttaaattttagagatggggtcttgctatgttgcccagactagactcaaactcctgggctcaagtgatcctctagcctcagcctcccaagtagctgggactacaggaaggagctactgcacctgactcaattttttttttttctgagatggagtctcactctgtgacccaggctggagtgcaggggcgtaatctcggctcacagcaacctctacctcccaggttcaaatgattcttgtgcctcagcctccccagtagctgggattataggcacatgccactacgccaagctaatttttttttttttttttttttaaagcagaatggggttttgctatgttgcctgggctggtctcaaactcctggcctcaagtgatccgcccgcctcagcctcccaaagtgctgggattataggcatgagctgctgcgccaggccttaattttttaaaaacaatgatggggtgggggtgggggacagtccacaaaatggatagaacagctgtgaaggaaacatagaactcagaaggatatggttaacaaaaatgcctttgaaggaagcacatgtcactcctgagaagtttatggttggcttcaccacctgcctgctttactcattctggtgccttctctttgcccttcctaatccatggctctggcctggtttcaagcacagactcagtcaacactgggttctaaccttctgaagacttgcttggggacaaggaagccttgcatcaaccacaggctccatccaaggaacggccccctggtatctcatggcctgtgg

SEQ ID NO: 97938 - DNA, 26712 bp, Homo sapiens
cttaaatataaagttcagtttaaaaaaatgaagggtggtgagtgggggtaggaatgaaggagagagttcataaaaaagactgaaattgtacgtagtcagaagagaagaaccacaacaaattggtgctactcaaaaaataaataaataaataaaagtctggccccagttaattaaaaactaaatattctaagaaatttaaattaatttatacaaacataaaaaatagcatttcagttaggatttactttccactttgtgccgataaaaatttttcttttttctttttaatagtagctcagttttattttctgtggtaacaaacatttaagaaccagagaaaacaagggacccctgagcacacaaaggcagtacaggccgaccatgaggccctcccgggaaagtagcaactgtgggaattccctgccctagggaggatggatgcactgcctaggaggagacgcaaggttagacctcgccccattttcccaggccaggcttagcgggaaactgggggcccaaagtgctgcagggtccgcaccaccagagaaagatggtcgagaaagttgataagggaaattcggagcaggcaacagtcttcagctttccagcggacggccaggatcctgccgctcactgtgagatccttcccaaccaccctttggtggggttcggcatctggagccagggacccatgggcaatttccacctctaagggggtcgggaaaggcacgctgagggtgaatatgtgcggccgcattcctggcccttggccacagacgctgcgtttctgctaggacctgacacgtgcggtgggggagctccgctggccggagctgccggggtgtccgcgcccccggggcagctgtgatcaccctagccatccccgcagttggcgcctccgcctgcgtctgcatccacgtcccacataaccgccctggctccgactccttttctttgtaaactaaagaaaaaagtatagctgtagttgtactcattcaaacctggactcaccttttccttcacccaattttgctcctaccctggcttcttcctccttctgggctccctaccccaggaaggggatctccaaccatcctgttgctaaagccagaaagctggaagtcattcctcctccctacctctgcatcaagtcatcatgactctacctgaagactttacatgtttttatatttgtgtttatttttctccctctccatttcttctatttaggcctcatcatttctgatctcatcgctcaccataaaaacctgctaagaatccaaccttcgcattagcacccaagtgattattgtgaaatttaaatgtaatcaaatcagctctaaaacaagggttactgtgaggataacaatatggcaacgtttgtagagtgtttagcgcagtgcctggcaggtcctcacaaaagaaagaacagatgaggaaagagaaaagaaacaaaaagtcagctgtcacaggttatatcaccccatccctaaaatcctccagtgtctctcaagagccttcaaaacaaaattcaaactttttagcataatgcccaagcccttattactttgctcctgccaggcctccagccatctccagctacctctatgaacacttacggccatgtggttattgagttattggccaggcgtggtggctcacgcctgtaatcccagcactttgggaggccgaggcgggcagatcacctgaggttgggagttcaagacagcctggccaacatggagaaaccctgtctctactaaaaaatacaaaattagccaggcgtggtggaacatgcctgtaatcccagctacttgggaagctgaggcaggagaatcgcttgaacctgggaggcggaggctgcagtgagccgagatggctccattgcactccagcctgggcaaaaagagagaaactctgtctcaaaaaaaaaaaaaaaaagaaagtatgaaatatcccactgaaataaaatataatggtaagaaaagaggccatccatgacagcaacaacaaaaaatgcctagtaacacatttaagaagaaatgatgaagacctagtttaaaaaatgaagaaaataaatatacagttatatgttcatgagtaggaagattcgacattttaaatgtgttaattctctccaaactgatatataaaatcactgtaatcacaataaaactcacaatgggatttggggggaatctgccagaaatattcctaagttcctctggaagaataaacatattaaaaaaaatacaaggaatattctaaaaagcaagaacaatgaagggaagtagtaccatgtatttcagtggaaattaagtatacattaaaagtggtggccaggtgtggtggctcacgcctataataccagcactttgggacaccaaggcaggacaactgcttgagcccaggagttcaagaacagcctgggcaacataggaagaccctatctctgcacatacaaaaaaaaggttggggggcggatttcacattagtcaggaaaaataagattagtgttagacaaactagtttgccatttggagaaaaataaagatcagttacttacaaataatcctcagtccttacaccaaaataactttcagatggaataaaaaatttaagtttaaaatggaacaatgattccagatgcagtggcaggtgtctgtagtcccaagtactgaagaggctgaggcaggagaatcacttgagcctaggagttcgaggccagcctgggcaacacatcaaggctgttaatttaaaaaaaaaaaaaaaaaggggaaacaatgaaagtactagacgtaacctgtaaacctgggacaacagatttatatttataatgctggactgatgaaggggaaggtggagagaagaaaaaggccaaaaaggaagagtcacaatttatctacataaaaattaaaatctttatatggccgaaaaatatatatatagatactaagtaaaaagcgaagaatatactaaagaaaacaattgtaacacatgacagactaatatctacccctaaaagggctattattaaaatagtggaattacaccacagaaaaatggtaaaataatatgaacagttgacaggagagtcagtaaacatttaaaacatggttaaacttactaacaaagaaactcgaaacaataagatatcactttttatctccaagcttagcaaagatttaacaacaaaaggccctcatattggcaaggcccactcacacactgctggaagcagttacaaaccagtatggaaacttatttattacaattttaaatctacattcatgttgactcagcaatttcaattctagctgtccatccaacagaaatacttgcatgagtactcaaagctgtatttgctaatttctctgcagcagtttgtaaaacactggaaattgctgaaatattcatcagtaggggaataaattacggtgcctacatactacgccattaaaaataacaaggcagattagttatttatcctggcatagtaagatgacaaagtgaaaagggcaagctgtaaacagcttgtataatgatcccatttctgtacaaacgaagaccacatacaaagttattgccagtttttttattttattttacgtaagaatgcttcttaaaagtgttaacttttttgttagtttcgtttttagacagggtattgctctgtcgtccaggctgaggttcagtggtgcaatcaccactcactgcagccttgacctcccaggtccatcctcctgcctcagcctcccaagtagctgggagtacaggcccacaccaccacactaactctaatttttgtagaaacgaggtcttattatgttgctcaggctggtctcaaactccgggactcaagggatccgcctgccttggcctcccaaagtgctgggattacaggcttgagccaccatgcaccccctactcttcctttattagcatttaacactcaactgtttgtttctggttccctatgttgtgagctccttgaaggcagggaccacgacttatgtgatttttttttttttctgagactcgacagagtcttgctctgtcaaccaggctggagtatagcggcaccatctctgctcactgcaacctccgcctcccaggttcaagcgattctcctgccacagcctcctgagaaggtgggactacaggcacgtgccaccatacctggctaattgtttctatttttagtagagaagggtttcaccaagttggccaggctggtctagaactccggatctcaggtgatccgccaccttggcctcccaaagtgctgggattacaggtgtgaggcacggcgcccggcctgacttacgtgatttttgtattacaaagccctagtacactgcctggtaatattagacgtttattaacggttggtttaaacaaaaaactttataccagaggtgatacttgagaaggcaacacctaagattgaaaaaaatcaggtgtctgtcagccaatgcaaaagcatacaaaggtgaaaaggcgtatatgggaaactgcggatagttctgtgactggaatgcacagttaaaattaatgaaagagaaaaggctgaagaggcagcatgaggatgcttccaaggataaagttcaaaattcttagcgtagcatatataccaacagacaaaggcatgccctaactagctttgaagcctcacctccggctattctagctcccttagctatggctatatccaattagttgcaatttcctaaaaacatcatattcttccacaccttagtatagccttcccctgtgctttgtccactgctctcctcccattttcaaaactcagctcaattgccactttcccaaagaaattctctctgatctatcaggttaatataggaggctctcccctactgacttctacctcatggtttctctggcagtctgttgacttgtttggcttctcactaaagtctaactggggcttttcaactctgcatctccagttctgtttttgttttaaatcgagacggggtttcaccatgttgcttgggctggtatcaaacttctgagctcacgcaatcagcccacgctggcgtcccaaagtgctgggattacacacgtgagccaccgagcgtggcaaactccatctttcttggtgctagatactgacatacctgctgtgtccctggataaagaagcggaccccaattcccattaagcccccgtggtaccattttcaagtccgaggtcttacgttgcagattgtacatccaggttccctgacccgtaggatttaaaagtgaggtcaaataattaaacaaattgttttagtcagacactcttgcggctactctgtagccaaactgggtgaaaacctgaccagaggagtccacggccctctgtacatcaaagacggtccaaacgtctcactgtttagctcagtcccagacacactgaactcaatctgcacgaatcagcgaggtccagggcagataacatgtgtctaggggcctggacttgcacaaaaagccgtaacaacttcacaatttgattaattatgccgccttggaccacgcgtgaaaaacagcaagacccaaggcctatgctattggtctggggactagacccacctggctcaagcattttttgctcgccacgttcccaaaaagagaagaggcgcccgtaagagggtggggggggggcaagactgttccaagagctttcccgttcacacacagctcccactgggtcactgtactcgagcccttcccgccctcgcgggccgaggcggccaccccacaggtttgggaaccctaggacttgcagtgctcctgggccatgccccaccagccggagacttccgcactctcaggctcgctgagtggagaaaagggctccagaagattccacgagcgccgggaagccgcgctagcaccaacccccacaaggcctttcggcgcagctcctcccgacccgtgcgcccccgcgccgttgcccaggtaacggcggggcggtggcagcggccgagaagggcgggacttccggcgggtgacgcgcccgggttcggctacaaaagasgacggctgcggcgcgccgggcggaactttccagaacgctcggtgagaggcggaggagcggtaactaccccggctgcgcacagctcggcgctccttcccgctccctcacacaccggcctcagcccgcaccggtgagtttgagccctcgcgctgcccctagtcccctgsctggcgccattggcgccgggaaaccgatggagccgcggtcgggaggcagttggccgcgtgggtaggaccgctgtcagttcctggrcccacgatttcccttttggagggctggtgtggtgccctggcaacccatccccggcacgcacagtgaatgggcccgagacctttcctagacctccctccttccccagcctgggatctccaaggagctactgtcttcggctgcccctccgtgcgcgcccccgcggcccccctccccgtccgtgctcgctcggggtgggggggggagtggggttggcgaccctgcgcacgcgcacagggaggcaggggcgaggggctgcggggggagccgggcggagactgcggcttttggtttcgctttctctgtttcccctccctttgtttgttgagggctgggctttccccaccgccacttgggtccagggtgggagggagaaaggaaggaaatcggtcagcgccaagtgcaaggggaaacctggcaggtaaactctgccagcctgaggggcgagagggattcggctggagaagctgtaagccgtgggcggtggagggcttgctgtgtggagccagtaacctgttctataaaccactcccccccaccrctgtgtgcccagacgtctttttctggagagtatatggagtttatcagatttgccaaagacagtgatagtgtaatgaccggtagactgaacatatcagtgcttcttttggttacaactgtcaccgcctctagggcaaacgggaagaatccagataatagttgtgttatattagtatggaagctttggtgtaggaaaattggaaccagctgctagaaggcggctctcagattatttcccgataatgattatttgttttgtctgttcgagtttatagctgaattatcgcaggaattgttacctttttggtgaaatttagggaaggtggtgttcttataatcggattttgcaaagagattgctcggccttagctctcttttttattaaaagctaccagttgaaagccggttaaagttgcattttcttatttyaggcagtagaagatggtgaaagaaacaacttactacgatgttttgggggtcaaacccaatgctactcaggaagaattgaaaaaggcttataggaaactggcyttgaagtaccatccwgataagaacccaaatgaaggagagaaggtkaatagtatctactcttaaacrtatctgaatagttctttgccagacgtatagtatttctattatggcctgaaatcgagtatctaatatagtaactatgatcacttctcggcctttttagctaagatcaagtgtaatgtagctaggtaacacttgttttttaaaaaatgaaattcactcctcttttctcaaacagtttaaacagatttctcaagcttacgaagttctctctgatgcaaagaaaagggaattatatgacaaaggaggagaacaggcaattaaagagggtggagcaggtggcggttttggctcccccatggacatctttgatatgttttttggaggaggaggaaggatgcagagagaaaggagaggtaagaagaatctagtctttgtgcagctaactaaagttagctgttggtcagagcagatctttgagaaatcacccattttaaatgcttgtttacatgttggtataatgttgcaaactgaccacaaattgcctctgatttatggtgtcgtgtttttttgttgtggtttttttttttttttcttgagacggagtttccctcttattgcccaggctggagagccatggcgtggtctcagctcacagcaacctccacctcccgggttcaagcgattctcctgcctcagcctcccaagtagctgggattacaggcatgtgccaccaaacccggctaattttgtatttttagtagagatggggtttcaccatgttggtcacgctggtcttgaactgcaaacctcaggtggtgatccacctgccttggcctcccagagtgctgggattacaggtgtgagccaccatgcccagccagtggtgtcgctttttttaaaatgagatttaaggggcctaaaaaatagccaacagagtggtagcaaatgactgcttccaaaaatcttagatattatcaaacaaattatgagaacaggccgcgtgctgtggctcattctgtaatcccagcactttgggaggccgaggtgggtggatcactgaggtcagggttcgagaccagcctggccaagatggtgaaaccccatctctacaaaactacagaattagctgggcgtggtggtgggcatctgcaatcccagctcctctggaggctgaggcaggagaatcgcttgaaccctggaggcagaggttgcagcgaacggaggtcacgccactgcactccagcctgggcaacaagagtgaatctctgtcacaaaaaacccaaaaaaatccaaaaattagccaggcatggtggtgcgtgcctgtaatcccagttactcaggagggctgaagcaggagagtcgcttgaacccgggaggtggaggttgcagtgagctgagatcgcccaattacactccagcctgagcaacacagcgagactcttgtctcaaaaaaaaaaaaaaaaaaaaagacaaagtatatagcaatataattttccaagccctttttacagatcttatttggtgttccctcactccccaaaggaatttgatggtaggtacagtggcctttttcaaatgggagtaagttaaagttcagaaacctaaaacttcttcaagctcatatagcaagccaacagagccagggctgaaaactggttcgttgcctgccatctatstattcttgtttcagctttattgtgtcaaaattatgtatttaatatgtttatcaggaaagtggcctatgggctctagaaatactgcttataggagtaaaatgttcaagagaaatcagtctcactttatttccagtatagtgtatacaaataagggctgatgagcagaaccagttttagaatgaatggccaagccattaaatttcactttgagcttcttaaggttcagaaagatttgggaaattgtttattcagtttttctttaaagatcttcaaggaaaggattatgtttttattaagatacttaaactccttaaaaagaaagtccacaatccaaatgacttgcttagtaaattgttagaatttgtccacaaaaaagtagtggtggtttttcacttaccttacaaagaacctgcaggttaacattggcaagctcttttatgtggcttatgatcatattgagaggttatttctggggaaatgcgcttcatcaagctctagaagctttatttttccttccttatactcaacactgttcaaaataagggcagctagattttagcgtgccaaaactaaaggtggaactataagcagaaggacataattaatggtatttcatgcttgattagaaagttaaaatgttcattaggcatattgtacagaaacgagtttgagaacttttttcagttggtggaaaggcaataatattgttgtgaataagtccttgtggaaggaccactagttaggaacttactaacttaytagcaggtgacttcatacttctaacctcagtgtccttatgagatcttgaccttccatttcctattctgatttaagtgaagtaaggcactccttagtagccactggccatgtgtggctccattaatttaagacaaaaacaaaaatacggtttcttagtctaaatggccacatttacatgctcaataagcacatgtgattggtggctgctacgttggacagaacagatataaaacatttatcactgcagaaagttctgttgggcaatgctattataaaaggtatgagaaatttggccttcaaaacaaccagtgctggcccagcagtaaatgggctgttttctactaaatcaggaagaagtagaaattgatactcttctgtggtgactcaataaatacatcagcttccctggccaatcttgattaatgagaatttactgtgctacagaatttttgsatgaagtaattggccatgttgctcaatacggtacgaagtgaaagcttcaaaaaatatattgtgacagaaatgaatgtttggattattgtgaaatgtgcccttttaaataacattggtttttctcaagtgactttgaaggtaatgcttttgcttaccatatttccaagatggccacgtctgtgcccttaagcaaatatttaatctctgacctgattttccctcatctgtgattacatcacagtttgaggatcatctgtgataacgtgaacattctgtgtatatagtaggtagtcaacagatgtaccctgtgaggctcatcttttattattctttgccacattctttatagtgcctttagcacaaataagatccagcatcttaaacagatttgcaatgagaaatattttgttttaggtaaaaatgttgtacatcagctctcagtaaccctagaagacttatataatggtgcaacaagaaaactggctctgcaaaagaatgtgatttgtgacaaatgtgaaggtacggtgtttttttgttttgttttgttttgtttttaagcacctttaatatgacacctgaaaatggagctaagacttctagatagatatgtaaaattgaytcatgtacactacctagattttgggggaggagagggcagatatgaagaaaaccaactgaaaacctcccacctaaagaartatcagcacttttttctgtgtatattttaaatacagttgrgatcaagctagtttggtatcttttttgtaatawgtaaaattdtttattggaaagtgtgttctaataagaatgaaactcattggaatgatctcatcagttgtacattcagagggtagcattccatcaggcttcgaaaatattaaaagtatagcatttaggaattgtcttcttaaaacatttactactgtatacactactaattcatacattatttaattttctttttaaatttaggtagaggaggtaagaaaggagcagtagagtgctgtcccaattgccgaggtactggaatgcaaataagaattcatcagataggacctggaatggttcagcaaattcagtctgtgtgcatggagtgccagggccatggggagcggatcagtcctaaagatagatgtaaaagctgcaacggaaggaagatagttcgagagaagaaaattttagaagttcatattgacaaaggtgagttctgagttacttattctgaagtcttgaatgctgtggcagatttattattaacattttataattgtttaaaaakcattcttaattaggttatatatgatcctatcaatcagaaataactcttagcagcttagtaaataatgttcttttatccagacataattttgcacattggtatattactaatacagaatatattaggaatctcctcatttartataacaggatcatcttttgaaatctgtggtcctgtaaatgattgaatagtgttccaaacttaattctctcctgttaaaccatagttcttccatcttttaaaacattagaattgtacacattcttaattaggagttactagatcaagggataggcatacttttaaggatttgaaaggggagttaggtgaagaattgggtctcataaaaattcatggtttttttggagacggagtttcgctcttgtttcccagrctggagtgtgcaatggcacgatctcagctcattgcaacctctgcctcccgggttcaagcagttcttctgcctcagcctcccaagtacctgggattacaggcacccagcaccatgcccggctaatgttttgtatttttagtagagacggggtttcaccatgttggccaggctgatctcgaacacttgacctcaggtgatgacctgcctcggcctcccaaagtgctgggattacaggcatgagctaccgcaccccgcctcatgtttattttttaaaccaatgggcatgtttttttttgtttgtttttttctgaggtagagtcttgctctgttgcccaggcttgagtgcagtgatgcgatcttggctcactctaacctctgcctcctgggttcaagcgattctcctgccccagcttcccaggtagctgggactacaggtgtgcaccaccacacctggctaattttttttgtatttttagtagagatggggtttcaccatgttaggctggtctcaaactcttgacctcaaatgatctgcctgccttggcctcctaaaatgctgggattacaggtgtgtgccaccatacctggcctgggctagtttaaataagcgtattggcccacttaattggcttacttgcccatctattatatttaaatgctccgttaattgatttgatagactacctttcatttttttagacttgacacttccctaacccattgggctccagatttagaaataactatataaccttttttttgtattctcgggatttgattgatttgtcaatttttaaattttactcttgtcaacttgcaaaaacattttaaaatgtattacagcaatacactgcagaaattttaagaaatgtatataaccccagaaggaaacttaagtcaacattatggtaatctcttttcagattttgctgtttataaatgggtctactattatactgtactgtggtatgataccaatctggaactgttaatatttgaacatatttccatattaatatacaaatctacattaacataagtggctgcaataggattctatcatgtgactcatgatactggcctctctgacccccagggttccacccaagaatgtagtacattgaaaggtaaaaataagtttccttggccagttgttgaacttaataaatctgtgtttaccccttagtgggcccatgcctaaggtttatactttgaggtgttcttgataccaatagcatacagagtaagtcttaacgttgttgataggttcttggaaactgggacttctagcagaatgacctcaaataatgtcatgcaggtcctcaaataatgtcatgtcactgtaacacagctgaggggaaaaaaattggtcttgttatgtgtcatttcatttaaagcaatttccaagaacctatcaacaatggactgtaagtgagaacttgaaattaatgccctaactatatagcaagtgaaggcatttgtgctgtgcctactcttactctgtattcaggaaaacctagctgagtttaattgcttccctagcataacaagttattttgcctcaatacacgattaaagacagattgtttaattttgtcagtgtatgatactgatagcgctttaagtccttatttaagaggtacgtactgaagtatttgtgggttaatggatatagttggagtttgcttgaaagtrtatgtggggggcatgcgtaggggtgtaatacatgaaatattagtcatgagttagtaactgctgaagccaaattggatggatatgtaggaattcattgtactgttggctctgtttatacaggattaatattttccatacgtaaaggtgaaacatgattgctctgttaggtaaccagagtgatcttgggaaataatcaggagataactgctttggtgtaatactctacaaacacaggttttcttacatgagttatgttctaagagacgttgcccaaacccttactgaactaaaatatgtgggtcagaggtgaggggcacgaaktctcagtttaaaaaaaaaaaaaaaggcgtgtttttttgccctgttagaaaatactcctccccttgtattttacggaccacatgggctaagggagtgtctagcactgattgttttgtttgcttgtttaatttaaatgagacaaggtctggaactcctgtgctccagggtgctatcctcagggtatcctcctgactcggcctctcaaagtataattaccctttttttaaggggactatactgaatagttctttaaaatacggattttcaggcacaggggctcaggtctgtaatccgaacactataggatgccgaggcaggatcccttgagcccagtagttcaagaccagcctgagcgacatgagaacccccatctctattaaaaaaaaaaaaattcaaaaattagctggtctgtggtcctggctactcgggaggctgaggtgggaggatcacttgagcccaggagatggaggctgcagtgagccatgtttgtgccactgcactccagcctaggcaacagagcaagatcctatctcaagagaagattatagatttaaaatttttttagttttatatataaatactacaatagaagggtcttgatttacattgctgttagacttttaatagaagtaatttgatgtgttataagtaatgaaactgaaatacttaattaacattttttggttataaccagtgttagccagtcatggtttagtaccagcatatacctgttgagttaatactctaaatattgctaatgaggtgtaggtgtctgtgggaaagttgaaacttggaaaggatatgcagcttacttccccagggtaatccagccagtgaatagcagctctgagatttgaaggctagtctctttgcctctggagtttgtgttctccactgtgatacctttcttcaggagcaaattggactgaactacttaagtgggctttcttagtcatttctgtgatttttatgcataaacaaacatctatgtatagattttatgattctgaccttagttggatatttaataaaagtacaaaattaatgttttgtttttaggcatgaaagatggccagaagataacattccatggtgaaggagaccaagaaccaggactggagccaggcgatattatcattgtgttagatcagaaggaccatgctgtttttactcggtaaagacttttatcmaccactcaaattgatatcacatatttgggttgttggttttgttttttgtttttttgttttttttaaagtgttttccattactyttagaacctatttctcaggaagatygttaaccattgttcagatcataagaggttgaatacataggatcagatttttagctttttgtctctaagtatggaacgttgaaaatgtgtttcaattagatgttttgtgtgaacctaagcagcagatgggtggggaaaacatccctggacaaaaatttgccctcaatctttgtaaagcaatttaagtgccttaaagctctcaccagttttcaayctcatttatgataaattgaattgcttttaattataaatatccaaaagcatctctgtaggaaacttaaattgtaactcaatactaagtataaattcaggtctaccattttgagctaaataatgagtatgatgaacactgaagcacaagaaagatggatgattaacagcaaatgtttgtgatccatggctaacataacaccctctgtgcatgctatattcccagcaacttgggaggctgaggtgggaggatcacttgaggccaggagtcctagctactggggaggctgaggcagaagagtggcttgaactcaggagttcaaggttatgatcatgccccactgcattctagcctgggtgacagtaagaacccacctttttttttttttttttttaatggagtggaggtgaaattgggaacatcttaaactagtttaggattaattaatatttcrgcttggtttggtggcttacgcctgtaatcccaacactttaggaggccgaggtggatggtcaggagttcaagaccagcctagccaacatggtgaaatgccatctctgttaaaaattaaaaaattagccaggcatggtggcaggccctgaggcaggagaatcacttgaacacaggaggcagaggtcgcggtgagttgagatggcgccattgcactccagcctgggcaaaaagagcaaaacttggtctcaaaaaaaaagactaatattttacaaatgtctgaagataatgggaaatgttgtcaagctcaggcttttgatgctgtcatttgagaagggtattaaagatgttttatttatttatttattttttttgagatgcagtttcgctcaacaggcccaggctggattgcgatggtgagatcttggctcactgcaacctccaactcccaggttyaagcaattctctcacctcagcctcccgagtagctgggattacaggcgcccaccaccacgcccagctgatttttgtatttttagtagagacgggtttcaccatgttggccaggctggtatcgaactcctgaccttaggcaatccacctgcctcggcctcccaaagtgctgggattacaggcatgagccaccgcgcccagcctaaagatgttttattaatgtgggttggaaaaggaaagtctaagcatgagaaggaggaagtgggctgttaacgttaaatatgaaaggctgtgttcactcacaatatgccaggaaatattatttcaggttcatcaatgaggaaattgttagagtccctttaaattggacatatcctcattgtttaatttcatagagcctaaattatctaggaccctgcccaggctagagtgcagtggcacgatctcaactcactgcaatctctgcctccagattcaagtgattctcctgcctcagcctcccgagtagctggaactacaggtgcgcgccaccatgcctggctgattttttgtatttttagtagagatggggtttcaccatgttggccaggctggtcttgaacttcagaccttaggtgatccaccctcctcagcctcccaaactgctggaattacagatgcgaaccacagtgcctggcctaaccctcactcttgtgagttgttttttttttttttccctctgagaaaccagatttaaaactaggtaatgaaacagttcactgatggtaaatggtaaaggctgcctagagtgtgtggaatgactttgaatccttaactaggaaacggggctggcaggttgcacatgtttgctcttcccagatctctgctctgcttgatttttacaatgggggaagaaaagggtgtctttgtaaaagaccctttgcttttattaaacaaaaaaacagcctgctttggtacatctactgattcgtgatttgaaaaatataartatgtgtcatattttatgcagacgaggagaagaccttttcatgtgtatggacatacagctcgttgaagcactgtgtggcttccagaagccaatatctactcttgacaaccgaaccatcgtcatcacctctcatccaggtatgggaactaggcaagcttaarcttctsttttctattctagtattttccttgtctcctgttaacaaagtgtagtataggcactgagggaaacccattgtttttctttctcggttacatatccttctctgggcttagatgaagttataaggtcttggctctcttgtcagcccttggaaaacccataagtgaaaggtaacaggattgctttgccacgtaagttttactcctgccaatgagctaggacagtgctctgttctttatattccctgcctcataaaaatgtgmccatacttaaggaagaacttggcttcaatgtttttaggtcagattgtcaagcatggagatatcaagtgtgtactaaatgaaggcatgccaatttatcgtagaccatatgaaaagggtcgcctaatcatcgaatttaaggtaagctgtaatgtactttaagaatacttgagaacaattggcttactaaaatctgataaaaaagtaaaatttcagccaggtgcaagtagctcatgcctgtaatccccgcattttgagaggctgaggcaggaggatcccttgagccctggagttttgagaacagcctgggcaacatagtgaaaccctgtctctttaaaaaaaaaaaaaaaaaaaattaaaatttctgaatgccaaagaacctgaaacttacatttttccacagcaagaaatatatggatctggccacgtgccactggcacacacctataatcccagtgctttgggaggccaagacaggtggattgcttgagctcaggagttaaaggccagcctgggcaacatggcaaaaccccatctctacaaaaagtacaaaaattagccaggcatggtggcacacacctgtagtcccagctactcgggaggctgaggtgggaggattgcttgagcctaggtggtcaaggctgcagtgaatcaagatcgtgtcactgtacttcaacctgggtgacagaatgagaccctgtctcaaaaaaagaaaaaagaaaatttacctaataactacttctgtcatgttgagcattctttgttaacaagttgaggatggggttttttgcatcattaattggatatttaaagataggttgtgggaagggtgtgtgggacaagtgggtattttactaatgaaaggttgtaactggcatcttaaagttgagaggtgctttataataattgcagatttcttggcaaaatagtgtaatgcttgatttgttaataggtataaagcaatccagtcattttcctgagtcttaaattggcctgtcaccataaaaatattaattaaaacttttttttttttttcctttttgagacgggagtcttgttctgtcacccaagctggagtgcagtggtgcgatcctggatcactgtaacctccacctcctgggttcaagcagttctcctgcctcagcctcctgagtagctgggaatacaggtgcccgccaccacgctgggctttttagtagagatggggtttcaccatattggccaggctggtctcaaactcttgacctcaggtgatctgcccatctcagcttcccaaagtgttgggatttgtaatcccaattgtatgagccaccgcgcctggcctaaaaacatctttggtaaggaagaactacccttttgagagtaagaatagctttgtttaaatatgtcgtaagaagggttaggctgttgcaggatgggttttggtattaaaaagtcagtttgctggatagaacaatggttgttaaagtgcagttttatttaatacaatcatttttaataaagcctgacttctggtcataatccttgaactctagttcagagtgtgctatgcactgtgcctttttagagcctgttctaacctgagattggcagattcacctaaatattacgtgtttacatgtgtttttctggggaaaatgggtccatgatactctaagggagctaatgatgaaatcagattgaacagtgaaagtttcttttgaaggtaaactttcctgagaatggctttctctctcctgataaactgtctttgctggaaaaactcctacccgagaggaaggaagtggaagagactgatgagatggaccaagtagaactggtggactttgatccaaatcaggaaagacggcgccactacaatggagaagcatatgaggatgatgaacatcatcccagaggtggtgttcagtgtcagacctcttaatgggccagtgaataacactcactgctggcatttaatgtgcagtagtgaatgagtgaaggactgtaatcataatatgctcactacttgctcttgtttttgttttaataaactatrgtagtgttwtaaaaagttaaatgaagaataaacgcaaatataaaagctctgattttgccctgtatgtatgatgacttcagtgtgcaagatgaagtttaatacctgtaaaaactacaaagaagttcccctagcatttytaggccaaaccttgtaattgacttcagctatgtacgtggacaagcttagactgaaatgctaggtatatgtattggcttcagtgtatgacccttcattgttaagctatgaaagtaaaactctgtatttaactggcaatgaggaaaaaaaaattttgtagagaagtgttggtctgtatagttctttatattaagtgggattcattgtaatgcctctgcatttattctgttgcctcagctgttacttgaagatggcgtaatatataatttatcctgtggtatcagtgataaaaatgatacctttctgtaggaggggtttatcataatatgctgcttcttgaaggcttgcacttccagaattgtgtttccttctgctgtgccattcatatatatatayatatatatatatatatatatatataatcttgaccagtcctggtcatttgctcccctccttgtctgtggaccatgataagcccaagtagtgacttcagagctgggtaacagaaattaaagtgaaaagacctttacgtggagaatttgcatgcgtaatataggaaggtgttctttaggtatgttacaggattactttaaaccatttgactttcgctccaaagttatgttggtagtatagcaaattatgatgaatagctttaattgtatgtttaaaagtctcatatgttcacatgcttaaatctgggtatcagaatttaagcaattcttgaaatgtattgtctccttaatatactaattacaaagcatctccaatgtgtgtcactacaggcttttttttcccagatcatcaaattttggcttttaactaagatacatagctttattttagctagtctgaatgagtgatacaaaaatactattgaactatagttaaataatattaaataggatggagagtaaaagtggaggactgggtaatgagccaagaagaaggggacttagaaaactgcaaacattggagtgagcatgagagaacaagttctcataaagaatacaagtttaaaaaggagaaaaactttaaaaaataaggttcccaaactatcagtgtttgtcaacttccttttagtctgtgccagccacccacagctaccctaaagttggagatgtgaagcagatgttcaggaaagtataattgatcggtgttcaaaaaagtgctttgtgacagatttcacttttcactgggtttatgtacaaattctaaaaatctctgaacctgtattttaatgcatttaagagcattgtttaggccaggcatggtggcagtggctcacacctgtgatcccagcactttgggaggacaaggcaggcagatcacctgaggtcaggagtttgagaccagcctggccaacttggtgaaaacgtggtgtactttactaaaagtacaaaaattagccaggtgtggtagcactcacctgtagtcccagctactcgggaggctgaggcagaattgctcaaacccagtccggaggttgcagtgaaccaagattgcaccattgcgctccagcctgggtgacagcaagactccgtctcaaaaaaaaaaaaaaaaaaaaaaaagcattgtttataggacgcttaaaaatttttacaaatctcacacaaggttttcagcgtttgtcagtcataagggaaatgcacataaaaaccagataccacttcatacctaataggatagctctaatccaaaaaatggaaaataagaatatggagaaattggaaccctctgtactttgttggtggtaatgtaaaatgttgcagttgctgtagaaaagtctggcagctgcttaaaaagctaaacatggaattaccacatgacccagagctggccctcctttttgggtttcacatccatggatttagtcaactttggatcaaaaacaattgggaaaaattgtttcctgaccatgtacagacttcagctgttaaaagtataacagctgtttacatagtacttacattgtattaggtattaccagtaacctagagctagatggctaaattacgcaggatgtgtaggttatatgcaaataaccatcttgttttatatcagggacttgagtaccctcggattctggtatccatggaaagtcctggaaccagtacccccatggatactgagggatgactatacaaaaggaattaaaaacgaatgaaggccgggcgcggtggctcatacctctaatctcagcactttgggcagcctaggcgggctgatcacctaaggtcaggagttgaagaccagcctggccaacgtggtgaaaccccgtctccactaaaaagacaaaaattagccgggtgtggtggtgggcgcctataatcccagctacttgggaggctgaggcaggagaaacgcttgaacccaggaggtggaggttgcagcgagccaagattgtatcattgtactccagcctgggcgacaagagggagactgtctcaaaaaaaaaaaaaaaaaaaaaactcgtatggtcagtgtttactgtgcattctcaacagcccaaagtggaaacctgactgtccaccaacaaatggttaatgtgtacctacaaatctctcaattctcaatatacatgtgtacatacactgtgaaatacacagccattaaaaggaatactttttatacttcccccaaatatgaagcactttactgtttgatacatggatgaacctttaaaacatgctaaatgaaataagccagataaaaaaggacaagtattgtataatttcacttatatgaactaaactagacaaatgcattgaggcagaaacagtaccaaaggctgaggggaagggaaggagaagttaattgacaatgttacagggcttctgtttagggtgatgacattttggaaatacaatagtggttgcgtaacatcgtaaataatgccactgaattgcacaattgtttaggaaaatttgttacatgttttacaattaaaaatcctaagaacactaaaagaaagtcatattaggtcggttggtgcaaaagtaatgtgcccattacttttaatggcaaaaaccgcaattacttttgcactaacctaatagttatatcctgaagaggcagaaactgataggtttgtctgtgtagtttttcagcttgtattattactaccactaacagcctctgttgaacccttcattactatgtaagcagccatatttaattctcagaacaatgtaatgagggagagcctatgaaaaaacaaagcctatgaaacagagcctatgaaaaaacattaaccaaggtcatcatccacaaaaatacaagttccagcactaactctgctttctctgtgatgcttctcctgcccattcatacttgtagggaataggagtagaggccaattatgtcgcttgagagtgctcttggaacagtggcaaattttctgtacgtgaaattagcttctcaaattttttgtacgtacggtactggttcttaaccttggctaccattggaattacccgggaaacattaaaacactcatcaggtcccaccctccagggattctgtataactcggctgggtgtagcctaagcatcaaaatgattatgcgcagccaaggttgaaagccaccaacactgacacatggatttaatattaaccacttggaacagaataccactgttaaaattgccgtggaaggttaaataatgggcagcccttgctattccaagtttggtttttttgttttttgtttttgagaccaagtcttgctctgtcacccaggctggagtgcagtggcacagtctcagctcactgcaacctctgcctcccgggttccagctattctcctgcctcagcctcctaggtagctgggactacaggcgtgtgccaccatgcccggctaattttgtatccttagtagagacagggtgtcaccatgttggccagggtggtcttgaactcctgacctcgtgatccacccacctcggcctcccaaagtgctgggattacaggcttgagccaccgtgcccggcctattgtaagttttaaacaacctcagaccagggaacttcctcacttggacatacacttcatagcaatttcttctcttaaaatagtggaaaatgaagctgtaaaagcacagtgaatgagaacactagcaagctatggcaatttgaaaaaatgtgattttaagagtcagtcttgcacctttatcatttaaatttggttatctcagcatgaaacttctgagactgacagcaagaattaaaacaccttttgtatatgcggaaactaccctgtagtctacctgctctcaaatttgagcacgcttgctgggccccaccaccaatttctgattctgtaggtctgggataggaccttagaatgtgtctatcacgtgacacttgtaagaaccactgttctagcacaagccaaaagaagtgacagcaaagactgacatccagaatcctctaattcagttctctctactcatctcactacctgtgctctgcttaggtgaatgtgtttgcagcatgtggaggaacaatccatgtattctttgtccctgcccaaacctaaagattgaggaggaactgacagcaatattgagagtgaggcaagagagaaaaaaaacctagcttcggagtcacatctggttttcaatgcgagcttcgtgcaagttggactgagttaggtgcctcacgtctggaaacctgtttcttcatgtgcatttgcgcaccctcattacattgttctgagaattaaatatggctgcttacatagcaaggaagggctcaacagaggccgttagtggtagtaataatacatgctgaaaaaaaacaactggtgaagaagatactgaattgtacctgagatttataccatttgctgttaaaaaaaaaaaaaaaaaaagccatactactcccaaatacctccgcgcaatgttttccagtcattaattcaacagcagaataggggataggacaaatgtccttatgctcatggaattaattttaacgccaggtagtttagcttctatgttaagtgctagagagcagcatccgttaaatctggtggctgcagcagagcacttccctaggaaccgactgcacacgcccaattcagaaggaagtgagcactgattcccggcagccaactcccgttcgcgcagccgctgccaccggcccttaagacgatgtgaccgccaattttgtaacagtgacgtcacccgacgtctgcaggccctgacagttggctctagcgggtgcgcagtctccctacccccggtaaggggctctaccggccctggacccaagatgggactcctacctccgaccacccggagcagcggcgccccagatccggccgtccgccctgcgcgtgcgcggcccgaccccgccgcggtctggctgtaagggcgctggaggggagctgggctgccccagccttcaatgctggagggacggccgcgtggggcttcagaaaggctaggcgccgaggagtgtaagcagcgtgtgcccatttaaagacaaaatcagtgtgtttttcaggtttgtacgaaatgaagttgtagaaagattaacaagggttacctgggaaaggcagattttcaacttagcgtttacatgttcacccagtgcattattttatttaaaaagaagaaaaatatatacttaacggctcctaatccagctctctttgcctggtctcccaagacacctatcattttgcccagcacataccttgccgctgtgccacactggagtccccggttaggttccctgtgcttagaccgccccctagtccctccaggaagcctttcccaaccctttcgcgttaactgcccgcctcatcatcacaaaggtaacttgagcttttatcagttttaattactccttttaatttgctcttcttccctatgtttaggcagaaacgagtctttttttaaccatattcatcacctggtgccagcaacagaagtgttccctaaaaattcctagaataaaccaacacgtgctgactagattctccatcttcataaacggtggtacaaactatgcatatcataactaccagcttcatgaggtcaagactaaatcaaaaattctcaaggacttttctaaaaatttttttagcataaactgtttcctctaacttaaacttctcttaagtgaacctgtctttccactgggatgactgtctacatgctcaggaatcctgaattcatgactatgttcaactcccacgaccatttttaaatcatcaaaatggcagcaaatgtcattacctggaccaaaaagctgcaggttttgtggcaaatgggaaatgtgttatagaatatgactgggaaagagggatttcttagtgctgcccagaattaattcagcaaacactgaacattactacgtgccacatataggatcatactgcatttcaggtcaccatcaaaggtaaattacaaggctgggcgcagtggctcatgcctgtaatcccagcactttgggaggccagggcaggcggatcacctgaggtcaggagttcaagaccagcctggccaacatggcgaaacccccgctctactaaaaatacaaaaattagccaggcatgctggcatgcgcctgtagtcccagctacttgggaggctaaggcaggagaatcgcttgaacctgggaagtggaagttgcagttagctgagatggcaccactgcccagcctgggcaacagagcaagactccatctcagaaaaataaaataaattttttaaaaaggtaaattacaagactgcaaaactttttaaaaaaaccttccccact

SEQ ID NO: 97939 - DNA, 185367 bp, Homo sapiens
  misc_feature (1)...(185367): n = A,T,C or G
tcactattgctcaatccatggctttacttgcactttcagcaactgttggttgacaacaccccctcccctcccctcccctcccctcccgttccctcccctcctatcctgtcccctcccttcccctcctgtcccctccccttcccttcccttttctttgagacggagtctctcgcactgtcgcccaggctggagtgcagtggcacgatctcagctcactgaaacgtccgcctcctgggttcacaccattctcctgcctcagcctcccaagtagctgggactacaggtgcctgccaccacgcccggctaattttttttttgtatttttagtagagacagggtttcactgtagccaggatggtcttgatctcttgacctcgtgatctgcccgccttggcctcccaaagtgctgggattacaggcgtgagccactgcccccggccagaccacgcttcattttttaatcactttcttcacttggcttgaagcatcactttctcttcgttctccttctatgccactggctgttcaggtccttcttatctactgattgctgagtattagaacactgcagagtttagccctaaaatctttttatttctttgtctttacttactccttaggtaacaccattcacagtccctaagctttgaaagcatttatataccaatgagcctcaaatttataattctagccctgacctattttcctaacttgtagacttgtactcggcctctactgaaatctccagttgaaatctatctaatagggaatcttaaaattaacctgtccaaaatcaaactcctgactctccactaacatcccccatgtctctgctgttgtcttctctttatacagtcttctacatctcaggaaatggtttctctgtccgtctagttgcccaggctaaaaccttatctcctgtctttctctgacaccacatatccagttcatcagtaaatcctgttgactttaccttcaaaatactatgtattaaaaatctgaacactttcaccacctctgttgctactatcttggtccatgcttccgtcgtatctcactctctcaccagaattattttaataacttcccagctggacccacttcttcttttacctcattacaatcagttttcaacatagaggccagagttatctatttcaaatgcaggtaagatcaagtcattcttttgctcaaaacttttaatggctccttctttcactcacagtaaaattctgaaacagtaatgacctgcaaggccctatataattttgccctcagctaccccctcacctcatcattttatctcttgccacctaccctcttgcacacacactgcccccaaagttacatagaacaattacctctctcacttttcatagctattcactcaaatgtcataatttcagaaggatcttccctgacaactttttccctcacccatggcattcctatctcccttattctgccttagttttcgcaatagcacttatcaccacctgacataatatgtatttacttgtttatttatttttggtctcccccattaagatattagcccatattccagattccagggctagcagagcagatgatttcaatcaaatctcccacttgaagacaattttaaaagtggaacaaaacacacacacagacacacactttcttacaaacattagaatctaacaagatagtaaggaattaagacaacaattagagctcaaagaggtgaaacaacatctctttggaaaggaggatttgctgatagttaaaaggaagctgaggcagagcttcactgagatcttgggaaatcacccactgtgtatcctggaaccacaaggcctgccattttggctttgaggctttttggcaatggactggaagcagcagacacagagctaagcttttgattactcagatgcatgcaagtttaggaactggtgttcatctccctcaaagacagaggccctaatatagtatcttttgctctggcttgagacaaagactgcaacctggaagcatggtttatggattttactctagcctgccaaaccctcaaatattggttccagactgctaatatactcaggtgtcttaaaggtgaaaaaaagtaaaatcctttgtgaaggaaaataacaccatcctgggtctcaaactatcaataaatataattttaatttttttaccaagctatgaaagactataatgcaaaatgagactcaagacaaatcaagccagaactaaggaaaacagtggacaacaaaaacaagagctacaagagtccaaataccagaattatcagacggatgttgtaaaacaacagtactaatatgctcatggatataaatgctttgtttaaaaatatcagtgcagtcatagaaaccataagaggtgaccttgtaaaactaaaaaagaaccaactagaaattataaaattgaaaaatacaataggtaaaatgaagagctgaatggatgggtttaacagaggattacataaaattgaagaaaaaaattgtaaactggaagctgggtcagagaaaaatatacagaatgaaacctaaagaaaatttttaaaagggaaagtacagaatattgactaagaaacatagaggataaagtaaggtctaacattcacataactggagtataaaaaagaaaaagataaaatggagcaggggcaatattttaagagataatgtcaaagaatttcagagaactaatgaaagacattcaattttactatttaataagcctaaagggtcaaatgaagctaaaagaataaaaagagaaatttgcctccaggccaggcacagtggctcatgcctgtaatccctgcactttgggaggccgaggtggacagagtacttgaggtcaggaattcgagaccagcctggcatggtggcacatgcctgtggtcccagctactagggaggctgaggcaggagaactgcttgaaccccgtgggtgaaggttgcagtgagccaagattgtaccactgcactccagcctgggtgacagagtgagactctgtctaaaaacaaaaaaagaaaagaaagaaagaaaaaaaagaaaataaatctgcctccagaaacatgtagtgaaactgtagaaaatgaaatgcaaggagaaaatcttaaatataacaaaaggaaaaggacagattaccaacaaaaaagcaccaatctgatcaacagctgatgcgaaaagccagtacaagtgaaaaccagaggtcaatggaaagataacttcatgatattgaaagaaataaaaaactaccaacatagacttctttgtccagagaacaaatattttaataagaaaggtaaaatatacagtgatatgaaaaaataagtgatgaactggcaaaatactttcaatttatattacagaaagggtaaatatccctaacatattaaaatcttatttaaaaagaggagaaaggactaacaaccttagaaaaatgaataagagatatgaacaaatacacaggaaaaataaatgcaaattccccttggttgaaaagatactccatgtcatccatgataagataaatgaaattaaaactacagcgagatactgtcttatacctatgagatcagcaaaaattcaaaaatttgacagcatgctatgttgttgaggcttggggaaactgtccctctcattcattgctgttaggaatgaaaaatggttcaacaactaaggaatagaacttggcaaataccgatgaaataatatctgcatttactctttgacccactagtccctcttgcaggaatctatcccaaagatgtgctgaccaaaaaaaaaaaaaaaaaaaaaaaaaggatgcatacataagacttttcactgcagcactgtgtgaaatagcaaagcctggaaacaactcaaatacctgtcaatgggtggctggtatactcacccaagtgataactctacagttatcaaaaataagaaggaatctctttataaactactacagagtaatctccaagatatatttttaagcaagaaaagcaaggtggaaaagtaaatactattggttatctaaaaggaagagataaaaacatgcatacacaattgatagtatttaaaaatagaatgataaataataacactttaaatatgattacttatagaggattacataaacaaccacccaagataatctgcaatcaaattgtgaaaatcattaagacagttgactagactagtcccagctacttggggaggctgaggcagaagaatcacttgaacctggagacagaggttgcagtgagccaagatcgcgccactgcactccagcctgggcaacagagcaagactgtctcaaaaaaaaaaaaaaagcataaaggaaaaatttgataagattgaaattttaaaatatatattaaagacaccattaaaatagattaaaagacatgtcacagactggggaagttatttgcaagcaaatccataatatatgaagaactgttatacattaaagaaaagacagataacctaaagatactataaaaattagataaaaatatatgaaaaggcaattgacagaagaggaaaaacagttggtcaataagtgtatgaaaagttagccttcagtagcaatcagaaaaatacaaattaaaaccacattatcattatacatttattagaaatgaacaaaaattaacaaatgacaatgctaagtgttagaatggatgtggagaggtgagaacttttatacactgctgttaggtatgtaaaatggtacaactactttggagaacaatttagtaatagcaagtgtagttgaaaaagcatatattgtaaaatctagtaattccactcctagatgtataccctggagaatgtgtcctacatatgctcaaggaatcatatacattatttataagaggaacaatttgggaacaatttaaatgaacaaacataggaacatagataaattgtagcataaccatactgtagaacactatagagctataaaaatagaattgaatgcatcaacatagttgaatatcataaacataaattttatccagaaaacattctggctaagagtacatacagtaaggtcgggtttggtggctcttgcctgtaatctcagcactttgggaggccaaagtgggaggattgcttgaggccaggaggagtttaagaccagcttggctaacatagtgagatcccatctcttaaaaaaaaggaagggggaaaaaaaaaacgagtacacacagtaagatgccttttatacaaaattgtaaagcatgacaatgctatagattatttggagaagcatacatatgcagttcatgtataaagagatttacagaggctgggtgcagtggctcacgcctgtaatcccagcactttcggagacagagacgggctgaccatctgaggtcaggagtttaagactagcctggccaatatggtgaaatcttgtctccactaaaaatacaaaaaattagccaggcatggtggctcatgcctgtaatcccagctactgtggaggctgaggcaggaatctcttgaactcctgaggtggaggtttcagtgagccgagattgtgccactgcacgccagcctggggcgacagagcaagactttgtctcaaaaaccagcaaacaggctgggcgcggtggcttacgcctgtaatcccagcactttgggaggccgaggcaggcggttcacgaggtcaggagatcgagaggctaacatggtgaaaccccgtctctactgaaaatacaaaaaaaaaaaaattagccaggcgtggtggcgagcgcctgtagtcccagctactcaggaggctgaggcaggagaatggcgtgaacccagaaggcagagcttgcagtgagccaagatcgcgccactgcactccagcctgggcgacgttgcgagactccgtctcaaaaaaaaaaaaaaaaaaaagttttgcgggtttttccccccgcccctttgccccctccccccgcctttattcagcttccggtagacgctggtagggtaagggagctaagtagatcacttccgggcgactgttgttttatttccggtttatgcgacccggctgcgatttgctgctgagggcagcagctaccgtcactgccgccatcatgtcagactcggacagcgaggaagattcatctggaggtggcccatttactttagcgggtatccttttcggcaacatcagtggagcggggcagctggagggggaaagcgtcttggatgatgagtgtaagaagcacttggcaggcttgggggctttggggctgggcagcctaatcactgaactcacggcaaatgaagaattgactgggactggcggtgccttggtaaatgatgaagggtggattaggagtacagaagatgctgtagactattcagacatcaatgaggtggcagaagatgaaagccaaagacaccagcagacgatggggagcttgcagcccctttaccactcggattatgatgaagatgactatgatgctgattgtgaagacattgattgcaagttgatgcctcctccacctccacccccgggaccaatgaagaaggataaggaccaagatgctattacctgtgtgtctgaaagtggagaagacatcatcttgccctccatcattgccccttcctttttggcctcagagaaagtggatttcagtagttactctgattcagaatctgagatgggacctcaggaagcaacacaggcagaatctgaggatggaaagctgacccttccattggctgggattatgcagcatgatgccaccaagctgttgccaagtgtcaccgaactttttccagaatttcgacctgsaaaagtgttacgcttcctacatctttttggaccagggaagaatgtcccatctgtttggcggagtgctcggagaaagaggaagaagcatcgtgagctgatacaggaagagcagatccaggaggtggaatgctcagtagaatcagaagtcagccagaagtctttgtggaactatgactatgctccaccaccacccccagagcagtgtctcgctgatgatgaaatcacgatgatggttcctgtggagtccaaattttcccaatcaactggagatgtagataaagtgacagataccaaaccaagagtggctgagtggcgttatgggcctgcccgactgtggtatgatrtgctgggtgtctccgaagatggcagtgggtttgactatggcttcaaactgagaaagacacaacatgaacctgtgataaaatctagaatgatggaggaatttaggaaacttgaggaaagcaatggcactgatcttctggctgacgaaaacttcctgatggtgacacagctgcattgggaggattctatcatctgggatggggaggatatcaaacacaaagggacaaaacctcagggtgcaagcctggcaggctggcttccttctattaagactaggaatgtaatggcttacaatgttcagcaaggttttgcacccactctggatgatgacaaaccttggtactccatttttcccattgacaatgaggatctggtgtatggacgctgggaggacaatatcatttgggatgctcaggccatgccccggctgttggaacctcctgttttggcacttgatcccaatgatgagaacctcattttggaaattcctgatgagaaggaagaggccacctctaactccccctccaaggagagtaagaaggaatcatctctgaagaagagtcgaattctcttgggcaaaacaggtgtcatcagggaggaaccacagcagaacatgtctcagccagaagtgaaagatccatggaatctctccaatgatgagtattatttccccaagcaacagggtcttcggggcacctttggagggaatattatccagcattcaattcctgctatggaattatggcagcccttctttcccacccacatggggcccatcaaaatccggcagttccatcgcccacctctgaaaaagtactcatttggtgcactctctcagccaggtccccattcagtccaacctttgctaaagcacatcaaaaaaaaggccaagatgagagaacaagagaggcaagcctcaggtggtggagagttgttttttatgcgcacacctcaggatctcacaggcaaagatggagatcttattcttgcagaatatagtgaggaaaatggacccttaatgatgcaggttggcatggcaaccaagataaagaactattataaacggaaacctggcaaagatcctggagcaccagattgtaaatatggggaaactgtttactgccatacatctcctttcttgggctctctccatcctggccaattactgcaggcacttgagaacaacctttttcgtgctccagtgtatcttcataagatgccagaaactgattttctgatcattcggacaagacagggttactatattcgggaattagtggatatttttgtggttggccagcagtgtcccttgtttgaagttcctgggcctaactccagaagggccaataygcatattcgagactttctacaggtttttatttaccgccttttctggaagagtaaagatcggccacggaggatacgaatggaagatataaaaaaagcctttccttcccattcagaaagcagcatccggaagaggctaaagctctgcgctgacttcaracgcacagggatggattcaaactggtgggtgcttaagtctgattttcgtttaccaacggaagaagagatcagagctaaggtgtcaccagagcagtgctgtgcttattatagcatgatagctgcaaagcaacgactgaaggatgctggctatggtgagaaatccttttttgccccagaagaagaaaatgaggaagatttccagatgaagattgatgatgaagttcacgctgctccttggaacaccacaagggccttcattgctgccatgaagggcaagtgtctcctagaggtgactggggtggcagatcccacagggtgtggtgaaggattctcctatgtgaagattccaaataaaccaacacagcagaaggatgataaagagccacaggcagtgaagaagacagtgacaggaacagatgcagaccttcgtygcctttccctgaaaaatgccaagcaacttctacgtaaatttggtgtgcctgaggaagagattaaaaagttgtcccgctgggaagtgattgatgtggtgcgcacaatgtcaacagaacaggctcattctggagaggggcccatgagtaaatttgcccgtggatcaaggttttctgtggctgagcatcaagagcgttacaaagaggaatgtcagcgtatctttgacctacagaacaaggttctrtcatcaactgaggtcttatcaactgacacagacagcatctcagctgaagatagtgactttgaagaaatgggaaagaacattgagaacatgttgcagaacaagaaaaccagctctcagctgtcacgtgaatgggaggagcaggagcggaaggaactacggcgaatgctactggtagcaggctcagcagcatcaggaaacaatcacagagatgatgtcacagcttccatgactagccttaagtcttctgccactggacactgtctcaagatttatcgcacatttcgagatgaagaggggaaagagtatgttcgctgtgagacagtycgaaaaccagctgtcattgatgcctatgtgcgcatacggactacaaaagatgagaaattcattcaaaaatttgccctttttgatgaaaaacatcgggaagagatgcggaaagaacggcggaggattcaagagcaactgaggcggcttaagcggaaccaggaaaaggagaagcttaagggtcctcctgagaagaagcccaagaaaatgaaagagcgtcctgacctaaaactgaaatgtggggcatgtggtgccattggacatatgaggactaacaaattctgccccctctattatcaaacaaatgtgccaccttcgaaacctgttgccatgacagaagagcaggaggaggagttggaaaagacagtcattcataatgataatgaagaacttatcaaggttgaagggaccaaaattgtcttcgggaaacagctaattgagaatgtgcatgaggttcgcagaaaatctctggttctcaagtttcctaaacagcagcttcctccaaagaagaaacggcgagttggaaccactgttcattgtgactatttgaatatacctcrtaagtccatccaccgacgccgcacagaccctatggtgacrctgtcatccatcctggagtctatcatcaatgacatgagagatcttccaaatacacaccctttccacactccagtcaatgcaaaggttgtaaaggactactacaaaatcatcactcggccaatggacctacaaacactccgtgaaaatgtgcgtaaatgcctctacccatctcgggaagagttcagagagcatctggagctaattgtgaaaaacagtgcgacctacaatgggccaaaacattcattgactcagatctctcaatccatgctggatctctgtgatgaaaaacttaaagagaaagaagacaaattagctcgcttagagaaagctatcaaccccttgctggatgatgatgaccaagtggcattttctttcattctggacaacattgtcacccagaaaatgatggcagttccagattcttggccatttcatcacccagttaataagaagtttgttccagattattacaaaatgattgtcaatccagtggatttagagaccatacgtaagaacatctccaagcacaagtatcagagtcgggagagttttctagatgatgtaaaccttattcttgccaacagtgttaagtataatggacctgagagtcagtacactaagactgctcaggagattgtgaacatctgttaccagacaattactgagtatgatgagcatttgactcaacttgagaaggatatttgtacagctaaagaagcagctttggaggaagcagaattagaaagcctggacccaatgaccccagggccctacacatctcagcctcctgatatgtatgataccaacacatccctcagtacgtctcgagatgcctctgtatttcaagatgagagcaatttgtctgtcttggatatttccactgccactccagaaaarcagatgtgccagggccaaggtaggctgggtgaggaagactctgatgtggatgttgaagggtatgatgatgaggaggaggatgggaaacctaagcctccagccccagaagggggagatggtgatcttgcagatgaagaggaaggaactgtacaacaacctgaagccagtgtcctgtatgaggatttgcttrtatctgaaggagaagatgatgaggaagatgctgggagtgacgaagaaggagacaatcctttctctgctatccagctgagtgaaagtggaagtgactckgatgtgggatatggtggaataagacccaaacaacccttcatgcttcagcatgcttcaggagaacacaaggatgggcacggaaaatgaagaaagcatgatgtcccatgagggagacggtggggaggcttcccatgatttggaggatagcaacatcagttatgggagctgtgaggagcctgatcccaagttgaacacccaagacacaagcttcagcagcatcggaaatttccagctgggcatggtggctcacacctgtaatctcagcactctgggaggccgaggcgggtggatcacctgaggtcagttcgagaccagcttggccaacatgtcgaaacttcatctctactaaaaatacaaaaattagccaggtgtggtggtgcacgcctgtaatccccagatactcgggaggctgaagcaggagaattgcttgaacccgggaggcagaggttgcagtgagtggagatcacgccactgcgctccagcctgggcgaaagagtgagactccatctcaaaaaaaaagaaaatttccaagcatggtatcatctcacttttctaatttacaggctggaacagatgagagccctcctgctgggacagagaattgggttctagtggactctgctacacttaaacctatgtgacaaaccgcccattattttattgtttatttaattatacaatgcctcgttcctatatggatttgaggcaaattaccataaattttgaaacagcctatatgtcagaaatgaaaatgttgccatctaaatgttttctgtccctccccaccaggggaaatggtaggaaaatggtaagtttcttagggcaaagactgtgtcttgtgtttcttttcatgcttaggatacggttctgtgcatagtaggtactcagcaaatgttcctagaatcataaaaccctcaacagatatgttactgagcatctccttttcacgataagcactctgtcagatccttgggatgcaaaggtaaataagacaaatcccttttacccaaagagctcaccatcgagttgggggaggggaagtggaattcaaaacatgttaataaatcattatagtactgtgagataagtgcaattaagaagctagctgtaaagtataggggaaatagaggagtaattatgtctgaaaagtcaaggaagtcttcctggagataatttttaagctgattgttttagaattagtagaagtttgccagacggaaaagtccaggcaaagtgtaacatgaatgggaaaggccacagtctagaaatggcagtgtgtttctagtttgtttgtttgtaactgccttgttccaggaaggatttaagatggtttatattccagtcctttaatgctggaatggctagagatgagactgaaagatgggcaggaagtatatcatcacaagctttgcatttgatgttaatgtgtatgatttttatattatgggaaataagctcttagaggagtgatgtaatcaggtttgtgttttagaaatctgtgtaacgtatgaatgaagaaagaaattgaagaatcatatataacagatgtatgtgattccatttttgtaaaacacagaaccatgtgtgtttatttgtatgtgtttttatatatactcttgtatgcaaaggtaaaagtctgaaaggatatatgctaactgttcacaatgataaccccccaggaatgggattggaggggagagggcttctgtgtttgttatgtatgctgggtgggatattgtgcttttatttcggtattgtttgaattgttttacaagtatgtattatttttgtaacacattttttaattccaaaaaaaaagagagagatggaaattcagaaatgtgtgtaaacagggaatcttcactgtattgataatgttttatttcttaagctgggtagtgggtacctggattttcattatatttttctctatttcttttagcatatctcaatatttcgtaataaatactttgtaataagtttcacatgtacataatattaaataaattctaggagtagatataccaaaatattcattgtgtttatctctgaatagtagaaatgtatctttattttctttgttttgcatgctttcattttctaatttgtattacttttattttaaaaacatcttaaaacatagaagaatgccacaactacacagagcttctataagatctttcacatgttacccttgctggtacataagacaccgccaaactaatgttctaacagccagtcaatattttatcccttctctcttatgctgccattttggtctgtttaggtttaatgatatctgttttagktggtacctaaccatctcttggcataaaaaatctgctcaatgattgcttgttaaatcttgaatgactgaattgtaataagcatgcagatgactcagcattgactcacctaaaggtaatgtctacagtctttacacaatcttctacacctccagtgatgtagaactcagccttgacttgtctgctcatttcaaatcctttctcaaactctcagtacaagaagacactattgcttccttctccaaacaaaacctgctttctcttacttctagccctttgtccatgtacttccctattcctagaatgaatgcaacctttgtttgtctgcctggtaaatacctattaatctctcatattacagtttaaacatttctccccctgtgaagcattcctggctctctcccttcactcattaattcactcaacaattactgtggtaggctaaataatggtccccaagaatcatcagttcctaatatccagaagttgtgaatatgttgctttacatggtcaaaaggactttgcaaatgtgactgagttaaggatcttgagatgaggggaaagagagacagagtaagagtaagacagaaggtgatgtgaagacagaagcagagagatttgaagatgctacactactgggtttgaaggcagagaaagagaaaggaatgcagctytggtagctggaaaatgcaagaaagtagattctcctctggagcctccagaaggaaccaactctgctgacatcttggtttttgccctgtaagactcatgtaggacttctgatacccasaactatcagataatacatttgtgttgtttaaagtactaactttgggaggccaaggagggcagatcacctgagttcaggagttcgagactggcctggccaacatggtgaaaccctrtctctactaaaaatacaaaaattaactgggtgtggtggcgcatgcctgtaatcccaactactcgggaggttgaggtaggagaatcacttgaaccaggaggtggaggttgcagtgaactgagattgcaccactcactccagcctgggcaacagaggaagactccatctcaaaaaaaaaaaaaaaaatgaaaaagccactaagtttatggtcatttgttacagcagcaatagggagctaatacacccatgtaaccactatttactagacacaaagctaggcaccagaggcataggcaaaccagaaacacatgatctccaccttaaaagagcttataatctgatggggaatatgaatattaaacaactaaacagaaattaatattttcatgatattaatgtacttagattgatggtaatttagattgatggggataagaaaagtctgcttggtgacattacatttaagcagggacttgacagatgaacagggcttagtgatgtgaagaatgggggaggaggggttctcaggagcacgtgctaatgccctttagcaggatagtgcttgaggtgaggcaatgtgagaagaggctggagaagtgggcaagatccaaatcatgaccgaccttattgtctacattacagaggacagattttatctaaagtatgatggggaagacattgaaatggcaaatgatgtgtcatagctaacattttaaaagatgattttgacttctctgtagggactagattgaaatgggtgactatagcaaagggaagaccaataggagactatacaagaaatgatgtggtatggagagggagaggtttgggtagagtcaacatttaatttcaaggcagtgctcataggactggagaacatgaatgtctggataaaatgttaaggacatttaccaagtttctaatatgaccatgtggacagatgttttgtatattttcctgaaatgaggacccctgaaggaatgcataggctgggggcagtggagatcaaatgtttggttttcaaattgttaaatctgaggtgcctgtggaacaaccaagtaaagatgtcaggtaatagttaagcatgtaggtttggagatccaaaaagatgtctcagatggcacttaaagtcataggggtcataggggtcataggggtggactataatttctaaagtcgtagaaattgcctaggaagaaaagatactcaaggctgaacctggaaaactctgacatttaggactcaaggaaggggagaggtgatagcaaaggggattgagagggaatgctcagagaagtggagaaaacctggaatcagtgaagtccagggaagagtatagaagagggtgagartgttgaatggcaataagaggtaaagaggtgagaactgcagagtgttccaaacttgagcaatgatggcacttataggcaaccttagcaagagcaaatgtggttgggtcataggagccagaatgaggaacgaaagtattacaagaaagtggaacattgtgcaggtgactttcttttttacgaagtttagaataaaagaggacagacaatcaggtggtagcagataaggaatgtacaatcagataagggttcttctttaataggtgatggaattgcagagttaagcacagaggagaaaggaagaggctggagttccaggagagaagggggatagcctgtgggacaaggctcctaggatggctggaaggagtgggatctctcccctgagaagggattcgtctttgctagaaagagaacacttccctctgaaggagagggtacagatgctggcaggtttgttctctaggcggcaggacaatgaggatgagagttccattccgatgacctctatcttcatcatgaaggtcatctcctgaaagtgagttgaaaytgaagaaggacaatcttagatctggggaaagaggggaagtcactgactagtcatagtggagcaggaagtgagcagaacaggccattatctctgtgatgccccactttaccttaaacagggacccaccctagcactgtgataccggtggagccattgtttgtgtgaacctcttttctttactagactatgagcaccttgaagacagagattttgcctttctcatcttgcaatttcaatattgttactggtatatagtaaagatagttattcattcagtcactcattcattcatccaacatttaattatttaatgttggatttaattatttattaaattaaatgtcgaacaaatgagtgagtgactaaatgaagaactattataaaacaggactggtatgaaaatgtctgattggtcatatcccacatatttctacattgccggcattctgagaaataacaaaacccctggagagtttgccatcaatgggcaatgacttttccaaggactgcaagaagaacatacattcagtgaagctaggtgaatgtgggtcagtgaagtggttataagtaaggcttctttcttcaaacagatatattctaaaaaaaaaaaactttggagaaagcagaatattctagttatttcctgccatttttccctggcagagccagagcctagtcctagggataaaagaaacttctattaaaaatagagaacattatcacctacaatctcatatcttatttttgcaagtttcagtcttttctatatatatacattttttatagtaagcatgttatttaaaaaactrtgtatggtgcttttttccacttaaaattatatcacatgaaagtcatagtaatcaacacaatgtggtattaattaaaggatagacacatagattaatggaacagaaagagagtacagaaatagacccagacaatggccaattgatttcaacgaaggcaccaaggcaatgtgatggaaaaaaaatgatagtcttttcaaaaaatagtgctgaaatagttgaacaaccatatgcaattaaagagaacttcaaccatacctcacaccatatgcaaaaattcacttgaaatggatgataagcctaaatttaaaatctaaaattataaaactagataaagcagaaaatctttttgactttggataggcaaaggtttctcaggacacaaaaagcatgaaatgtaaaagaaaaaatgataaattgggcttcatcaaaattaaaagcatccactctttaaaagacaccattaggaaaatgaaaagaaaattcacagactgggagaaaatatttgcaaaactgagaattctttaagaattatgaatgcaagtccttyatcataaagtcttgataaaggatttgcatccagaaaacttgaattctcataatcattcagaaaccttgaataatctcataattcaataataagaaaacagacagcccaattcaagacatgggcaaaaggatagatgtgatagatgtggtggctcacgcctgtaatcccagtgttttgggaggctgaagtgggagaattgcttgaggccagtagtttgagaccagccctgggcaacatagtaagaccccatctttacaaaaaataaaaaaattagctggacatggtggtgtgcacctgtggttctagttactcagaaggctgaagtcaggggatcatttgagcccaggagctcgaggttgcaatgagctatgactgtaccactgcaacccatcctgggtgacaggacaagatactctctctaaataaataaataagcaaaacaaaacaacaaaaaaaaactgactaaaatatctgaacaggcacttcatcaaaggtgaattatgaatagcaaataagcayatgaaaagatgctcaatgttattagtcatcaagaaaatgcaaattaaaaccacaatgacatacagctacctagcaaatttttaaaaagagaaaagcaactgacgataccaaatgctggtgagggtgcagagcaattggagctcacatgcattgctggtgggaatccaaaatggtataactactttggaaaatagtttgacagggatcatgaaaagttaaacataaacttatcacaggacctagcaatcccaattctaaatagatagttacccaagagaaatgaaggtatatgtctacataaaaagctgttcacaaatgtttatagtagctttattcataatagtaaaaatataggaactgtttattggtaaatggataaacaaatacacattggaatactcctcaagtttcttggaagattcttggaagaatctttttttttttttttttttttttgagacagagtctcactctgtcacccaggctggagtgcaatggcacagtcttggctttctgcaacctccaactcctgggttcaagcgattctcctgcctcagcctcccgagtagctgggattacaggtgcacagcaccatgcctggctaaattttgtattcttagtagagatggggttccaccatgttggccaggctggtttcgaactcctaacctcaggtgatccacccccctcagtctcccaaagtgctgcgattacaagcgtgagccacggtgcctggccagaagaatcattttttgaaggacctgcactgacccgttcagaactggcctgacatttcatcaactgtgagttgccattggaacatgtgggagccctgaaagcagggtgatgataaacctcatactcagtgcaggcttcagccctgtcatttcccattcctcccttccatttgacttgcttcattcctcatctgacttggtgctccctcagttgttcctgctgtcccccatggtttggctttaggtctcctgtgtcacggccagacagccaaggacatttccacagaaagggcatttgctgtgaggcctagctcccccactagttagcccagtgttttatatcatccagagccagaaggagaaacaaacttgagacttgagggcaggaccttgtcttaatgccccttgcagtgaccaatcatctgcaagcgcagagsctaatatatagtaggttcccaatacacgtttgctttgtgtgccgattcagtttctttttaagatgttaaattcagctcttagtgagtggaattaaagtgtaagcaatgcaaactgaaaatgctgtagcaggagacatgcttaaatcgttggaagagaaawaaccttgaggtacttaatttaaggatattggctatgtaatatatttttgttcattcgtatatttagcaaatattgattgaataccaactatgttgtagattctatgccaaattatttaggtcaaagggatctatacccaagaaaaaaatatatattattaattaaaagtttcaaagatatatattggtcttcacatattttgcttcccagtgaatttttttctcttccttttttttttcatagtaagaaaatagatgttatatacaggtgtcctggaatggtgactggcaactgtctttgttgtcccagcatacatcatttcagtgagtagtgaagaatgaagtaacagaattcaaagagttaggggaacatgtgtagttctacaccatctatctactcccttctcttccactgtgactatcagctgttttaaaatctgtttcgtccaaarggaagagttttcccatgtttatttcctctttcttaattggaaagacacaattgtttttgctacttcaagttttcattaaacaataactattttcagaatattaaacatacacaattaaattttctctattagtctgttattatctgtagtttctttctttcttccctccctctctccctcctcctcccacctctttctttccatrcttctttattcttgtgttttgatgattttgatttttgttaaattagttttgggtattgccattggtttcataaattattggtaggaagaaacagaaataaaacatctaataatatttggagactgacttatatatagacaattgagtcatgttcatttttattgatgctaagtggtgacttsaaatcatttgggagaaaacttttaataaataatttaaataarcattttcacttgaaaaaatagtagacaatgtaacatagaaacaaactttgtacatccccattataagtatccctctaactttctggtgtccacaagcaaacacactctaatatattacaactatactaatggtggttgtgaagggcacatggggagaagggggatgaagggaatgttccacattgagcctaagtggtatttttcttgttgtcgtttttattcttcttttctttttgacaaggtcttgctctgtcaccaaggctggagtacagtggcacaatcatggctcattgcagcctcaaactccagggctcaagtgatcctcccatctcagtttcctgagtagctacaggtgtggcccctacatctggctaatttttgtatttttctttcatagagacagggtctcctgatgttggtcaggctggtttcaaactcctggtctcaagtgatcctcctgcatcagcctcccaaagtgtcgggattacaggcatgagcaaccatgcctggtctaagtgctattcattgctgggattctgggtggcactcctgtctgctgcagggattagaggacagtgggtattctgaggatccctaaatcaggaatatacaatcagtgaagccgtacactttcaattagcagaatctagccttttagtggccatctgctgccatcaggcattgccttgaggagccacatcccccaagccctactcatggtgattattattcgtcaaacagaatagatttattcctatggatagggagaaggctttctccttctaggaaaagaagatgatctccatatggtaatgtatatgacatgcrgaatagctcttcacttctgagaagaaagtatggccagaagcactcctccgtaatgtacagagcgtgggctcctgctgacctctgagcatactactgacactctgtgagtagctttggatagatgtgtgcttgctttctaggaaatgagtttataacttccattaaattttcaaagatgcttatgaccccacaaatagtaaccagtgttttatatttggtctttgattgacctcatcactgcttataacttcatttgatatctacatgatgattatctcaaatatatttttccaaccctttactctctagaaataaaatttatggataatataaccattctatacacacttttgaaaaattatgcttaatgccttaatggcaatataaaggaaaaatctgaaaataatttataattaaactgtatatatttctttttttaatcttttaaaaaaaattttatagagatggggtcttgctatgttgcccaggctgtgctgggattacaagtgtgagccactgtgcccagtcaaatctgagtgtattttttttctttcttttttttttttgagacggacttttgctcttgttgcccaggctggagtgcaatggcacgatctcggctcaccgcagcctctgcctgctgggttcaaacaattctactgcctcagcctcctcagtagctaggattacaggcatgcaccaccatgcctggctaattttgtgttttcagtagagatggggtttctccatgttrgtcaggctggtctcgaactcctgacctgaggtgatctgcccacctcggcttcccaaagtgctgggattacaggcatgagccaccgctcccggccaactgagtgtatttttattgcaaatgcttgcatgtgactacacaagaagacataataaagtagtcagaggctcctgtcgaattgcactgtgagtgacagctacgtatacagctgagcatctgtgtatcattggcagctcaaataccacgagaagcattgttattgacatcaagattttccagaatggagaccactcttggtaaagttctagacaaaatgaggttctctgatttacaaggaagtttcattcctgaaaattctaatatacaaaaaccatatcaaaacaaatgaaaccaccactaccaccaccaccaccacaacaaattttgtgttccatgtacaaaaamaaaacaaaacaaaacaaaaaacaggagttaggttgtcagctcagctcrttataaacagcaatgtcacccacatgaatyctgctgggataagaaatgattcttcattgtgtgggattgttccttgcattcaggatgtccagcatccttggtccctgtctgctgaataccaggtcaccttcccacccatctcacaacaaccaaaaacattcccacaaatgtccaaaatgctctcaaagaggtggtgtcacctccattgagaccactgacctgctgggtaaagttcagactccagagctttgcacagaaatccttcaggatctggcttctgcttccctctccattctcatcttgaagcatacacgygccctctggccattcagaccatgagagtttccctgactgggtgcacctctcctgtccctgtgcctgggaacagctctctcccagtttaacttattcatgatcacctcctccccagtcactcctcagctcagctcatccaggatggattagcactccctccccacgcccactcttcttgcttaactctttacaaccctcgcaaactgtatagtaagagacggtgttcttgtcaatttcttcccagctctactcccacactgtgatcttcttaagggtaggagaaagagctcctgtgtctttgtactctgatgtggtccccctgrgtgttcagttaatggctgctgatgttgatgtgcttacggagaagacctggccttctctccgtgccgggctctgtcctgcccccaggtcttctacatgctcttcctttttcactggtcctgttcccttagctccgtcacatcctactctttcttcaggtctcagcttaactgtcacttatccaggagtgttttccttgtccccctcccccagctgtctccacaatcctattattcgtcattaatgtaccctgtacttcccttaatactggagatgatctccaggtccttggaaagaacagggacagcagaggaaacctagactgagaaccaggctcctccttctgtttagtggatcttgtaagccagaggttcctccatcatccctaaatgactaataatgacttctctctaaccttagacattgaggctcttgagcttaatttatcttgatttggaaatataaagaaatgtgaccctcttgctggttacatttcttagtctgacactagtgtgtaagagatgctcaacacagaagttgaatcaaaacttctgacacacacaagggcagttagacttttttgtatgacccagaaaataatacaggcactcaaataacataataaccaatacttgcttattatcctgtggaattctctgtgctctataaaaacattagcaagkggaatggactccacagtgttaaggtaattaaatagaaaggtaagcattttattgttgaaaaaagtgattagttaaaattatatacaaagacatgtaggttattattttactaaatgaaaaaagaaattctgccactctactctcaagatttgtctacctggcggctgatttacctgcctagagggtgagccatctccattcctcaaacttggaggtaacttctttgaggacctcatcatgctgatcctttgaactattcgaggatttttgggctttctctgagtttctgtctcttctatcctgttktttgtttgtttgtttttgtttttgtttttttaaagacagtcttactctatcgccctggctggagtgcagtggtgcgatctcggctcactgcaatctccgcctcctgggttcaagtgattctcctgcttcagcctcccgagtagctgggattacagattcccgccaccatgtccagctaatttttgtattttcagtagagatggggtatcaccatgttggccaggcttgtctcgaattcctgacctcaagtgatctgcccaccttggcctcccaaagtgttgggattacaggagtgagccatcatgcctggcctcttctatcctttttaaaataacacgttcaatggtttgtcattcaatagtcagtcccatatgtacccaaagctctgcaattccagaagaaaatttcacaaatgataaaatgcattaattctggccaggcatggtggctcacatttgtaatcctagcactttgggagccctaggcaggcggtgaaaccccatatctactaagaatacaaaaaattagctgggcgtggtgcaggtgcctataatcgcagctactcgggaggctgaggcaggagaatcgcttgaacccagaggatggaggttgcagtgagccgagattgggccacttcactccagcctggcaaacgagcaaaactccatctcaaaaaaatagcattaattctaaaatctctttagcagcctaaagtcagttgttactaatacttttttctaattatattttttaaaatcctctttaagacgaagcagcatgccttactaataatatacttgaattttatcttcctgcatacatcatgtcccatagcccaggtgagtttttctgagtttttaatctcagtacaattcatgttgtttttcttattaccattgctattatcaattataaatatttcttatatataaacaaagtatcactgacaaagcataaaattaggtamtagttcttgctggtcaatttgaaacagaaactgcttgcactatacatatgtcattagccatcccaaaatgttcactcatgagatacaggaaaataataatcactaatgcatatgctttagaagatgactaaatccttaataatctggaagtgctctaatttactgattaggaagctaatgtggtttttcacacagttttgagttgacttgaataagataattttaaatatcaattatttcccctgcacagaaataaaacatgtcttacaaatgtgtattcaatctacatgtgaatattggtaaaccataagtgatttagataatacattctatttatggattaatgaataccaccctaattgacaatacttacatttaaaaatataatttagtaataaagaaaaattgtgagaaataagattgcttagaataacagtagaatcccagaaagaattttctgagttcctactctaaactcctatttgcatggcatataaatacatttttatacatgtatgtatgtatatatataacaacaaaaacctagatatgtaactgctttgcctaaacaacattttcatgattgactattgctaacacataattttaaaacagtgctctatatgtcttttgatttcaacacatattattcatttcctaaggatacatgaaaaaggagaaacaacccttaatacaatcattaagcacaatagagtgagaaacaaagaaatcaggaaaaagtgagaacaatatttctacaagtacaagaaatggggggaaagtgttaggactcaaagccaccaaacggtgtattccaattttcaatatacatatgtgatttgcaaagccacatctcctgcctgtgttcttctttgtattgactcattccaacacacactgctactaatacattttgtcactcacgtagtttctatggcctgctgaccacgaacacagagtggccagtctgttggcatcactctggagtggctgtgtaaaggagctcatgctccactgggatgccttctagaaggtccatttccagctctcagtgtcttttatacatgcccagaagtcacatgaagacttctagctcctctatatctccctggctctcgatgtacagtgggaagtgaagatgataactgatgaatttgggacatggctgatctttggatgagggtctttgaatcaatcaattctccctttagcttgtgtgataaggtctattgatgtacattctgtatcaattgccatacaagaaacttgagatcctccagttaagactgttggtcttggcttggtgcagtggctcttgcctgtaatcccagcaggttgggaggccaaggcaggaggattgcttgagcccaggaattcaagactagcctgggcaacatagtgtgatctgatctctacaaaaattaaaaaaataaaaataaaaaaaatagcctgatgtggtggcatgtggcatgtgccatgtgcctgggaggctgatgtgagaagattgcttaagcccaggagtttaaggctgcagtgagccgtgattgagccattgcacttgagctggagcgatgggcaacacagtgagatcttgtctcaaaaaataaatgaatgaataaataaagattgttggtcttcttgccaatcttttcattgccctgttggggcaaccctgtctctctcagtagtagccctttgataggcatcctatatttttgtttcttttttattactgtaaatcaagtggtttcagctgtaacttatttgttcatgtccaatactccttccagcttaattttmtaattttggactaatttacaaaaaacctagcatgctaaggtttaagaaaacagcatagcatggagtaaatgtaagcgtatgcaatgaaatccatggcaaagttatcccggagtgtccttagtgatgggctgctctcctgtctaagcctagcccaggcagagatgtgggctgcagtggtgttggtggtggtggtgctggtggtgcttgtgagagggtgtgtgtgtgaatgtgacttgccatccagtcttggaaatggggatgtgaaatgtgggttcccacatcttcattattctgtgggcactatctccttagattggggccagataaaatgggaaccaactaattggaggatttctgaaaacactgctactgttctagaagctgtatcccagcaatacttaaaccagagtggattattgccatcaggtgtygccaatctcatttaggaccagatcggatttgggtctcaaaactagacccctcccagctcctggtctggatcacttcgttaaactgacaataaaggaaacacattttgggccgatgaatttttatactcagctaatcatgttaaggaggagttttactgaatgtgttcacatgtattacatttcttattttaaacacaaatatgataatgttatggtagagaggtggtaatacattctgcaatgcaatacattgcatcttattattttccccctcactaatttgtcttggagagctttccatagyaatatacgtggatcaatgtaatgatccacatgtattttaatggctgccttgtatcgcattacataaatgtagcataatttacttgactcacccaatgaaagatgttccacacctgctcccaccagctttgtggttgtttttgctgttattacaaatagtgttgtaataagcattcttgaatatatatctttgcgacatttgaaagtatatctgtagaaaaaatgctagaagtaggttaaagattagtagtcaatggagagaacaggattcactacagagggatgagatttgcagccacaggagttgacaggaagggactctagccttaagaagcattctagataaagcacaggaaaggaaaatggctttaattagtgtgcatttagctgaactgaataaattagaaatgttgagagaagtgagaggaagaccagaagttatggtattgtcgaaattatctttgtgtttttcacatatgaagagtagaaaatatctttctggcggggggataaagaaaattactgagatacccatcaacaggggtttggttaaaccagctgtggcatagtcatgcaggagagtactattcagctgttaaaaatgaatctactcacagtgtattgagtggaaaggggaggttatagaacattatgaatagtgtaacactgggagagagagttagttccctaccaagtagccattctagtcttctccctcaagttagggggaccttatttttaggtgggcacaatgtaacccaccagtaagatgacatttccctcctcctttgcaaagatgggaccatataactaaattctggcaataaagtataatcagaagtttccttgaaaaggagagaattatgcccctttccctctcctccaatctgctccttggaatgtggatgtaatggcagaagccctgtcatttttcsctggtgagagataagatttatcttgttcaagtcataatttgagagtttctgttatgtacagcccaatgtaatcctaactcatataaactccacttgtgtttaaaagttaaatatgtacacgtgtatgcacagacacacacacctccccccyacaaggtgtatatgcttaaagcatacatgcataaaatatttgtaagtgtatataacaaactattaagagttgggkgggtatgagattataagcaggaagtggggggacttttttatattttttaagttttagcaataaacatgttttcaggaaaaattaagatatttctatttttatgaagaaaacagcttgactgataattccttgaaatcaaaacactgggcaagtcccttatttgtctccgtcctcctcagatgaaatgccctcatgatcgtgtcggcttcccgcgtatttttcaatgttcccaaattattctaggaggattggtttacccacacattctgaatattccagttctcttttaaatagacagcatcctgcttctaatacaaaaacagtttaagagaaagctgcatttactaatgggatgaataattgattccaatagataagaacacacatacacagctgctttgacaataaaaagaggttttctctaaataagacttctcgttatcatcagcactcagttgttaccatggctacatgttcatttaaaagccaatcacaataagaaaatatgatccagttctccagataactggagtgggttaaagcaagacttggagaggaagctgcttggaggccctggaagtccagggacttctggtctgagaattacaatgcctggtccgtgctagtctctcctaattgtgttcaatttcatgggtaacacaaataaatagacatatggaatatggaagtaagggacaggaggattggcaccccaagagaaaccaaatcagggagctgggggggaggatggggaagacattgattagtgatatgatacatattcaaaattcaggtaaaaagaaaggtctaagcctgatgcagtggctcatgcctgtaatcccagcatttgggaggctgaggcaggaggattgcctgaggccaggagttcgagaccagcctgggcaacataacaagaccctgtctcaaaaaaatcaaaaaattagccagcatggtggcacgtggctgtagtctcagctgcttgggaggctgaggcaggaggatcagttgagcctaggagttggaractgcagtgaattatgatcatgtgactatattccagcctgggtgacagagcaagaccctatctcagaaaaaaaagagaagaaaaaaaaaaaagagagaaaggtctctgtattatgtggttgattccagggctgcctaagaagtgtaaaattattctgtttacaaattccaactttaaattgtatgtatacatacatagttatatctccaagtgccaatagatatttataacttgagaggcagatggctaggacatcgaatcctgagcatgtgaattctagctgctaccaaatacctgttcccacagggtcccaggagaaaatggcttatatacacagaggaccagccaggttaatggggagtttttatcactctgagggtgggtcccaagccccagagcagaactccagttaggccgaaccatgtaaagagctccttttaaataatgtctttttttttttttaataaaagtaacacatgataagggggaaaaaagaaatgtaaggcagaaagtgaaaatctcccacagttctgacctcagttaccaatttttctctatcttatatactctacagaaaatatctttcctagatcatatgtgcccttcctgaattatttccttaggagaaatgcctagaaatgaaatttgtggattaaattaactttcagaaaggttgcacaaactctgcacccatcactagtataggaatgtcagtttccctctgcgtgctagcaaggttgaagatttgtatatataaattagacattttcttttttgagtaaattgtcagttcacatgctgttggggtgttgttccagttacctattgctgtgtaacaaataaacaacagccattttattaattatatctcatgattttgtgagttaggaatttgggcaggattcagctaggtattcttctcttcctatatcaaatggggtctcttgatgatgtggagttgccatctggggtgccaagatgccatctgggggtccaagatgactttactcacctgcttggcaccttggtgtagacagctagaaggatgggccagtccttgtcgtctcagagcctctctatgtgtacagaatagttcagcttctcagaggtggctcatggctcccagaattgaacgtgaaagctgccagtcatatatacacatagagagagagaatgagtgagtgacagagagtaaggaggtatatatatatatatatgtgtatgtgtgtgtgtgtgtgtgtgtgtgtgtgtgtgtgtggagagagagagagagagggagggagagagagagagagagaaagaaatagatagatggggtcttgctttgttgcccaggctagtctcaaactcctggcctcaatcaatcttccacccttagcctcccagatactgggattaccggaatgagccactgcatccagccattgctgccaatcctcttaaaggcctagtgtcacttccactgttctaaattggtcaaagcagtcacaggtcatctcagatttcaggagagggccaatagaccctacttctcaatggaggagtggcaaagaatttgtcctcatttttwtttatttatttatttatttatttatttatttatttatttatttatttttgagacagagtctcgctatatcaccaggctggagtgcagtggtgtgatcttagctcactgcagcctccatctcctgggttcaagcaattctcctgcctcagcctcccgagtagctgggattacaggcacctcccaccatgcccagctaatttttgtatttttagtagaagcggggtttcaccatgttggccaggctgctctccaactcctgacctcaaatgatccgcccacctaagcctcccaaagtggtgggaatacaggcgtgagccacggtgctcggcctgtcctcatctttagtctgtcacaaatgtcgatattaggatattcttttcctttctctctctctctttttttttttcttgaggcagattctcactcttgtygcccaggctgttgtgcagtggcgtgatctcagctcactgcaacctctgtcttccgggttcaagtgattctcctgcctcagcctccctagtagctggtattacaggtgcctgccaccatgcctgactaatttattttgtatttatagtagagacagggtttcaccatattggccaggctggtctcaaactcctgacctcaggtgatccgcctgcctcaccctcccaaagtgctgggattacaggtgtgagccaccatgcccagcctagtatatttctgaatactaaaaaaaaaaaaaaaaaaaaaaaatcttcatattttttgaggaaattctacttgaacatggtggaaagtccctaaatatgttatttaatttaatttgtaattttttttctctcttgttttttatttattagagatgtcgtctcgctctgtcacccaggctggagtgcagtggtgctatcatagctcactgaagccttgaactcctgggcttaagcagtcctcctaccttggccttctgagtagctgagtctacaggtgtacaccactgtgcccagctctccctcactcacggctaatttttaaattttttttamagatggggtcttgcgatgttggccagactgttcttgaactcctggcttcsagcaatcctcttgcatcaggttccgaaagtgttggaattacagagccactgcacccagcctaatttgtaagtagtttacccaaggtttttgcatctgtattgacacataagattggtttatagttgttgctgttgttttaagttttggtaccaaggtatttttaggttttggttttgttttgtttgtttggtttcttgtctataattaggtaggttttccattttaactttgaaggagtttatagagggagaatcatatgtgtttttaatatttaaaaaggctcgcccacaaagctacctgggttagatttctttggagtgaattctatgatttttaaaaaatttattattggaggggcaattcctcaaggatctagaaccagaaataccatttgacccagcaatcccattattgagtatatacccaaaggattataagtcatgctgctataaaaacacatgcacatatatgtttattgcagcactattcacaatagcaaagacatggaaccaacccaaatgtccatcaatgatagactggatagagaaaatgtggtacatatacaccatggaatactatgcagccataaaaaggaatgagatcatgtcctttgcagggacatagatgaagctggaaaccatcatcctcagcaaactaacacaggcacagaaaaccaaacactgcttgttctcactcataagtaggagctgaacactgagaacacatggacacagagaggagaacaacacacaccagggctgcttgcagggtggggagtgagggaagggaacttagagaatggatcaataggtgcagccaaccaccatggcacacatatacctatgtacaaacctgtatgttctgcacatgtatcctgtttttctttttttagaaggaataaagaaaaaattttttaaaatttattattggtattcagattagatcacttcatcctgagtcaattatggtcatttaatgttttttcacatttaagtctaaagttgtatattgttgctaggtttatgacctcagaaaggactttgtaatattaaggaaggaaaacaaaaggataaaaaaacctgggaaggtagttcttcctggaaagatttattgcaggcacaagaagcaaattttagacctcatgtttatttaattttttttcatgaaattcatgaagatataggctctttgaaattcaaaaaaaaagaaagaagaaacttatactgagatgagacctgtactcgaacaagcagctgaggtagaacgagaaaccaggtttgggctcttaggaacatccttactcctggcaataggaggttcaagaaatctttgtggatgcatatgtgaagaattaatgaatgattaggaatatcaattctcacagcgtggtatagtctcatgaaaactgtagaagattgagctggaccacagggaactggggaatatctctgagtgctgtttttgttatctacttgagtcctctcctccacaccccttaaggttagttctcccagcaagggtccagcgtgattactctgctctgggttttctcttaccattgcttgttgccactctcctggttcacctgttcccatccctgagcactgcgcaggccacagcttttttaaccacttaatatccccagcaactaatcatggtgtgtccttgaattctagatttcctaaggctgcaaagaaaattaaaaacaggccgggtatggtggcttatgcctgtaatcccagagctttgggaggccaaggcaggagaatcacttcaggccaggagttcgagagcagcctgaacaatgtagcaagacctcatctctaaaaataaaagtgtataatttaataattcttagtaagtttaaagagttttgcaatcattactgcaatggaattttagaacatttccttcacccccaaaataacctcattcccatttgcagtcacttcctatttccaccttcagcaccacccccaacccccgccacacaaaaccactgatctgctttctgtttctattgatgtgtctgtgatggatatttcatatatttatattcatatgaatggaaccatggtcttttgtttatgtcttctttcacttaatgtatttgacatgcattcatgttgaagcatgtgtcaatactttgttcctttttatgactggaatagtgttctgttgtatggatataccacatttttcttatccattcaccagttaaaacatttgggttatttccattttttggatattatggctaatgttctcaggaatattcatatacaaatcttcatgtgaatgtagattttcatttatcttgggtagataataatggctgaattgttgggtcatatggtgactctatttagtattttaagaaactgaaaaatgttttacaaagtggctgcaccattttcccgccagcagaatacaagagctacagtttctttacatccttgtcaatatttgttattgcctgtctttttatacattggcttggtaaatatttgtaataatgtgcagaaccccatgccacctttgtagaccctcagatggaagctgctgtctggaatcacattctgagaaatggattaatgatccttcattgatgcttaggacctatgtacaccttctagctgttgtattaaactctaaaaactctagtatttttgtaaaaatatcatactacttaaagcttagggtgtccatgtgtcaacaactattaattatactccagtatccagtctccccttcttacacagggggcagtcaaagagtcccattttccagcctcccttgcagctagatgtagctatgtgattaagttcagaagaatgggatgtgagcaaaaatgtcatgttctcttaaatggagccaggcttttacctctttccacatcctcactgatgggaaggtggaagtgagggtagccatccttagaccaaaaacagatactaggtgctgagattggcagggcattaagacacaggaggcttgggcaactggtgattgcagggcctccattccagccctggattgcttacctggattttaacatgagagataagtatcttgtttaatccagtgttattttttatttattttgtatttatttgagatagagttttgctctgttgcccaggctggagtgcagtggctgcaatctcagctcaccgcaacctccgcctcccgggtttgagcaattctcctgcccaccatctcgcctagctagttttttgtatttttagtagagacggggttttgctatcttggccaggctggtctggaactcctgacctcaagtgatccacccacctaggcctctcaaagggctgggattacaggcatgagccactgaggctagccccagtgttattttgaggctctctgttataacagccaaaaagtgaaattactaacatctagaatggctctgtaggaacatggctagaatatgagagtctccgctgatgaatatgatcatacaaggaaaagcagggcaatggagacaaaaaagcctgggaagaaaatcaggacactagaattttagtagcatttttacctctagtcagctttgtgatctcaggcaagccttatatttctctgtcttcatccatgaaacaagatggttttgtacaattgaaaataaatgcttaaagcttgaaaataaaaagcatctggtttcagaagtacttcattatattcctaatcactggtaaagcaactcagtactacaggctgggaaggagagggaagggagacatagggatagatttgtagaagaatacaaaattacagctagatagaaggaatgagttctagtgttatatagcgctacaggatgatgatagttaacaataatatactctatagtttcaaatagctagcaggaggatatagaatgttcccaacacaaagaaatgataaatgtttgacatgatggctatgctaattaccttgaccttatcactatacatcatatgtgttgaaacatcactatgcaccccataaatatgtacaaatcattatgtgtcatataaaatatttttttaaattaggaaaatatataaatgtaaacctttggtatcaactttcttaaataaaatagatgttaatcatcttcagcagctgcatcagtgagaatgttaacatggggctaagaattttcctatacacagtattagctttttaagtcctcccaatgggtgccattattgtcttcattttacgaataaggaaccggaggtttaatgaagttaaggaccttgccctgccatgcagatagttagtggtggagccagggtttcagttcctgaacccggaacacaggtgtttggccactgctactctgcctccataactatacccaacacataccagaagatcaatagtgatggccagtggccatatgaccactttagctattgtgactagaagggattatcatagtttaaaatgaataaacaactcttcctaatttgctcactaggttaaggtgacatgggaagcgatcattgtgagtcatccagggaacacagggagagttaagctgatggtgacgcacacctgccaactgctgagaagaagataatcagccctcaggaattttcgacccagccgcactgcacagcctggttgctggactcctaggaccaagcctcctgggcctggcaggcagctgtaattcagagtgggtcggggctccaggatgtgttgtttcctgtgcattgcacttcgcagaggcacagagcagaagctaagcctgatggcctctgaacactggttgggttttttgttttttttttttcctggcaacaaaattaaagccgcacctagggatttatccacccttttgctgatctcgatgtgaactgtgcagctgaatccctgcacacagtactgactctctcagggtgttgcttaaaatgtggctgagcacaaatgcaaaacatcgtcttgttgaagtcagcacacagaattaatctctaaaagtaatgaaagaattagtttcactttgtaagataaataaatgcaaagtatggtgaagtcagagatgttcagctcagttgcttttagacggcgacatcttttgaaaatgatattatatatttgggacacattttaatgccactctaatattttgtgtcattataaggatgctttgggtttttttgttgttgtttttgaagtctattatcatatgagttttttttttttttttttttttttttttgagacagagtctcgctgtcgcccaggctggagtgcgtggcgcgatctcggctcactgcaggctccgccccccggggttcacgccattctcctgcctcaggctcccgagtagctgggactacaggcgcccgccaccttgcctggctaattttttgtatttttagtagagatggcgtttcactgtgttacccaggatggtctcaatctcctggcctcgtgatccgcccgcctcggccttccaaagtgctgggattacaggcgtgagccaccgcgcccggcctagcatatgagatttttaacctgcaacgattcacctttagtgaatttttagtattggaaatgatacaaacttcaaagtgtcttgtccttttttttttaagctcttggaaacataagtatgtgatttaagtaaatataaaattagaagccatctcaacactagaacttattcctcctatctagctgtaattcagcctctaaagtcaatgtgaaataaggctcactgtttttcaccccatccttaatgttatttttaccctgacactgaatttcaggctttggtttttctgagtgtggcccacctgcttgaaagttgttctgaaagtttgaggtaaaggaagtcagatcagagagcattttcccccagtacctaacaaaatgaataaaatgactgcattttaaagggccaaaaatttctcatcagtgatcaagattgaaaaaagggcaaaacttcatgtaatacagttttactttcaactgtacggctttcaaccttgtaatgacacttgcttttcagaaagagaaatgaggaaaggtgagtcaacaaaattctgatactttttctgaattcgccttgatgtgaggaagaagtggaytgaggcacgaggaggtggggaaactgacgcgtaggagccactcttcgtgccactgcagacccttgctaaggcagaggagtaggcagggccgggcattctccagggtgcttgctgaatggggggatcaaccaaagcccttgggttagaaaatgtcccatgctgggaagactggccctggtaagggacatttgctggggcttgcaagagagaatccagccaggctagcaacaactgtaggcagctcctgatgacctttcctccttctcacaaattttctggctagagaaaagtaagtagaaaataacagccagccctcaagtttttctccataggggtgataaatagtttccaggaagagggtcaagaagaactacagtagatcagagaaactgaagtttatatcatagcactgcataagtttagcttgagcaaaattaaaatagatgtcatgtcaaccttgcaaatgagccacagaggagagacggagagagagacggttaacatgaacataacaatctctgcttcacagggttgttggaaggagtaaaagagaaaaagtatgtaaatactggaccacagaacctgatacattcgaagtacacaaaaatcatagtctctcctccactcccatcccttgttcatagccctacatattgttttttgttttgttttgttcaattcaggctcactttgcattcttacaacactgtagatctttaggttgagtaatttatggcttaaagctaaataattatttgccagcaaactgttcttgaaaatatatagcagcataggaaaggtcatgggctttagtgttaaaactaggctttgatcctgggccacctccttgagtttgtgtttttaggcaggttatacatttaatctctctgagctgacttttcttctttatgaatgatatcaataatcctaaatttgctgtacctgtatatgtataaagcacctggcacaaactaggtgctccttgaggtggcacggctaatatcattttactttttcagattgttatacaaaacatcaacaaattattgtttgttaccccaactgcttctttaggagggtgaattttgttactgtagagtatcttgttttgcagagcatcatgatgtcctggggtctgtaagtttatgaattgagggaagtggctaaattgcttgcgtaagaaagggaaggaaaaaaaatgaaaatgaaggcaggagttgggggtaggatgatcaagaatctaggggagagaattaagcagtgaaatctgggaggattcagggataaaaatccctagagaggataaaccaggaagggatttgtggaggtacaaatatagaatgtcartttttaccttgttttcttcaggttgtatgatatagctacccttcctgtcccctccttctcctccaggacccacagagtcttcagggaaattaacattgctcactgaagcttttctgtggctggatttggtggagagcagcaggactaggagaggtgctgagttctgcatccaggttgatgcagtgaggctgagcagtgtgagcagatgcgggaatcagaggacacaggggaggtgacatctggcttttgggtagatttccacaggtctgatcatgctctgtatttgccatctgccaaactttattgaggaagtcttaaggtctgggtagatatgaaatctctcagcttgtagaatttcaactactctttccatagtggcagaaaagtagaagtgaagacagtaccaggaccatgtatcttctagagacttaatatacccctgctctgcctgcttccaccccacccccatcaatgtcagacataagccatgtctgttctgcacattggttcaaggtctccaaccaaaagtgttggagttcgctctttgagttcccttcctaccagtagcctggctcagtcctcgcaagaaagatgctgttctgtttccttagacatccaactgtataactcttaattccctgggggagcttcctcttctgtttgcttctgagtcttaattacttcccatctcccttagcagcagtgttcttataccctagccaccacctctcccagaatattctgtgttgccttagacctcttctgctggtcaccatcaaaatactccttccttccttctccacctagacaatcactcatagtttcaaatttcatcacaaaatttgctactctgatgtgctcaggaagctcaattaaggaatcagtgttcagttgcaggccttgccctttcatctctgtatacttctttcctaggtagtgccattcacaacttggcttccrttattgacaggcatatgaccacaaatttatatcacccacacagatttttcttccaaattctagtctcatatatccaactacctatttgatgttccctattttaaatgttcaagagctcccttaatcttcttaaaaattatgatgtaagtacttttattattcttattttgaaaactagaaagctgatgctcagaaaattaaaatatgttttgtgtgtaagttcacacaactgattaatatttgatggaatctgaacacaggactcgctgccctcaaaccttattcttttatctggcatgtcattactgcctttgaaatatttatatcagggaaactgagatcacttgcttgacataataataataataaaagtattatcatcgagaaatgaaaacaattgatttgaataggaataagacaacatgctgataatttcaaaactttcagcatgataacaaaattttaggactgagtttccttcttcactacatgatatcaataattctaaatttgctgtatttgtatacataaagtgcctggcacaaacttgggatctttaaaaaatttttttttaatttttaatttttgtgggtacatagtagatgtacatatttatgggatacatgagatgttttgatacaggcatacactgtgaaataaccacattacggagaatggagtatccatcccctcaggtatttatcctttgtgttacaaacaatccaattacactgtattagttgttttaacgtgtacaagtaagttgctattgactatagtcgccctgttgggctatcaaatactgggtcttatgcattctttccaacttttttgtacccattaatctcctccttagcactcacccccccactacccttccccgcctctggtaaccatccttctactctctctgtccttgagttcaattgttttgatttttaggtcccacaaataagtgagatattcatgagatattcatctttctgttcctagcttatttcacttaacataatgacctccagttccatccatgttgttgcaaatgacaggctctcattcttttttatggctcaaggacttcattgtggatatgtaccacattttccttatccattcatctgttgatggacatttagattgcttccaaatcttagctattgtaaaagctgcaacaaacatacgagtgcagatatctcttcaatatgctgatttcctttcttgtgggtatatacccagcagtgagtttgctggagcgtatggtagttctatttttggtttttgaggaacttccacactgttctccatagtagttgtactaatttacattcccatcaatagcttataagggttcccttttttccacattttcactagcatttgttattgcgtgtcttttggatacaagccattttaactggggtgagatgatatctcattgttgttttgatttgcatttctctgatgatcaatgatgttgaacactttttcatatgcctgtttgccattgtatgtcttttgagaaatgtctattcaaatcttttacctgattctttttatcagattatttagattttttcctatagagttgttgtcagatggatggtttgcaaatattctctcacattctgtggattgtctcttcactttgtggattgtttccttttctgtgcagaagcttttcaactttatgtgatcccatttgtccatttttgctttggttgcctgtgcttgtggggtattgctcaagaaatttttgcccagaccaaaagttctggagattttccccaatgtttccgtgtaatagtttcatagtatgaggtcttagatttaagkctttaatccattttgattttttttttagatggtgagagataggggtctagtttccttcttctgctatggatatccagttttcccagcaccccttattgaagagattgtctttttttccagcatatgttcttggcaactttgttgaaaatgagtttgctgtagatgtgtggatttgtttctgggttctctattctgttccactggtgtatgtgtctgtttttatgtcagcaccacgctgttttggttactatagctctgtagtataatttgaagtcaggtaatgtgattcctccagttttgctctctttgcttaggatagctttggttattctgggtcttttgtggttccatataaattttagaattttgttttctatttctgtgaagaatgtcattggtattttgataggaattacattaatctatmgattgcttttgggtagtatggacattttaacaatccatgaacatgaaatattttcaatgtttttggtgtcctcttcaatttctttcatcagtgtcttgtagtttttattttagaagtctttcacttctttggttaattcctaggtatttaattttatatgtgactattgtaaatgggattactttttgtttctgttttagattctttaccgttggcatatagaattgctactgatatttgtatgttgattttgtatcctgcaactttactgaatttgttgatcacttctagtggttttcttgtgaaatctttaggtttttcgaaatatatgattatgtcatctacaaacaaggataatttgacttctaggataagttcttgaaggtcgttctgcccatccattctggcagatgtttgagatcataggtttttgttgtttaaaagaaaaagtgtttttttttttttttttttttttttttgagacggagtctcgctctgtcgcccaggctggagtgcagtggcgcgatctcggctcactgcaagctccgcctcccaggttcacgccattctcctgcctcagcctcccgagtagctgggactacaggcgcccgctaccacgcccggctaattttttgtatttttagtagagacggggtttcaccgtgttagccaggatggtctcgatctcctgacctcgtgatccgcccgcctcggcctcccaaagtgctgggattacaggcgtgagccaccgcgcccggccaagaaaatgtttttatttttcattttaatggactaatactgctttttcagagcaacgaggagaggaaatgagtcacattaatattctttcaactcttggctccggctgtatctgattacctacctccatgattttttattttacttgcactttgtgagccatccccacttatttttggtaaactcatttaagctgaggttctcacttagttgacattgttttttggatgtctcaagccatctcaaattagatggagctaatactaaaacttgggttcttctctccaagctagccctcttccagtttccccatcctagtgattggaatcacccttcatccagttatgcaagtcagaaccttaggtgtcaccctagatccactgctgtctcacttcccatatctgattatcatcacatcctggcctatgtaccttctaaatagctcttgactctgtcctcatctctccacttccactgccaccaatttagtcaaagctaccatttaamctctgccctggaccattggagcagccaagtacctgatctttctgatttcatttcttgtaactkccaatttgttctccagagtgcagagtaatctttttgacacacagatcaatatgtcactccctacttaacatcccacaatggcttctcattgcccttggaataaagtcaaagccccctaacatggcttttatggtgtggcatagtccatcctatttcagtgcctggtatacatatcatgttctcttccaccacaggaacttggaacgtgtggtttcctctgcttggaacattctcctctcctcttcacctaattaactaagaccctgcttcctactacaaaacctcaaggaggaagaaggccatttcgtcttcccacattcaggcaggcacatgatcttagcctgaacaagcaaataagtcttaggaaatgctgcaaaagcacagggctgattagagatttttcttggttgggcagagttgagagtccagtgtcacagtggcaagtgtcyggggatggcagtggtgaatgtccaacagtcatgtccccatcagggcaggtattagttcctgcagcagagtcttggctgtgcatagccttctttggttcctgccttagtctgattctttgacatttctgtgaatgccgtaagccatctgatactcttccatcaagttatttttcttcttaacttgaccagacttagtttcatttttacaaccaaggatcctgatgagtacagtgtgactctttgattaatggctgccttgtcttccagagaggaagttctgtggctattttgtcaactaatttcattcaaagaaactaacacagtgcctggaatagaattagtactcaataaatgtttttaaaaacatgaataggtagattcttctctacatttcagtagcagtttgccctgatcattttgtattgcaatcctggttttgcccttaaggacacatgcctcatcttatttttgtctaggggctgacactctttgcctgactcacagaaagtgctccagagctctgtgttgatcaaatggaaaccacaaattaacttgctttgtggaactgtttgggagatgcttatcttagcaccaaggcctaattcacatctttcctcaccctcccaatcccactggtctgaagtaggtcacatacctgggtaccctttgtaccttggttattcagttcactctatgctttccctaactaaatggtagctacttagtgcctgtctgattaaagacttcagttgtttcgggaactcagcattagaaatccaaagaatatatgtatgttttgtcaccattcttatgcaatttaccttgtgggtttttgacattctatatgtttaaaaaaatctttattattgaggtataatttatacataagaaaatccagcaatttaaagtgtatagtttattgaatactaatgaacatatacagtcatgcaatcaccactacaatcacgatacagaacatttcctcattccaaaaaaatgcccttgtatccctttgtagtcaatcctttcctcacacttctagcccctggcaatcactgatttactttctatacctatagttttgccctttctataattcaatataagtggaattaaacggtaagtactctttgtgtctcatttctttcacttagcatgttttgagattcatccatattgttgcttgtatcggtaggttgttcctttttattttcgagaagtatgccattatatggacttatccgcattagttaatacatttaccatctaatttattagggttgtatctagggtttggttattacaaataaagctgctataaatatttgagtgtaaatttttgtgtgaacatatgttttaatttctcatggtaaatctaggaatagaattgctagttcatatggtaaatatacattcaactttttaagaaactgccaaactgttttccaaagtgactgtaccattttgcatttccaccagcaatgtataggagtcttaattgggtcaggcgtggtggctcacgcctgcaatcccagcactttgggaggccaaggcagacggatcacctgaggtcaggagttcaagagcagcctggccaacatgatgaaaccccgtctctactaaaaatacaaaaattagctgggcgtggtggcgcacgcctgtaatcccagctactcaggaggctgagacaggagaatcgcttgaacccgagaggcagaggttgcagtgagccgagattgcatcattgcactccagcatcggtgacagagcgagacgccatctcaaaaaaaaaaaaaaaaaagaagaagaagaagaaaaagttttaattgctctacttacttgtcaatacttggtataatcattctttataaattgcactggggggccgggtatggtggctcatacctgtaatcccagcactttgggaggacgaggtgggtggatcatttgaggtcaggagtttgagaccagcctggccaacatggtgaaaccccgtctctagtaaaaatacaaaaaaattaactgggcgtggtggtgcatacctgtaatcccagctactcgggaggctgaggcaggagaatcacttgaacccaggagacggaggtttcaatgagccaagatcgcaccactgcactccagtctgggtgacagagtgagattgcacctcaaaaataataataataatgatgataagttgcattgtgttttttttggcatttctgtaatgtccaataatgttgagcatctcttctgtgcttatttgtcattcaaaactgtactttatcaaagggtctattcaaattttttgcctattataaaaatgagattaaaaaattttttaatcatgtattttttttcttattactgagttgcaaaagtgccatgtctatttgaaacctgttggcattttgaatgaaaatgtgttgacgctatggatcaatttacagagaattgtcatcttaataatatttggttttcttatccataaatatgctttttgtatttatataggtctttaatttctctcagcaaagttttatagtttctcagtgtgtggctcttaaatatgttttattaaatatatccctaagtatttaatatttttgatgttattgtgaattgtattttttatttcaacttccaattgttcattatagtatatatgaatataaatgatttttatatatggatcttgtatcctacaatcttgttaaattcattatttctagtagcattattggcctgcaaataaagatggttttagttctttctttcaaatctgtatatcttttatttcttttcttagccttatggtgctggctagggccttcagtacaatattaaatagaagtagtataagcaggcatctttgtcttattcccaattttaagggaaagaattaagattttctccattaaatacgttaatagctggtgcagtggcgtgtacctgtagtcctagctattcaggaagctgaggcttgagggtcacctgaacccaggagttcaaagtttgaggcyggccttggcaacatagcaagatcacatctcttaaagaaaacaataaaaaagatgttagttgtagaatttttgtagatactctttaccaggtttaggaagttcccttcttttcctagtttgctgagagaatctttgttttgtttgttttgggtttttcttaaatcatgaatgggtgttaaatcttgtcaaatacttcttctccatctattgattatacagtttttctcttttcctatgttaatatggtaagttccattagttgatctttgaactttcaaccaaacttgcattcttgggataaaccctgtgtagtcctgatgttatcatattgtgtactgcaggatgtgatttgctaaaattttctaaagactttttgtatctatattatgaaggatgatggcctgtgattgtgttttcttgtaatgtctttgtttggttttgatgttggggtactgcttcccttgtagaatgatttgggaagtgttccctcatctttggttttctcaagagtttgtgtagaaccggtattatttcttcctaaaatgtttgttagaattcaccagtagagccaccaggagctgaaggttactttgtgggaggtttttaaactacaaattaaatctccctaatagatatagggttattcacgttatctatttgttaatgtatgagctttgcgagtgtttgtcatgcaagggatttgtccatttcatccaaattgttgaatttattggcatggcattgtttataacactcttttattttccttttaatgtctgcaggatctgttgtgatgttctctctttcatttgatattggcgacttgtgatctctctacttttyctcatcattctgactagaaatttatgatttacttttttgtcttttcaaagaaacaactcttggtttcattgggttttttttttctctattacctttcttttccctttttctttgatttctgatcttcatttatttycttttgcttacttcaggtttcatttgttcttctaataattttttaagtggaagcttaaatcatggatttgagtcatttcttcttaaatattattcttcaatatgataactttccttttgagcactgctttaactacaccccacatatttttatgtgtttttgttgttgtttttattattattatttttaagttctggggtacatgtacaggatgtgcaggtttgttacataggtaaacgtgtgctatggtggtttgctgcacctatcaacccatcacctacatgttaagcccagcatgcattagctgttttccctaatgctctcccctcactgccctcccccaacaggccccagtgagtgttgttcccctccctgtatccatgtgttctcattgttcagctcccacttataagttagaacatgcagtgtttggttttctgttcctgcgttagtttgctaaggataatgacttccagtttcatctatgtcactgcaaaggtaatgatctcattcctttttatggctgcatagtattccatggtgtatatgtgccacattttctttatccagtctatcactgatgggtatttgggttgattccatgtctttgctattgtgaatagtgctgcatgtgaacctacacatgcatgtatctttataacagaatgatttctattcctttgggtatatacccagtaatgagattgctggatcaaaaatggtatttccagttctaaatctttgaggaattgccacagtgtctttcacaatggttgaactaatttacattcccaccaacagtgtaaaagtgttcctatttttctgcaacctcgccagcatctattgtttcttgactttttaataatcaccattctgactggtgtgagataatatctcattgtggttttgatttagattgctctaatgatcagtgatgttgagctttttttcacgtttgttggccgcaggtatgtcttttctgagaagggtctgttcatatcctttgcccactttttaatggggttgtttgttttttctcgtaaatttacttaagttccttgtatatactggctattagacttttgtcaggtagatagattgcaaaaaatttttcccattctgtaggttgtctcattcctctcctgatcattcttgctttcctccaacttattgaatatatggagcatatttgtaatagctttttaaaacatccttctttgctaattccattatctttgtcatttttgtttttttctatcaattattttttcctcgttatggatctgttttcctgcttttttgcatgcttggcattgtttgttgtagtgatttctcaggcttctttctctggcctcaggtagttttctctgactcatgcacagatcactactgagtggaagacttcagagctctgctctctccctctgtagctccctccactctgaaggaaattctagctgctttggcttcctaaaacttcagtctctaactcattgagactgctgtgctctgtttgggttttctctttctgcactgcaacctaaaaacttcttcaagcagaaaaatggggaaattgtagggctcacttcatttatttccctctggtggggatcataatcccacattgtccaacgtcttaaaaccattgcttcatatgttttgtcagattttctagttgtttgggggtaaaaaggtaaatccagtccctggtagttcatcatagccagaggtagaattacatacatattagctcagccaagtttaatcccacaactctctggactccttattctacctcccacacacagataaaagcacacacaaatgtgcaacatttttggtttaggttttagtggataaggaaatatatgactgctgtaaatctggaagaactgggatggaaggtattttcaacagaatatccgagataactagatagccatagtactggtaggagactatcttagccaaaagtagtactctgatttctcatctacaattgtggatgtgtcttagaactgtttaataatgagctgggtgtggtggcacatgcctgtaaacccagcactttgggaggccgaggcgggccacctgaggttaggagtttgagaccagcctggccaacgtggagaaaccccatctctactaaaaatacaaaattagctgggcgtggtggcgcatgcctataatcccagctactggggaggctgaagcaggagaagcgcttgaaccagggaggcggaggttgccgtgagctgacatcatgccattgcactccagccagggcaacaagagtgaaactccatctcaaaaaaaaaaaaaaaaaaaaaaaagaaccgtttaataatgttgagtgtagtgtggggcctccatttacatacaggaacaatcctgatggatggtaggagtggaggctctgctgttggcttcctttgtttctgggaataaaccaatgttgccactatcaaatttgcaggaggcaatgatgagagcagaagtggtggaagatcccaccaytggtctttaatttttaattggataaacttccttttaggtttgagagcaaatacctgacacaaaggatgccagtattaatgaatgcacagttaggaaaaagagacactagcattctctgttctatctcgtcagcaattctggagatgtctaataaggacaactaccaggccctagttaataaatatgggttttgtagctttttattataatcatcctattttagtttcagaaaatattttgattgggtggtttagacttatttggagttgtcaaaatccatataacatagcggaataacctaggactttgaaatgtgtgtctcaaaatagagctagaaaagggaggggggacagaatctgtgttggctttaaaatccacttggagcaagggaaatttacagctccagcttcttcctgaactcttgcaacatcactgctgattctgcactttgggggacaggctgtcatttcagtgcaggttgttcattttaaatgatttgttcagaacgaaatactctgttaagaaaactttgggctaaattcttttaccaaaacatttccatgtcatactaaacgatgaaatttgccacatcaatagtattttagaaaaatcaactacagttgataacaaagtgccctaaatacttgaaaaggtctgagagttgcagttaccaggaagctgtacatctccagctttgtagcactttgaaacagggccatctagtggaatctcctaattgtgaaactatgagtgcatcctttaagaccttacatttgagtctttaaaatatgcgttttcatgcctctagacccaaattaactgtccccaatacaatcttttgctcagaaataagtatctttccactcaactttccgcactgattaattttgtaatatcgtgttctgtggatatacattcaattaagtttctaaaactaagttgttttcttttttcccttcctatggaaaacagccctttctagcttgtctcctctcactgccaccccctcaactgtgaagtctcattgaagaattaacaaatgtatatgtgagacgatccaagatttatacaagacggtatattatataggatctagatgtttgttacagatgtaactggactgtgtatgacccatcaaacacattgttggcatgtatgagatgtcaaaggatgtttctgtggactggttgcatatacccttccttagccctccaaggaagcgtatatataaacctctccctagccaaatggaatgaagggtttgttcatcaaactcattttgttcttttcccaaaaacatagctaaattacattttccagcattccctgcagttaggtggggccctgtgactgagttctggcaaatagaatgtggatgggagacttgcagttctagctcctaaaatatccaacatcgtcccccattttttttgtctcccctccccacccacatctggtggatgtcattgctcaggcagaccatgggaccctttatcatcctgcgtccttgaatgtctgagtagagcctaatcctacaccataatccccataacctgcaatagactgtgatggggacatgaaatacacttttatcattttaggccaatgaaaatttggagttatctgttaattaccctgattaagacaggagagaagaaactgggagaaagaaagaagataataggagagaaaggcaatgattttcttcagagacacatgtgagcattygaactcttttctgcaagttttaagagcaagcacatggtttataaatactgaaaacatccagcagaacagctgtaagtaaaaccacaacactctgtttgacagagtttgctcttgtggagtcagaggcaggctgtggctggaaatgatgaggcttgaaaagaggtgcttcccacagctttagccatggtgagtgcagtgtgaggtgttcaccacatgggaagtttggaaacagggccttgtcagtttagccaccagacatttactaatgttatcatacatcatttcctgctaattaaacttcttaatgaactctattccaagatgtcctgcaaagatatggatgtgcctgtttccaaataatagctatttcaggtatattcaagctatgcagagtgggatgttgaataaatttttcaactgagccatttgtgaaagcaaaacttggcataggtttaacagacaaagaagcctttagatgggcaaaagaagcaaaaatcactgagccacggaggtcaaagtttacagaggcagtaggacttgggtaagactctctgctggcagataggaagaactcaaggagacggtagtgaawacggtgatatttttgaaggacagaaatgcaattgctccataatgtagggttgaggtaggggaagagggtgaaattaagtggtgtaggcaaaataaaggcaggttactaagagccttgaaaactatcggtgggattttttgtttgtttgtttgcttgttttgagacagtcttgctctgtcacccaggctgaagtgcagtggcacaatctaggctcactgcaacctcctcctcctgggttcaagcgattctcttgcctcggcctcccgagtagctgggattacaggtgtgcaccaccatgcccagctaagttttgtgtttttagcagagacggggtttcgccatgttggccaggctggtctcaaactcctggcctcaagtgatccacccatctcagcctcccaaagtttgggattacaggtgtgagccaccacctagcctgggattttgatttgaagctacaggccagagttcctgggtcaaatgcaggcataccttgttgtatcgtgcttcactttatgacacttcacataagttgcatgttttacaaattaatggtttgtggcaattgtatggcaagcaagtctatccgcaccatttttccaacagcatatgctcacttcatgtctgtgtgtcacccgttggtgattcttgcaatgtttcagtctatttcattattatatctggtatggtgatctttcatagtaatctttgttgttactattctaattgttttgtggtgcaatgaaccgcacccatagaagatggcaaacttaattgataaaggttctgtgggttctgactgctccaccaactggctgtttctccattggttcattaggtttamggaaagaagccctctccataacaaaagtgcaaggtgaagcagcaagtgctgatgtagaagctgcagcgagttaaccagaagatgtagctaagatctgtgatgaagttggctacactgaacaacagattttcattgtagaccaaacagttttatattggaagaagatgccatctaggacttttatagctagagagaagtcaatgcctggcttcaatgcttcaaaggataggctgactctcttgttaggggcgaatgtagctggagactttaagtggaagccattgctaattaccattctgaaaatccctaaaaagcccttaagaattttgctcwgtctactctggttgtgatctataaatggaacaacaaagcctggatgacagcacatctgtttacagcatggtttactgaatattttaagcccactgttgagaactactgcttagaaaaagagacttctttcaaaacattactgctcattgacaatgcaccttgtcacccaagagctctgatggagatgtacaaagaaatgaatgttgtatttatgccttcaaacacagcatccattctgcagctcatggatcaaggagtaatttcaactttcaagtcttattctttaagaaatacatttcgtaaggctacagctgtcatagatagtgatttctctgatggatctgggcaaagtaaattgaaaaccttctgggaaggaatttactgtcctatatgccattaagaagatttgtgattcatgggaggaagtcaaagtatcaacatgaacaggagtttggaagaagttgatttcaactctcatgaatgactttgaggggttcaagacttcagtggaggaagtaactgcagatgtggtggctatagcaagagaactagaattagaactggagcctgaagatgtgactgaagtgcctcaatctcatgataaagcttggtagatgagaagttgcttcttctggataagcaaagaaagtggtttcttgagatggaaactgttcctggtaaagatgctatgaacattgttgaaatgacagcaaaggatgtcaagtgttacataaacttagttgataaagcagcagcatggtttgagaggattgactccaattttgaaagaaattattttggaagcataaacagaagacagccgcatttatatacaatgctcaacagtacattttactaatagtgaagacttttaagactcttaagtcacgtctatgaagtaaaaaatgaaggcaaattgtatcaattaccatgtaaatttgtattataatcagttgaaatgattcagatcccactttttttccctccaaaagccatctttcaaccaagaaaatcaactaaaactaaggagaaaaaaagacaaaattagttactcacggtgggaaaagagaaaagaaggaaaggaagaacaaaaagaaaacatacctttctggaagactttagaaaattttaggcttaaacacttgacctctgagattccatgagatgcatcattatgaaatgtaatttactaggttgaaattaaagaataatctcttacatctaagaatactagatctttcctcaaaaaactacaaatagaactaccatatgatctagcaattctacttctagatatatatccaaaggaattgaaatcaatatgttgaaaagatttttatctgtgcccccatgttcattgcagcactattcacaatagcctatgatgtggaatcaacctaagtgttcatcagtgaatgaatagctaaagaaaatgtggtatgtatacacaatggaatgctattcagccttaaaaaaatacggaaatcctgtcatttgcaacagcatgaatgaattagaggacgttatagtacatgaaataaaccaggcaataaagacaaataccacatgatctcacatatacatggaatctaaaaaaagtcaaactcatgaaagtaaacagtagaatggtagttaccagaggctgggagtaagggggagtgggtagacagagagatgttggtcaaagggtacaacatttaagttaggcgagaggaataaatttgtgggatgtgttacacagcagggtgcctacagttaaaatagtgtatacatcaaaattgctaaaagaataaatctttttttcttttcttttcttttcttttcttttttttttttttagacagagtctcgctctgtcacccaggctggagtgcagtggcatgatcatggctcactttagcctcagcctcccagtctcaagtgatcctctcatcccagcctcccaagtagctgggaccatgggcatacaccaccacgctgggctaattttttaatttttgtagacacgggggtctgactatgttgcccagactgatcttgaacacctgggctcaagtgatcctcccgcctcaacctcccaaaacgctgggattacaggtgtgagccactgtgcccagccaaagagagtaaatttctaatgtctcaccacagaaaattagtaagtgatggatatattaattagcttgatttaatcattctacagtgtattcaaaacattatattgtaccccataaatatatatacttattactattattattttctagagacagggtgtcactatattgcccaggctcgtctcaaattcctgacctcaagcaatcctcctgccttggcctcccaaagtgctgggattacaagcgtaagccaccatgccctgccacatatataatgattatctgtcaactaaaaataatactaacaatgtgttttgaaaaaaatattagatcctacaaagttagttgtcattctagtccctaaaaggcagtgcagctgagcttttgattatatgcctactctggttttctttagtttattccctgttgattattaataactttatagaaaaaataaacttatatgatgttataacagtgtttttcaaagttaaataatataataatcccttttagaggagcaaaaaattattgcatatctccagtgttaaattatttttattcctttaagtgttcataatcatcaaattacatatacactcagtgtatagtttgtttcaactataaaactgaaattaattttcaagttaagtgcaaacaaaagcataaaactaataaaattcaaggaataatgttttcataaaacaaaaacaatggtatgggttgaatagtggaaagatgcatttggagattttatgcttcattgtgtattgcattgactttgaacacactggaacattatttgagtcacgggcatttttctatttttccttttaaataatgacaatcatttgaaccaattcaytgttttgaagagctgatctgcttcatagcaccctccaagttgcgatagtaataaaatattagaacaattaaaagtcataataaatgcttttccatttggcctatttattacctcacctactaaaggaagtgtcatgtgaagtgtgctacgaggtgactgtcttcactacctccctacatctgaacgactatgaaacctttattcatataaagtgccagaacattacagggcctcctcttggctcccacataattgtaaacactcatacggtttgggtatttggttataaggtggttatccaagtgatctagaatatactcacgccagagttttaaaatcatcattgaaatgaaaacacaaagttcagaaacttttgcagagaactcgagggctcctgtgttacaaagttagtgattttaatcagttgctctttcctttgttttgttttgcttttgtttctgagacggagtctagctgtcgcccaggctggagtgcagwggcgcgatctcggctcactgccagctccgcctcccgggttcacgccattctcctgcctcagcctcccgagtagctgggactacaggcgcccaccaccacgcccggctaatttttttgtatttttagtagagatggggtttcaccgtgttagccaggatggtctcgatttcttaacctcgtgatccgcccccctcggcctcccaaagtgctgggattacaggcgtgagccactgcgccgggccaatcagttgctctttctgaagagagtttcactggcaccgcaccacttgccactgagagcgctggggtccaactagaagtcaaatttgagcaaatgaatattgttttagactactaaatgtttaagacgtcagacaagtgattctgctctactaatatcagaaggataagaagacagtggtagtcaagcccattgtgctccccagatggaaactaatattcaactaaaggtgcagctcaaaactccgtctctggtacactgtgtgtgaccgtctgccctataagtagcaaactccaccatgaattgctgatgccattagtttctgtgtatctccaaaacactgaccagaaaattccacagtagggatttgtaagagaatgccctcgcttgtgcatcttcacagatttttctgatcaacatgagcaagtttgcctccttgtccccttgaaaataataatgtcttgtgtggttgggtgaagctatatatatatatattttttgktttgttttgttttgttttgkttttgctaaaaaaagaatcttacagggagataaagggatttctggaggaattaatttttttttcaattatgtgggacaaatggtgcttaaaatgaagataggacaaaggctcttaaatttttgactgaacaatggaaagggaacttggatgtggaactcccatctccattcctggttgcagactcagtctgacggggaggtcttgcactcaaagctgtcttctctccacagcctctgaaatccacggcctgtgtgccccaattagtacactctgccaggggacaaatgaagcaccctactggcttttaaaaacatagctggaggtgtagacccttattagacagatccaaagtttaagacataaccttactgacagaagacacctcctcatcttatttcctggccccatctcttccctgcccactgtgctttagctcctttgagttttgtgggctggttactgaggccttagataaaatgcaatttacctgtatttctaatttttcagcaagttagagtgccctctggtgggaatgtctccagtagttacccaggtcttgcagactatctgaatttgtgagtccacrttttctgcttgtgctaagctgaacacggtctctcactgctccctttttattcaactcagcctcatgagtttcacagccagagataagtgagaaaggatggaaatgtggtcatcagtagccagtggtatatttttctaagcaatattgattttatttatgtttattttcaaatgtggtagtggtggggagtggggaggatgtagtaatttcccagagtaagccagaatgatggttccaaattcaagaaatactaaatgtatttaactccactcgcaaaggaaacatttgggttatcaaatgactcattgtgtaactaagtgtcctgtttttaaaagtttttctctctctctttcctgcccgttccttgtcttgcctttaacaatgagataatagtctttgctctcactctttctcccaggcacccctttgcacagtgtttcccttatctaattacgtgtttgtttagaagttccagagactaaatctkaaagcaattcagtctactgtgggattctcccccacctggagattacttcaaggctgcagttaatttgcaacctggctgtcccagagatggcactagcccacacaccagatggggcaacagctcaagatagtcatcagaacaagtcacataggctgacccctatcaccactcctgcatgcccatcataccaaactcccctttagcctttacccttgacctagaaagctgaaacggtttctttaaggcactagctttggccatttttccactgctagctctggaataaagtaactttcctttagctgtagttcatctttgttattggctttgcaagtggtgagcagctgagcctgcactcggtaacaattgggaacctaaatatagtatttcctgtgatgtttaagcactcaggggcttactctccctttagtatcaattgttcagatctcaccataacaaagttgagagttccaatgtaagtagtttgcaaaattttagtccaaaatgtaataagacagactgaggattagtaatagtttaaatacacagtttagttactacttcaaggcatttttttttggtggggggtgggggggcgggtcttagtatgttgcctaggctggtctcgaactcctgggcttacagaatcctcctgtctcagcctcccaaagcaatgagattagccactgtgcccagcctcaaggcataattaaaaaatttttttatttagaatatttttaaatatttacaaaatagtatatgagagactataataagcccccatttagctatcagatagcttcaacagttgccaacttattactagtcttatttctctatgccttcttcctcctttctcaattattcagaagtaaacttcagacctcttaccctttcatctataaatatttcagaagagatctctaagagattagaacttcctttcaaaaatataaccacaaatcatcatacacaaaaaaattaatgacaattccctaatatatcgaggtaatgtttaaatttccctctgtctcttttaatctatggattctcctctctctcctttctttttactcaatatattttataagaaaccgaatcacttatatgcagttcctacaatctagatttatctcaatgtatcattttggtgttgtataaggagctcctctgttattaaataactagttagatctagaaacttgatcagattcaggttcaatgtttggcaaggcaacttcacaggcaatgaggcagctttccaccaggaggcgcagttggtccctttttgagatgtttgcagctattgacggataaascactgcattgatttattaataaactttaacagttgcaaaatggtgatattctaactgtgccatccccttttctttcattagctttttaatgattctttgaagaaatttcccctcatgaatcattttattactttaagatgcaatttgtatagagagcctagaaaaatgcttgattttttttccttgccagttttcaaaacgagttagttcttctgaagaatagagaggaaaaacaaattcagtttctcacactatagtctcacaacccacttctgacaccagaagcaggggtgttctcctcccctccccgtcccctgaccagccgacctcaagcaagcaatcaattctgcaggagacactagctgggtgtcctctaattcaattcagttctgacactawctacctggagacagtgttgcaggacagagaaatatgttacaggaaagaggtcccaatccagacccgagagagggttcttggatctcgtgcaagaaagaattcagggcaagttcgcagtgcaaagtgaaaggaagtttattaagaaagtaaaggaataaaagaatggctattccatagtcagagcaaccctgagggctgctggttgcccatttttaatggctatttcttgatgatatgctaaacaaggggtggattattcatgcctcccctttgtagaccatatagggtaacttcctgacgttgctatggcatttgtcaaccgtcatggtgctggtgggagtgtccagtaaggatgaccagaggtcagtcttgtcgctattttggttttggtggattttggcccactcctttactgcaacctgttttatcaccaaggtctttatgacctgtattttgtgctgatcttccatttcatcctgtgacttagaatgccttaaccatctgggaatgcagcccagtgggtttcagcctcattttacccagctatttgagatggagttgctctgattcacacacctttgacaatagcatcagaacccacaggttgagggctcagccccacaagagttcttcccacttcagatctgaagtaacaagttctcacccatatttctgtccaatcggctataaattgggtttctatgaccgccctgctctggctttattaatttgttcggacaattcacagaactcaggaaaacacgttttctggcttattattgtaaaagatattacaaagkctacagaagaacagtcagatggaacaggtgcacacagcaaggtatgtgggaaggggtgtggagtttccatgccgtctctgccaccctccaggaacctccatatgttcagctatccagtctttttggatttttatggaagcttcattacacaggcatgactgattaaattattggccattggtaatgaactcaaccttcaggccctctctcctcaccaaaagttgaggtggtggggctggaagccccaaccctgtaattatgccttattgtttccagtgaccaattcttatcctgaggctatccagggaaagccagtcatgaatcattagcatacaaaaagacacatcactttggagattccaaggattttagaagctatgtgccaggaaatgggaagaagaccaaatatctgttttacaacatcacagttccctaacatcatccaaaggtgacaagtgaggttttaaaaaatcattatgaattcatgtatgtgaatatatttgatatttttcaatccactgaagttattatacttgtcgatgctcaaattttcccatctttaaccagtgggaacctatttaagttggctcccaaatccttttgacataaccctactggcctttaaaacttccctgctttccgacatgataagatgttccaggctttctttacgtttcctaatccgacccaggcctggggttagccatttttccaaggcagaggttctcaaagtttggcccaggtcctcttaagagtccctgtgatccttttatggggtccgtgatgtcaagattattttcatagtaagagttatcactcagtatccatgtccccaaggatactgagggtcccaggacccctctcagatacccaaatccacagatgctcatctcccttgataaaagaaaaactgtagacaaattaaatttaacaaagtttaattgatcaaggaaaaagcaattcgcaaattgggccctcagaatcacagcaaattcagagagttatttctgcacagttggagagattttaagaatagaaaaaggaaactgaaatacaaaaaaaaaaaaaaacacaacagaagtgaggtacagaaacagccagattggttacagcttggcgtttgccttatttagacctggtttggacagttggccacctgtgagtggctgaagtatggctgcagtgattgactgagatgcagctattgttacagaagtatgtctccattagatttttcagtttgcttatctattaagttaggttgcaattcctaagtaagaactccagtatgcaagtatggagactttctcgggccagattttagtttggtttagcaccctcatataaaatggggtagtatttgcatataacctatgcacatcctcacatatactttaaatcatctctaggttatgtaactgagtatccccatttttctaagaaaaagagaatgagttattattttttattagttttcttcttttctcttctgtttcttgctattctccacttcctactagcccgtttgaaatgcaattataacctttacctccccttcaccagacactccctacagggcaagttcatctaactttgtactcagaagctccagaacaaactctcacccaccaggagattgcctcaagaggtaacagtcratttacaacccaaagtatacatgatgagaaactctttcccaccgggaaagtttttggccattttaataacttatttctgcccatgaagatgccaacttgactgcctagtagataaggtgccaagctagcatgtggacttcctacccacttgctgtctcccctgcctttcgaaagtacccactttctgctccaaaagtggagcagtacctttgaggctggaagcccatacttcttcccctaagctagctttggaatacaaagtcactttctttataccagacctcgctcttgttaactggactctgcaagtgttgagtgactaaacctgtgtttcagttacaattacttataatacctaatacaatgtcaatactctgtcaatagttgttaggctgtattgtttaaaattcatattactttttattgttttttttcctgaatagtttctatctgtggttggctgaatatgtaattgtggaacccacagatacagatgactgactgtttgccctttttattttacccttataaagtctcattctctcacaaatatacatggggattttcagaggctatacgatgtgttacattatgattgaatgcagaagcagttataacaattctgctgtcatttatgaagcaagacattaaagacatttacaaaaatgtaaaacaatggcactcttctcactaattttttaatgagtacattgttactttaaaatgtttaatttctaatgcagtaaacatcaatagattaacccacataaacaaaagctctttgggatctccaacaatttttaagaatttgaagaagtcttggaagcaaaacttttgagaactgctgcttcaagcagtcctagttcctttcagtggaaaatgtacatgagagatcacaacctaagaacaaaagatgctcatgattattggtttgccaatttcttttaggccattatcaacaggtagagctaagacaaaattatatacatttttaaagataaaatacaatatgagttcatactgattcttcctgttcacaatttgactataggatttttacttaaacacatacaatttatatacatgtctccccataccaaaaaagatcagtttttacaacactcacgtaaacagttattttcagtgtcagattaacaataccatgatcaacaccactatcctcaatatgattatttaaaacagtttaagattttttttttttttttttgagacggagcctctctctgtcacccaggctggagtgcagtggcgcgatctcggctcactgcaagctccgcctcccaggttcatgccattctcctgcctcagcctcccgagtagctaggactacrggcgcctgccaccacacctggctaatttttgtatttttagtagagacggggtttcactgtgttagctaggaaggtctcgatctcctgaccttgtgatccacccgccttggcctcccaaagtgctgggattwcaggcgtgagccaccacgcctggccaagattttttttaagttgttttttttttgtttgtttttgcgggttgtctctcagtggatttacaataattcaatggtttaaagttatagttgatccttgaaaaaaacaggttgaacttcgagggtccatcatacgtggattttcttctgcctctggcaccccaagacagcaagaccaacccctctctttgcctccttatgattttcttaataacagtttattttctctggcttactttattgkaataatatagcatataatacatatacaaaatgtgtgttaattgactgtatgttatcagtaaaacttctggtcaagagtaggctattaagtttttggagagtccaaagttatatgtggatgtttgattgtgccaagtggaggggattggcactactaaccctagcgttgttacaagggctattgtatttagaatgatgtgtacctttgagattatgccaccaagtggaccaattaagagctactggtttttacttgatttttatggactgctttttgtaaatttaattttgttttgtaatgatattgttaaaattaaaactttagaaaaattaaatttagcagaaattaattgagcaatgaccaatttgagaatcaggcagccctcagaaccagaggaggttcagaaagtatcgttccacaaagaggccaggcagcacgcatagaaaaaaaacagaaatgagatacagaaacagcttgattggctacaggttggcctttgccttatttgaacatgggctgatcagttgaccacctgtgatgattggctgagactcagttatttgttacagaagtatattcctaagttaggctgtgagttaaattgcatactaagttgggttgcagttcattatataaggactcaaaatacggagacatctttaagctaaatttaatttcacaatatgaaatatttacttggttctaaagtcaaatttatgaagtaagatgtttccagagatgtctagattctatccctgtctcctctatcctatttatttcctccaccataggtagcatctttaaaaacctcaattgttttcattcccattattttgaaaatttaagaaaatatgtatatatattgaaattaccaccatctttctctttttgggtaaaagcatactgtayaaattcctatccattttttttccactttgtaatgtattctggagatcacaccacagatgyatatagagttcttccttattacttttgacgattgtattagcatttcattgctttgttgtgtgaaagtttttgggaagccactgttttggactagcttcacgcactaggccccagcagaccagaccaaaccagaatggagtcgtttgtgctaagtaccacacaatcaaactgaactttgaaatgggccagtttcccaaaaaataggaaattcccttaagtctgagtcagtgaaacaaggaagtttcttctgctttaaccctaaaagtaactttgaaacgatgagtccactttttgttcggtttctgctttcttcagcccctatttgccaataaaaccaaccgcctctgctcagctgatcagaacactcattctactttatagaatgaggtgttttttgattctagaatcacgaataagagtcaattaagatttttaaactaattcgttgtaatgctgtcttttgactgttgtactacaatttattcaagcagtcctttatttaggaatttgggggtaatttccaatattttggtattatgaatcgtgctgaatagtcgtgcatgctctttcatattttcaccacacgtatttttgggtgaaagcatgaattcatctatgcaattttgctagatattaagctactcttttcactattcctgtacagatggagggacrgatgagacagctgcccagggcacttcagcagttactggcatagctgggatttgaactgggatgtaactattttcatacactctctaggtcattccaaggtgggagaggcaagcaaataattttgaatctggccagcatattcactgaaacatttatgcttatccttcctcctcccagcatacaagttcttccttagcaaaacctccagtcctctaatttagcatactttcgtctaatctgtcactttcctcaggccccacaactacgagtactccttgtccccacccggtcctaatttggtcgggtatagcggaggtgggcgtagagagaactggaggtggagacctttgtgcatgcccacacactgctttcctcgcgaggaatstggggcccttgcagaggcggaaccaggatgtgacgtaataaccgcgcgcggcgctcggcgttcccgcaasgtcgctttgcagagcgggagcgcgcttaagtaactagtccgtagttcgagggtgcgccgtgtccttttgcgttggtaccagcggcgacatgacggggtacactccggatgagaaactgcggctgcagcagctgcgagagctgagaaggcgatggctgaaggaccaggagctgagccctcgggagccggtgctgcccccacagaagatggggcctatggagaaattctggaataaatttttggagaataaatccccttggaggaaaatggtgagtgacagacctctccggtcccccccaacacatcccactgctgccggcagcctgaacactgaacgtccgctccctgcagccacaccaaggactgataacgctcagtgctctgggacactggccagtcccgagagtcctcctggagtctcgggaggcaggagtccaggaatatgtatggctttgagagaatcatgccttttactgtcaagtacagtggacgggggcgaattttaatacttaggttttccaggacgctgcacgtttggttctcttttgactgtagaaatcttccctcagaataataaccaaggactcgctagaattaaaattctgtgatttaagtatttgaggacacttgtctgacttttaagtgtgaggttctagagaccaagtaacacagtatccaaccaccagagggcacagccagcccctagctgatagtacagccccatgtgatccccgtaaaagacagggtcctgttggtatgccttgtgagtcacattcaagagctacctttctaaactaccgttctgtacttttaacacagtgtttcattaaaaaaatcgcattttgggctttgaagaaaatcactcattcaagaactttattttcaaggcctctgggtattttcttgaggactgttatggatgataaacatctcagaattgctttcagttacctgcaacacttactgatgacaggataatagtagtaacaatactacgtaacacacgggtgcttgctgtgtgcttggcactctactgggggttttacatgtgttacttcatttctttattcctgtaaggtagatattcctaatcctcattttaaatgtgaagaaactgaggcctacaaagcttcagtgatttgctggtggtcagggagctaggaattgaatatgagttcatattgtaatcaacatgtatctgattcttactgtgctacaaagtctagtgcaatagaattgttgaaaatttttctgagaaagtgatattggatacttatttatggtggtaaaattcaactcttctcccaccctttgtatccctgacattatcggaatattggcagtcactgatttaaagttgacatcccatccatcagcaagtgatataaggaagtaaataaataataatgtgtcgaagttcaccttaccttactttaatttattcttttataatcatatctgttataattcttagattctggattgtcccttccttgaatggataggtgttttttaatcaagttggaagacatgggaaagttccatttttagttcttttttaaaatagtgttgcagagggcattttggagtgagtttgggacaccccatcttagtatgtaaaacgtcctttttccagcattggcgttgtcaaggttgtctgccttatayctaaaatgatgtgagtgtcattgatcaataaataagggagatgactatacctgaaaaattctgtaggtttgattactctggttaaatacattaaaattattctttcattattttgctatattttatctttaacmaacttataataaggatatttttggaagtctttaaaaaatctataaawgccttgttatagtcttgcaaaatactgcttaagcattttggtctggactttgtaggtatcttctagcagactctgcatttactaagaatatttgagtagatgaggttacctacagactataagaaaatatgtgccatttagagttttgtaaaatagtcatggcattgttacatcattgatgccttttgttctgccataaatataaaaaatgggatatgtttattttgtgtatgtgtttttccccccaggtccatggggtatacaaaaagagtatctttgttttcactcatgtacttgtacctgtctggattattcattattacatgaagtatcatgtttctgtaagtatgtccttttcagaattcatttttaatattgtccaaaattactttctttgtggctatcttaccctacttagtggaaataatctgccacttataaacagattttgaagtactttgaattctcttaggtaaaaggtttaatgaaagttacataattgggtatagtttttaaaaaatattgtcactagtttacaacttgaaatggatttcctcatagaaattagtatttaagtgataagaatgtagtgacctaataatactagggtaaatttggagtcatgaataggaagggagaaaacaattctgctcctttttaaaaacctgtatctcgtataaggtaaaaattcaaaatagacaaagcatatctttgtcatcacccaatttctgttcccttcattttatctgattcttcacaatttttatttatttagaactcaggatgtccagatgcctgcactttttcactgatacagatcttgcatgggctgatggaactgagccagttgtggtattttaaaggcttggtctggtgcagggtgttggatcccaggcagaatgagaagggcatgcattttgggaagtggcgtggcagagggagcagtggtgactgcgtagcctgaagtgttggagcacaaaagagtgaggagggcattcgtataccaagagaggggtgttagatcctcagtgggttgcaggggaggagggtgagcacatctgtttggggagcaacagtggcaacagcctagtataggatattggtacctgagcagagggaggaggacatctggaagaaggatggtatgaggcagtgaggcaagtggtaactcagagcragatgtcagaacctgaatgaggtgaggcaggtattaatgctgggatgtggttgtggtgacaggagatgggttatatatagggagattggccaaatacaggcatacctcagagatatttcagaattggttgtagaacaatgcagttccaaaagtattctttggttytagaccaccaaaacgagttacacaaattttttggcttcctagtgcatataaaagttatgtttacactgtgctgtggtataagtgtgtaatagcagtatgtgtaaaagaacgatgtatatgctttaatttaaaaatactttattgctgggccatgtgtggtggctcccacctgtagccctagcactttgagaggccaaggtaggaagattgcttgaggccagaagttcgaccggcttgggcaacatagtgagactccatgtttccaaaaaaaaagaaaaaaaaatagctggatgtagtggtccacacctataatcccagctactcaagaggctgagatgggaggattgcttgagcccaggatttcgaggctgcaataaactgtgattgtgccactgcactctggcctaggtgccaggttgatatgctgccttaaaaagaaaaaacaggccgggcacggtggctcatgcctgtaatcccagcactttgggaggttgaggcgggtggatcacgaggtcaagagatcgagaccatcctggccaacatggtgaaaccccacctctactaaaaataaaaaaaatgagctgggcatggtggcgggcgcctgtagtcccagctattcgggaggttgaggcagaagaatcacttgaacctgggaggtggaggttgcagtgagctgagatcgtgccactgcactccagcctggcgacagagtgagactccgtctcaaaaaagaaaaagaaaaaaacaaaaacttcattgctaaaaaatgctaatgatcatttgagccttagtgactatgtatgatctttttgctartggaaggtcttgcttccatgttgataactgctgactgatcagggtgatggttgttgcaggctggagtggctgtggcaatttcttaatataagatagcaggcggggcgcggtgtcccacgcctgtaatcctaccactttgggaggccaaggcaggtggatcacgaggtcaggagttcaagaccaccctggccaagatggtgagaccctgtctctactaaaaatacaaaaattagctgggagtagtagtgggtgcctgtaatcccagctactcgggaggctgaggcaggagaatcgcttgaacccgggaggcggaggttgcagtgagctgagattgcaccactgcactccatcctgggcaacagagcaagactccatctcaaaaaaaaaaaaaaaaaaatatatatatatatatatatatgcacacacacacacatatacatacacatatatatacatacgtatatacatatataagtatatgtacatatatacatatatatatatgtatatgagacaacactgaggtttgccacatcgattgacttttattttcacgaaagatatctctgtagcatgagatgctgtttgatagcatagcattttacccacagtataactttcaaaattggagtcaggcctttcaaaccatgccgctgctttatcaactaagattatgtaatattcgaaattctttgttgtcatttcaacaatgttcatagcatcttcaccaggagcagattccatctcaagaaaccactttgtttgctcatccaaaaggagcaccttctcatctatcaagctttatcatgtgatggaggcasttcagtcacatggtcaggctccacttctaattctagttcttttgctatatccactacatcgagttccttcctgcaccgaattcctgaacccctcaaagtcatccacgagagttgaaatcaacttcttccaaactcttgttcatgttgatactttgaccacctcctgttaatcacaaatcttcttaatggcatataggatagtaaattctttcccagaagattttccattttctttgcctagatccatcagaggaatcactatcttttttttttctttttgagacaaggtcttgctgtgtcacccaggctggagtgcggtggtgccatctcgactcactgcaacctccgcctcccaggttcaagcaattctcctgcctcagcctaccaagtagcttttgatatgaagtgagaaacatgcagctctttcttttatttgaacagttagaggtcattgtagtgttattaaattggcctaatttcagtattgttgtgtctcagggaataggacagtccaaggagagggagagaggtggggaatggccagttggtggaacagtcacaacacacaacatttacttattaaattcactatcttatatgggtgtgatttgtgttgcccctaaaatttgtagtagtaacatcaaaaatcactgagtgcagattaccataacmaatattaatataacaatagtgacaaagtttgaggccaggcatggtggctcacacctgtaatcccagcactttgggaggctgaggtgggcaaatcagctgaggtgaggagttcaagatcagcctggccaacatggtgaaaccccatctctactaaaatacaaaaattagccgggcttggtgcacgtctgtagtcccagctactggggaggctgaggcaggagaatcccttgaacctgggagaaggaggttgcagtgagccaagatcgcaccactgcctgggtgacagagcgagactccatctgaaaaagtttgaaatattgggagaattaccaaaatatggcacagagacgtgaagtgaacacatgctgttagcaaaatggcactgagtttctgggatcggttcccggcccatgccagttttgcagagcacacctggtgtagagccctgtgactggggcctggaccagcttgagcagctggccagcgggtgccactgcctgcggggcccagaggcgttgagtacatctgcagtgctccagaagcacaagactgtgaagctgcgggccctgtgcagcccgaggaagtttggcatggcgggcaggagctgccgggagatgctgcgcaagggctacctctgcttctagctccctcgtacgaggatggcatggagctgaccgaagcgtcctcgacgatgccgagctggtgctgctcacctcacgccaggcctggcagggctatgtgagtgacatcgggtgcttcctcagtgcttttcgccagccgcacgcgtggctcatccaggccgcccggcagctactgtgtgatgagcaggcccccacagaggcagagactgctggccgacctcctgtacaacgtcagccagaacgtcgcagccgacacccgggctgaggacccgctgtggtttgaaggcttggagtcccgattttggaataagtctggctatctgagatacagctgtgaaagccggatccggagttacctgagagaggtgagctcctgctcctccatrgtgggtgcagaggctcaggaggaattcctgcgggtcctccrctcyatgtgccagaagctccagtctgtgcagtacgacggcagctatacaacagaggagccaagggtggcagccgtctctgcacaccggaaggctagttctcctgccagggtcccttcgacatggacggctgcttgtcaagatactccatcaacccctacagtaacagggagagcaggctcctcttcwggacctggaacctggatcacatagtggaaacaaaaacgcaccatcattcctacactggtggaagcagttaaagaacaagatggaagagaagtggactgggaatatttttatggcctgctttctacctcagagaacctaaaattagtgttgtctgccataagaaaaccacccacaaaaccagctatgacctgaacagaatctacaaaccccagacaaggttgaagaggaagtggcctgtgtgaaagcgccagtgacatatacacaccatattctcgtctttgttcgaggcctgtcgtgggcataattttaacaggtgcctttttttttttttggtcactccagtagctcctggaaaaaaccttaaaaaatatttccggcaaatctgatttcagtacatttctgaatcattgtttgtttgtttgttttttgtaggtggagtttcactttcgttgcccaggctggagtgtagtagtgtgatcctggctcactgcaacctccgcctcccgggttcaagtgattctcctgcctcaacctcccaagtagctaggattacaggtatgtgccmccatgcctggctaatttttgtatttttagtagagacagggtttcgccatgttggtcggsctggtctcgaactcctgacctcaggtgatccacctgcctcggcctaccaaagtgctgggattacaggcgtgggcctccgtgcctggcctgaatcattttttgtaccttctgacagcccaacttccagaggacaactttggggtactcactggatgtcttgtgagtcgtcagtagggataagaattgtcctgagctgaggaattcttctgttctctggttttaccagtatttggtttgctcatgtggtgtggtcaccatactaaaacggtgtcatggctgaagttagccactcttgtttgagggacaagttgtttatgcatcagctgtctgctggctctccatttccatggcaaatgggcagctccatccttcttgactgttctaaatgcccaaaagagaggtgtcatgctttgggggtaagatgtttgtactccataaagaacataaaaggacattcactgctgaatttttttcttttttttttttgagacagggtctcactgtgtctcctggctggagtgcagtggcgcgatctcggctcactgcgacctctgcctcctgggttcaagtgattctcctgcctcagcctaccaagtagctgggattacaggtgtccgccaccatggctgactaatttttgtatttttagcagagatgaggttttgccatgttggccaggctggtcttgaactcctgacctcaagtgatctgcctgctttggccacccaaagtgctgggattacaagcgtgagccaccgcacctggcctgctgaattgtttataatggcaaaaagtaggaaacctcccaatgtctatgaatagggccatagctattatgtcgaaccacatgaaactgccgtttttctaggccaaaaatggtgagcgatcgttaatttcatgattcaacttgatacatttacatagtgcaaaaggatgttgtagtttcaagcttttatgaagaaagtgtttctgtgtagaaactggaagctgttcagtgcactggcagctgaaccctgctcctgctccrtttatcagagttactatcatctcagataatatggagctcatgtcagcagtgcaggtggtgagtgcgcagagacaatctggaaggaaacgctgatctgaacagcagtaatcctgggggacatgggggtgggactggattacagaggactcattttctaaatcatgtattttatgatacttgaatttttttgaaatgggcatttatttaatgacatgttataatgtactttttttttaaanaagtgtaatatttgaatttttacatttgttgtgtaatcagcagaagcaataaagatttttcagaaaaaagaaaaatggcactgatagagttgcttgtctcggggttgctaaaaccttctatttataagaaaacacaatatatgtgaagtgcagtaaagcaaagtgcaataaagtaaggtatgcctgtgagtacatatgttgatgataaagggacacaggattctcactgccggaaaagggagttacctatgtgaaaaggaagaaaagtttgtggtggtagaatggaattggaggtactggtgtgaactcatggtttttaaaatgtattgatagacctmgaaatagatatagatgtaaatgtggatgtgtgcatgcgtgtttgtgtgtacatattctctagctatgtccactgagaggacctggaaacattgccactccttagtaattagcacacttagaagctaggtcttattttctaaatacagttatgcactgaaaggacccagagctcagagcagtggccaattctagggcgggaggagagaaagtataagatgagcttggaacatattattgtgccagaaagtaaagaagtgctgaaagaatgatgggaacatatttcaaaggacacagagtcagcttgcaaggactcctgcctgggcagtttgaacttcaaagtaaataatgatagtaatagatgatagtcacctgaataaaatgaaaatccatgagtgcaaactgatataaataagtgaattaataaatgggtagaaaagaaagctttttgatgcaataatttgctgaatgatagaattagaaaaattaccatttgagaatcatcatagtaatatttaattcagctaaggaacatcaaaggatgctaacattagtctgggcacagtggctcacacctgtaatcccaacactttgggaggctgaggtgggaggactgcttgaggccaagagtttgagatcaacctgggcaacataatgagaccccatccctccaaaaaaaaaaaaagcccaatagtcccacctgttcaggaggctgaagcaggaggatcgcttgagcccaggatgtggagcctgcaatgagctatgattgtgctgcccactgtactccagccatcctgggtgacatagtgagactcccatctgaatcaaaaaaagaaaattaaaaaaaaaagaggatgctaatactaattttaaaatacttatcctcaaartatttaatttgttacaaagagagaaagagtatctttgtagtagagaaatctggcagacgccaccttagtcaaggggtctaaattaacattattgataatggggcaaactgaaattatgttacttgataggctgcaataagaacacagcattacttttgtgatattcctgccaaaggtgcataacttgaatgtaatttattgattaaattcatatgaggaaacagaagataaacccaaactgaggggctgttctccctcattattggcattataccttcagaaatgtcaagatcatgaatgttaaagaacagctttaagattgttccagattgaggaagaataaagagatatgccaactaaatgcaattcttcattaataggcataattgcattatctgtaagaacagtgacggtgttggcagtcagaattttaaagagcctgcacagtcaatggagaacatgtcatgtaaggggattttctgataagtccaaacaattattgagacaattgagaagatttgaatggattttttagatcaggtagagatagtaatgtatgagtgttaatttcctgatcttgatagttgtattgtaattattttaagaatattgtctttgcttgtaggaagtatactagagtaataaactagtcagcaatttactataaagtgattcaaggaaaaaattattttcattcttgcagctttatgtaagtttaaaattatttcagaataaagacagaagttaaggactgtctaacaaattatagataatccagtgaatgttggctttctgttagcctattgacagaagagtgaaacaaccaaaattttggggggttttcagaacacccctgcccccaacataacttactctctttgattgtgttctctattgattgtgtagactctttaaaattctgattgctgacatctttgttccgtgtactaagcagattaagccccttgattaacaagtacggagtgcctagcatgtcctcttcctttattgctatagaaagaatatacaagaccaaattcctgacctcaaagactttatagtaaagttggaagataggtataatttgggaaagagtacggaggaaaaaagttaattcctgttagaagcaaacatatggagtcagtaatgaacgtggccgtatgtacctaagactgaggagctgactagaatggaaggtctgttgactaggtagcctgggaccaatttatggaaggtgttgaaagttagatagaagaagttgaactgcatgtgataggcaatgggaagctttccattttttaatgggagagtgacttgatgaatgtgatacattgaggaaaacaaagaaaaacattgaaatggatggtgaattgaagggaagaaagttctgacagcagggcagatcagctggaggccattgcgttttagtagatgtcagttgagaatctggttagggtgaagatagcagggatgaagaagaaaaataaagccagagacacttctaaaggaagaaacacctgaagttggtggttgattaagttggggataaaaccaaagttcacagtcatttatgactgcaawatctctagccttggaaattacaagtagggtattggaagggagggctttctgatgatgggatagaagtgaatattttagactgggtgyggtggctcatgcttgtaatcctggcactttgggaggctgaggcgggtggattgcttgagctcagaggttcgagaccagcctgggcaacatggtgaaaccccatctctactaaaatacaaaaaaatyagctgggcttggtggcatgtgcctgtaatcccagctactcagaaggctgaggcagaagaattgctggaaaccaggaggcagaagttgcagtgagtcgasattgggccaccgcactctccagcctgagcgatataacgagactctgtctcaaaaaaaaaaaaagaaaatagtgaattttttaggagcrtgtgctgccatggcagttttggagatgtccaagtggacatggcctgtcttatgtgttagaaacatgagattgttagttctaagaggaattagagttgggttaggggattttcacattacaaaccaacacaaactctctctacaactattaaaaagggctaacaatttgtatatctaagggtgagagaatagtttgtatttctgttgttgatgggctttaaaaaagtttatgttcataaaaaggctacttcatttcattatacatctgttatgttttcactattttggcatgtaagaccctagagaagaaaatatattactttctgtcagtgaaagtttaacatccaagagtgatttttatgtgcagaaagaactggttacagtgacttaaaatccagattaatgtatggttcttgagtttcaaatataaaaacatatttttttcctaattctttaaattcagttttaaaattctattaaactatgcatctagtaaaataagaataatctcctttgtttttactatctttggattaattgaagttgaactcttctgaaacaattccatttacaaacatagctaaattctgttaaatattttaaattgtatttatacattttgtgtgttcaattttatttcgaagtatttatatggtaaatttatgattctaagaagtaatttttttcaacctagaatcacaaatcaattatgcattttaactagaatcctaaacctaattttttaaaacctctgttagccagattatcttacacattacaaactctgatcaacagaatgtatggaatgtagcaatgttttcagaacttttaaaagttgacacattcacttatttatactctgggtttaacttactttatcatatctaaatttaactacatttttctgggatcgaaaagacatttctaagagaagcaaatttaacaaactgcagtcactaggttgacaatttaatacagtaatgtggttgcttatctgagggttcacacttccaggtgatttttcctgagccatagatggacatatttagttaaacattttgtgtcagtagaggtcccagagccactcacttaccttactttttctcttgattttggtaggtaaaggattgcatcttcaataagattgcaaccagtttgcttcagctcactcctttgctgcctaattgaattctgcatctctcagatgacttttcagtgtctttttgccttttagcacgtaaagacattttaaagtgctcacattgtattctgagtttctctcatgttccagttctctatgcctcatatcatgccaataatcttttaaattttgggcagtggtatcttgtgcagatgtatatgcataaaaagtacatgtattcaacaattacttatgtagtacctcttatgtgcaaggcattgttttaaagaccaggatacagcagtgaacagagcagattgagtccctcccctcatgaaatgtttagttttagagactggtaataaatatataaacaaagaggtatattaatgttataggagaacaagtctatagaagaaaaattaagcagggtaaaaactagagaatgataaggcttgctattttaattaggcctctctgaggaagtgatctttgaagacaaacataaatgaaatgaagatacaggtcaagcagtatttaggagaagagcatttcaggtagaggaatcatgaagtacagaggccttgaggcacaagcaggcttgactgaattggactcctaggaatggagccactgtggctgtagtagagtaagtgagggagaaaagactggctttttctctaagaattatgaaactttgagcagagtgacatatcttaaaagaatcagtgtactctgccttgaagtgtggagaatagacttttcatttgcataggagggcacaagtggaagcagggaggctagtaggtgctgttgtggtagttgaggtgaaaatatgatagaggcttggacaaggctggtgatgagaaccagttggattcagggtatattcttaagatagaattaacaggctctgctgaggagtcaaggtttctgtctttcataactgggggaataagagtgtcatttactgagatgggggacatggggaggaacagtttggggatgggagaagttaagtgtgggacctggttaagtttgagatgcctgtttgatagctaagtagagatgttgagtaaacagttggatatgtgaatctggagttctgtgaaagtttggagcttaagttaaaatttggggtatgacctatttcttattttcagaagaaactcttaacaccataattaacacagagttaacttttattacaggaaaaaccatatggcatagttgaaaagaagtccagaatattccctgtaagtcttaacacttctgatttttcttttgtttattgtttttctctttccttttcctccctttccaagcaattattagattaaaatgttctttccttctcactttcggwttaagtccctgttttgtgtattcttgtaaaaaacaaaacaaamcaaaaaaaaacaggaagaaataccgtgaggtaacaattacagttcaaatgggaagtgagcacatttattttcaacctggctgtaaaacgtgttttgtgaccttgattttcctaaagggagttgaaagtaccaaaagtttttcactgtgtcctgtttcatgttgggtaaagagcttagggcatgagcctaagcaaacatccatgcatggtgacagcaactgaatttctgttattaattccaaactctcatgtcctatggctttgtacctcattttcaagatttgaccttaagttctccatctgtgaatttaatatccactaatgggtgttttaaattttatactatgggccaggcacagtggctcatgcctgtaatcccagcactttgggaggccaagatgggtggatcgtgaggtcaggagatcgagaccattctggctaacacggtgaaaccccgtctctactgaaaatacaaaaaattagctgggcgtggtggcgggcgcctgtagtcccagctactcgagaggctgaggcaggagaatggcgtgaacctgggaggtggagcttgcagtgagccgaggttgcgccactgcactccagcctgggtgacagagcgagactccgtctcaaaaaaaaaaaatgtatactatgaatgtgtgagctatagtactaatttgaaatgagttattttagcattaaaaggtgactcagtagtcagttggtatttactagctgtttgtgaggttattgtttagcatagtagaatacatactatgttcttgtctatttctagtcacagataatgaactatcataactcaaaagtacacaatttaaataacaaaagtgtgattcttgctttaatcaaatgacttagtcacagtaatgattatctgttgcaacaggggaattttaggaagggccaccaaaactggccagcggtcccagttggaacgctggtttaagaaatagttgggggaggggccaggcgcggtggctcacgygtgtaatcccagcactttgggaggccaaggtgggtggatcacaaggtcagaacttcgagaccagcctggccaacatggtgaaaccccgtctctactaaaaatacaaaaattaccgtgcgtggtggcgggcacctgtaatcccagctactgaggatgctgaggcaggaaaattgcttgaaactggaaggcggaggttgcagtgagctgagatcgtggcactgcactccagcctcagaaatgagtgaaactccatctcaaaaaaaaaggaaaaaggaaaaaaaaaagtagggggtatcgggggctcatgcctgtaattacagcactatgggaagccgaggtgggtggatcccttgaggctaggggttcgagaccagcctggccaacatggtgaaacaccatctgtactaaaaaaaaatacaaaaattagccaggtgtggtggtgcacgcctgtaatcccagctacctggaggctgaggcacaagaattgcttgaacctggaaggcagaagttgcagtgtgcggagtttgcgccactgcactccagcctgggtcacagagtgagactctgtctcgggaaaaaaaaaaaaaaaagtgggggccaggcgcggtggctaacacctgtaatgccagcacttygggaggcagaggcaggtggatcacctgaggtcaggattttgagaccagcctggccaacatggtgaaactccatctctastattaataaaaatacaaaaattagctgggcatggtggtgcacgcctgtaatcctagctaccggggaggctgaggcacaagaattgcctgaacctgggaggcagaggttkcagtgagccaagattgcgccactgcactccagccttagcgacagagcaccctgcctcaaaaaaaaaaaaaaaaaaaaaaaaaaagtaggggatttctccttttgttttattgtgtaacattgatgtgtgttacagcctaggtagtctcaaaataggaaattatcttgctggtttttccagctgggcaatttatatttatttagtcttccatttattccatttaaatgttaatttattttgccatttactgttcaaaggaaaaggagagctctattcagaagaccatatcagggatcctgtagcatttctcatatttctgtattttttgccactgtggttctttcttgtttctgtgccatgacccctttgaggaactgaagaatgctcattgtatatatgtttagaataggacaagtaataacaaacttccaaatctcaatggcttaacaaaacagaggtttatttcttgttgacatcacagactactgtgaatcaggtgatcttcctcaatcttacagctgtgcctrtcgaatatgaggttccaagatygtgatacaaagatacggcaggatgtctcrggggatgatttttaggatctaagcttagaagtagcttacatcacttctgctcaaattctgttagctaaaactcactgtcatcttcccaaatattatctgtgtgctctttgctatttcccagacccctgttcatggagtttctgctacattccatctttctagtcaccaaacagctcttggcttctttctttacccatgcataacacacttagtctctctccttagggagaaatcccaaagtcccattccatcattgcaccccggccccaaatccatgatctccagatgatgtaaaatagtatgtcaggtttatatatgacttctgttgatctgaggatcagtgaactaagaagacaagttaactgtatccttgtcccccaaccacacccattgttcagtggtagaatttggatagcatagtagtcactggttcttggcaatcctgaaatctcactcctaacccgtgtgtgagaaattacttgaatgggcactgattttgttttcttgaaagaacacctttatccatcgttcttcctggttcctggctctgtccagggggtttgttcttttcattatctacctagaccacatctaaatggtattgggaagcatgccctccttagggggctgtatgggcttcagaatctgccacctgcttgcaggaggttgaatgccagaggttgttttaatttcaaacattctggcaggattctgtaaactatatgtttggtttgtccatccatttcccttaacatttagaagcatgaaaagaaaaatatttggtagacatctaatgtgtttacttctagtcagtttctcatgccagtatctgtttttcctatacacagttaccagcttgtctcatttctttgtccttatgcatctgcctctctcacctctgtggcagctatgtggaggccatctgaggcagactggttcaaaggctaccttcattttaaactgatctttgccatagggctgtgtccctctgtttgagttttattgggcttctgttgctcagatttcttgtgttaacttattgtttaggaattctgaagtagtgtgatttttcaataccacaaggtcctgattttttatttattttttagatacagggtcctactcttgctcaggctggttttgaactctgggcctcaagcaatcctcctgccttggactcccaaagtgctgggattacaggcatgagccaccatgactggcccaaatttttagattctattaactttttttttttttggtcaggaacagaaagtctctagcgtgcaccaaagtgttctctcgtcctctccatttttatgtcgcctctcaaatcagccactttttgcctgagctcatgcttcttaaagtacattcccaaggcatccaaggatcccaaggatccaaacacatactataactttttttcccagctacttcttctagaacctcaagttcattaggcagtcagcttccaagttataggagatattttgctaaatagtttgccactgccttttgtttccatctttatctttgctaccagactgctaagccagtgccctatagcttgatttttattacagcagcattagtgccacttcaaggcaatgatttctattgggataatgctagctgtactaacaaattgttgcccaaatgtataatggcataaacatatttattttttcattggactataatcctgagcagtaccaggtcagggaatggcagggattggggtgggtatggggacaattctactcttcccagtcattcagggactggcaggctaacagaatctatcttaaacacatggctgaaactgaaattgaataatctgtcttaaaactatacagcttgtcagtggaggttccaagattcttaccacttggttctggcttcaatgcccatgcctttttgcccacatctatatcaagaattgaaaagacatctggaccagctgcctagccaaagtttgtattctgtattcagtatgtaagccaatcagaaaactggtgattgcgtaacacattcagttgctgggggtacattacctccttatctggaactgcagatgtttccttgcarcttctttctggggcctccatttattggggtcatacaaaataaaagattatccctttatcacttagagaacacaattttcgtgccctttttgattattttgtttctgagtgaaaatttccctattatttcactataccttaaaattttgaatactgattgttcagatttagtcagcttctactttgtctagggtccttttaaagggaatgccagaactcaagtacattttccatgtgagatctgatgaacatagaacagaatagaactatcacctctgtagacttaagatttttgtactaactgtatctttgttttcctagggtgatacaattctggagactggagaagtaattccaccaatgaaagaatttcctgatcaacatcattaaagattatgtaaaaagttaaaaggcttatgagcctaagtttgttcctatattaccatatttactgaattttctggaaaagtaactttaataaagtttaatctcagaaattgtcatatctgttttcaagcattgtacaatttgagactgagtaatttaacaataagtaaaaagtggacatgctaaacaaatatgagagactacctactttttctggtcattcttgacttggaaaacggtatggaaaagtatttagttacatgtttgtttgtttttttcttacacagtacttacactaatttggtatcagggtatgcaacagtgaaatatcacaataaacaaatgtaagaacagcaattccatgcacttttgttttaaggaaatctttccggccaggcgcagtggctcatgcctgtaatcccagcactttgggaggccgaggcgggcagatcacgaagtcaggagatcgagaccatcatggctaacacagtgaaaccccgtccctactaaaaatacaaaaaaattagccgggcgtggtggcgggctcctgtagtcccagctactgcggaggctgaggcacgagattggtgtgaacccagaaggcggagcttgcagtaagccgagatagtgccactgagcctgggcgacagagcaagactccgtctcaaaaaaaaaaaaagctttccgaatcatttttgaagaattyagaaacttgattgaaaagcttattccaactatgatctgacactcaagactgtcagatttaggttgctgttaattttgtcatgagaatgtaaaatactaaaatctctaagtgaaaaatttgcatactagtgcttrttataaaggataatgcaaaaataaacttgggaactttgcattatgaattttatttttatatctacataagcatgagggaaagaactgtattttcagataattaaatccagaagagttacaaattttcwttcgtcccaaagattttgtctgggtatttcttccttagctgtcgtcttgcagacaccatcgaagcatagatgatgcagccccaggagattaaaacgatggcaagcagcaactaaaccaaaaatcgcaaaggaggtgtgaaatctacctgatatttcccctcgcccccgtcaggttrccgttgccattgctaaggtgggaattaaagtaacaaagtcgaataaatggggttccagtggcgggtacacccagcagcccttacgtaagaagcggaagatcgtatcctccaggaagaggcggagtcgaggtgagggagtgaaatgcttaattcaggaatggattttggagtttctgggtgctgaagaaatagggcctttccgcctgcgggcccagtgagtcgacacggtggggrcccgcgatccccgggacttaccactgaataaatccastccagcgtgcgacgacttactggcttcatggtaaggaggcggcagcagtccgcgggagctggcgggagctgcgggccttacagtaacctcccaggcggtggctgccaggcgccagcagccatcttttagccgggcacgagcgcccgcccactcgcttcgtgcagcgctgtcgctggcctcttccgcccggagttggggggcggtatcacgtgatcgggggccttgcccgccttttagagaggggaataaacgagaaaatgttaaaaattgcttttttttttttttttttgccaactarggagataggcgtacctccactggttttctttctagttgcaatgcaatattaatgcaggataaggtgctgtcgtgtccatttaaaagttaatttgaaaaacaatccacgttttaaatattacgtctggctctaaagctggaagaattaacgctttctcccccgctccctcccccacgcctccccgcatctgataccacacgatttagatggacgttcgcctgttcatctttgacgtaaaaataccacccactcttttatatgtgacaaatcgttgtgggaacccctgtaaatcgagccattcttcagaaacgtatagcgtaatgtatatctctaagaagaaatacgtgggacgcgttacccgccataatgtatcagtcaagcaacaagtgtttgttgagcgtgtctgatgttcttgaactgccgcgcgtgagatactaagccccgagcacggcagtttggtgggcgagcgtaccaggttcagctctagaatgtttggggcgctcacatttgaggcctgaggagtagaatctggcaacgggccgcttaggctctagacgttctttatacctcgcagttatcttaaaagagttttagtctagatttcagggagtgggaaggggaagagcggagaaaaacgtggtctgtttagggaggagtccaggccctgttttgttaggttgtcctgtttctccccagcctggaggggatccctctctgaagactttataggatactggttgggctctggtttgggatcccgttggactcctggtgttgcttccgggaggcgtacaacaggaggtgagagacttcaagtccatctaacaattcccctatctagacactaaagataatttcctaagtttccgcagagtttggtaaggttgaaacgacatcgaactagttctcgtgttttccgggtaagttaggggcgaacattcagtcagtgtccccagtggctgagtaccagtaacaagatggggagggtcgcgctgccctcctccggggtctggagcggcgggggaggggccgcatttgggccggtgcgctgagccccgcccccgaggccggcgtccatctgctgcgcatgcgtgaggaagscgggtgttgtgttttgatgcgcgggagctggggggtgggtctcgctctctgccctgcttccgagctgccattggtgatgagccctttgcgtcacaggggtcgcagccgccgctggggtctccgctgtctcgcgaggagggtgaagcgcccccgcctgctcccgcttcggagggtaggcggagaagtcgccgggtacgccttcgcggatcctgccgacaccgacctagctttctgggctgccgggagctcgcggcgagcgccccagccaggcctgcgccggcatcctccgaggtgagtgagattcggaacaatgggacgcgggggtcggaagggccgtgggagttggcgctcccgcctggakcggcgcctcgggacccgagggttgcggtcatggcctgcggggctgtccgggcctcggcgggccagggccagggcccccgagcggctcctgcgcgcacctgtggattggtgcgggcaggcgagggttgcgcttcccacaagcgctcccgaggggcgcgagcctggccgtgtactggaaagagcttggtctcagggaaaagcaaaaaagcaatgagactgaatcgtggcgtcaccacttacaggatatgtgaccttgcctaggtcccttaaatccctgagcctgtctgtaaaatgggaataacaatatttaagttcgttgtggttatgtaatgctcatggtgcttatcttagtctagtggcagttctgaaccaaagtaaacgactatcaccgtggctttgggagttgggacttgtctgtgttgtgttaaacattctgagcagaaattgcccgtgacttgttcatccatccatttactgcagctttcctcatgggttgctgattgtaggctggaagggggcagtgctgagatgagccacatagtgatttaagaggaaaacggagtagaccttttgataggtaattttcaagattatttaagakwattaagaaacagctgcccaagatttaagttaatagtggtgagagctttctgggttttgtccatgaaatgcaaagaaagctatacaatcagctaaaatcaatcatacttgtctggaatgagtggttttagaggcgaacggttcccagccaattctttttgctggaattggattaaatttgataggatctggataaatttgataggatctactgagatcctgtgacttttgtatcttcttttggagttgattaaatgcagttcagagaggtacagtgatttctttaaggtggcaagaggtaggaaccagtttatttttaatacttgggtgatctttctatttcatctattcgtgaaccctttttagtcactttgcctagaaatattaagtataataattatattaagtatgatgattattttgttgttataaactatcctctgtctggacccatataatcagttatgggtgatgagctaccgaaattcacttcgtgttcrcgtaacatagagaacattgttgagttcttactgtgcatcaagcactgtgctaagggtttttatgaaatatgtcccgtcacacaaccaccttttcaattccattttagaattgagaaaacgtgagattttgagaaaaaacttcctccaggttacacacctactaagtggtggcgattctcagccttggctctgcagcaaaattaacatcactcccgcaaatgtaatcagcagatgattaaattttatatacagtgtatgccatagatgacttttgatttttattgatttattttttttgagacggagtcttgctctttcgcccaggctggagtgcagtggcgcagtctcggctcactgcaagctccgcctgccaggttcacgccattcccctgcctcagtctcccgactagctgggactacaggcgcccgtcgctacgcccagctaattttttgtatttttagtagagacggtttcaccgtgttagccaggatggtctcgatctcctgaccttgtgatccgctcacctcggcctcccaaagtgctgggattacaggcatgagccaccacgcccggccatagatgacttttgtagtaagtctaactttaattctacagagcagttatacttcgtttatatcattgtgcagtttttcaaatatccagtctcctgaaatgtagattcgagcttcctgattctttatctcccccatccattttccctagacgtgtgtccatattaattagctgaaatttccccgaattgttattatccttgttaaagccagatttgaggatttttcgggaaagggaagttttggcttaatcagtttatactaaagatggtgaacttcatttaggatttgggagacagtttaggaagtgtgactggaagaactgattgtctcctgtgaggaaatgtcctaattcctagagtgctaggatggaaaacccgtaacacaggcttcttacagaacctgaagcactgtgtttttcatcgggtctacctttgctacttaaattcagaacgtctcttgcagatcagccactcttttgtgtgtgtgtgtgtgtttgtgtgtgaggcagagtttcgctcttgttgcccaggttggagtgcagtggcgtaatctcggctcactgcaacctccgcctcccgggggttcaagtgattctcctgcttcagcctcccgagtagctgggattccaggcatgcgccaccacgcccggcgaatttttgtgtttttagtagagaccgggtttctccatgttggtcaggctggtctcgaactcccgacctcaggtgatctgcccgcctcagcctcccaaagtgttgagattacaggcgtgagccaccgcgcccggccagcaaatcaaccactcttaatctgtatctagtcatcccagtttttatgccttaatttgtatttttaaacagctttgttaagattacattccgggctgggcgcggtggcttacgcctgtaatcccagcactttgggaggccgagacgggcggatctcaaggtcaggagatcgagaccatcctggctaacacggtgaaaccccgtctctactaaaaatacaaaaaaaaaaaaaaaaaaaaaaaatgccgagcgtggtggcgggcgcctgtaatcccagctactactgggaaggctgaggcaggagaatggtgtgaacccgggaggcggagcttgcagtgagccacgatcgcgccactgcattccagcctgggcgacacagcaagactctgtctcaaaaaaataaaataaaagattacattccatccataaagttcacccktttaaagtttgtaggtcaatgattttttagtatatttacagagttgtacaaccatcacaataattaattgtagaacgttttcatcaccccagaaataaacctctttactgccccagcagcagccaccagcctcatttcatctctctagatttgcctattctggacatttcatataaaaggtatcatacaatatgtgggttcttgtgaattttttttttcattcatttagcataataaaaagtttcatccatgttacaacatggtaccagtactttgttcctttttattgccaaataaaattccatagtgtggatagaccacattttattagtctgttaatcaattgatgggtatttgagtttctccttttgaggtattatgactaaagttgctgtgaatattcatatacagtttttttgtgtggacaagttttcgtttcccttgggtatatctaggtgtgtaattgccgggtcatatgttcgacttcatttgcgttttaaaaaacattttaatttagtatttagtgatgattttgaagagctaataacttatttdatctacatgcattccaattgtttgatgtttctttttcttttttaaaatagagactggatctygctttgttgcctaggctgtttcaaattcctggcctcaagggtctcctgccttggcttcccaaagtgatgggattacaggcgtgagccaccgtgccccgcctctttgatgtttctgatgaagactgtttgtttgtttgtttgtttgttttgaaacagggtctcattctgtcacccaggctggagtgaggtggtgcaattatggctcactgcagcctggacctcccaggctcagttaatcctcctgcctcagcctcctgagtagctgggactacaggtgtgcccatcatgcccggctaagattattcttttcagctaatgattcctgtgtagaaatacaagaatgaattctaatttattattattttttaacctgttatggaggacattaccagtcattcattcaccttttactgtcaaagtggttaacaggcttataaaactagagaagggaagggtaaggtttcatttttttaaaaaaatcatactttgttgagattttattttatttgaacttcaagtttactacctaataattccctttaataaattcattttcagctgtaatttttatgtgaactggaagtgttcagaaaacactaaaattctatttcagagaactaagtgaagataaaatgtattaacttggaattcacgggtcttttttccaagtccagtaatcccttcattatatagaggagaaaactaaagtctagagtaatgtggttttcttcacattaactagagctagttctaggtgaagcctggtcttcagtccagatcttttgataacctctttgattccctcccaacttttctctgttccttccctctaccacacacacagtctctgaactgaaaggtttttatttttatgtgtgtgtttctttaaatttcttgagtaggcagattaaaaaatgttaaaagtagagggaaatgctgagaaggttgtgcagtattagggttttagactgtttatgaacaaaaaagcagtattatgtatttataatcctgcttttccagaccttccaggacagtgatgatgtttttgcattttcagtccagtaaatagaagactagacatacctggacccctgaagaaacgcttatttagcattaattgattctctattaagttatggttctgagaaagccaagatgccctaaagtgagcaggtttaatatgaaagctatggtggaatacttgtatttcagtcatgagtttttgttgtgggttttgtttattggtttttcttatagtttgttaaggccaatgagtctatttagaaaattacaattctgttatttgattaacttgaccccagttgactagtgatggaacctcctgtgataaaggaggtggaggaagatgaatattaggccctgggaaaccaagggcctagtagttttttgttgttgtttgtttatttgttttgagacagagtttcactcttgtcacccactgcaatggtgcagtctcagctcactgcaacctctgcctcctgggttcaagcgattctcctgtctcagcctcccaagtagctgggattacaggtgcctgccaccatgcccggctaatttttgtattcttagtagagacaaggtttcacaacgttggccaggctggtcttgaactcctgacctcaggtgatctgcctgccttggcctcccaaagtgctggattacaggcatgagccaccgcgcctgactccccaatagtcaatatactcaaaatgattagtataaaatgcagctttggagtttatgagataaagtcaaaacgcatactagatttcaagctctagcaaagttttgagccaatgtaaactgataaaacaaactaatctttaatattctagtcatccttatgggaaaggataatagggaaggggaccaaaaacatgatttcaagatattctgtggcctgacttttggattaaagaaaaaagctaaaggaaggcttattaggaatgctgaatggaatgagtgattaactgaatataatagtgtagtaataataacagctgacatttactcagcacctactgtgagccaggcactgcctcttggctgctttttcatttattatttaatcttcactaaaagtttcctctccctttttaaaattagctttctaaggttgaaaaaagaatctttcactaaaaatcataggattggtttaaacaggtgaactttctggtatgtaagttatgtcaccaaagttgttttagaaaagtacatacaaaatatcacagataaatcagtagtctgtattgttagtggcatatgtatatgaaaggtataaagccatgcatagaaataacatcaactgaggagtgtggtgtttttgttttttgttttctagagagtgataggaggggaagataaggggcataacataagtggtggatacatgggtatttggtactttttttttttatatgtcagatatttctcaaattatttttaaaaagaataatagaatgttacataatatttgagagctttactatgtagcaggtgccttttctaagggctttttacatcttcacaaaccctgtaaggcagattctgttatcactgacctgcagatgaaattaaagcacagagatactaactggcacatagtcacgctggtagtgtggaaccaggattcagtcttaggaaatctgacttcagagcttatgctttaagcactatattactatgctacagtgcccctttataaaataaaacaaaagtaatgggtcacttaagtattttcaccaaaataagtttcaaggtctttatttgcatttttgttgagactatttagtcattcctctattatcaggttactgatatatttctttcccttttacagataatggcatcagctgctaaggaatttaaaatggacaacttttcacctaaagctggcactagcaaattgcaacagacagtaccagctgatgcatctcctgattctaagtgtcctatatgcttggatagatttgataatgtgtcttacttagatcgctgcttacataagttctgttttcgctgtgtacaggagtggtcaaaaaacaaagctgaatgcccactatgtaaacagccctttgattctattttccattctgtgagggcagaagatgacttcaaggagtatgtcctaaggccttcgtataatggttcttttgtcacccctgatcgacgatttcgctaccgtacaactctgacaagggaacgaaatgcttctgtgtattcacctagtggtcctgtgaacagaagaacaacaactccaccggatagtggagtactgtttgaagggttaggcatttcaacaagacctagagatgttgaaattcctcagtttatgagacagattgcagtaaggaggccaactacggcagatgaaagatctttgcggaaaattcaagaacaagatattattaattttagacgaactctttatcgtgctggtgctcgagttagaaatattgaagatggtggccgctacagggatatttcagctgaatttttccgtagaaatccagcttgccttcacagattagtcccctggttaaaacgtgaacttacagttctttttggagctcatggatctttagtgaatattgtccagcatattatcatgagtaatgttactcgctatgacttggagagtcaggcatttgtgtctgatttaagaccatttttacttaatcgaactgagcattttatacatgaatttatcagttttgcccgatctccttttaacatggcagcctttgaccagcatgccaattatgattgccctgctccttcatacgaagaaggcagccattctgattcttcagtcataacaatatctccagatgaggctgagacccaagagctggatattaatgtagccactgttagtcaggcaccatgggatgatgaaactccaggaccatcttactcaagctcagagcaggtacacgttactatgtcttctcttttaaatacttctgacagttcagatgaagaacttgtcacaggaggagccacgtctcagatacaaggagtacaaaccaatgacgacctaaataatgacagtgatgattcttcagataattgtgtcattgttgggtttgttaaaccactagctgagaggaccccagaacttgttgaactgtcctctgattctgaggacttaggttcttatgagaaaatggagacagtgaagacacaagaacaggagcaatcttacagttctggtgatagcgatgttagtagatgctcatctccacactctgtccttggaaaggatgaacaaataaataaaggtcattgtgattctagtacaagaatcaaatcaaagaaggaagagaaacgatctacatcattgtcatctcccagaaacctgaactcatctgtaagaggagacagagtatattctccatataaccatagacacagaaagaggggaagatcaagaagttcagattcacgttctcagagtagaagtgggcatgatcagaagaatcatagaaagcatcatgggaagaaaagaatgaaaagtaaacgatccagaagcagggaaagtagcagacctagagggagaagagacaaaaagagatcaagaactagagatagcagttggtccagaagaagccaaactctgtctctaagtagtgaaagcacaagcagatcaaggtctcgtagcagtgatcatggtaaaagaagatcacggagcagaaatagagatcgttattatttaagaaataattatggaagcagatacaaatgggagtatacttattacagtagaaacaaggacagggatgggtacgaatcatcttacaggaggaggactctgtccagagctcattattctagacagtcttcaagtccagaatttagagttcagtccttttctgaaagaacaaatgctaggaaaaaaaataatcacagtgagaggaagtattactactatgaaaggcacagatcaaggagcctgtctagtaacagatcaaggactgcatctaccgggactgaccgggtgagaaatgaaaagcctggagggaaacgaaaatacaaaacacggcatttggagggtactaacgaagtggctcagcsatctcgtgaatttgcttctaaagcaaaggacagtcattaccaaaaatcttcatcaaaattggatggaaactacaaaaatgagagtgataccttttcagacagccgatcatcagacagagagacaaaacacaaaaggagaaaaaggaagacccggagcctaagtgtagagatagtttatgaaggaaaagctactgatacaactaaacaccataaaaagaaaaagaagaaacataagaagaagcataagaaacaccatggagataatgcttcacgttccccagttgtaattaccattgacagtgacagtgataaggattctgaagtaaaggaggatacagaatgtgacaatagtggtcctcaagaccctctacaaaatgagtttttggctccttccttggaaccatttgaaactaaagatgtagttacaatagaagctgaatttggtgtgctggacaaggaatgtgatattgccacacttagtaacaacttgaataatgccaacaaaactgtagataatattccacctctggcagcttcagttgaacaaactctygaygtaagagaagagagcacctttgtttctgatttggagaaccagcccagtaacattgtgtctcttcaaactgagccatcaaggcaattgccatcgccacggacatcattaatgtcagtatgtcttggtagagactgtgatatgtcttaaaactgccaaagcatttcattgagaattatgatgttataaaaaggaaaaaggaagaatgtcgtctactgcagtctatttaaagatgacatttggtgaaaactctcttcctccttacaatattttaaatgattttttttttggtgttaatttgtaaaaatcattatttgttcaaaatgtatgtcccaccctcaaagatatgcacttttaagtgaagaaaatgatactgctagcagcttatttaaaacttggggtcctttttaaataagaaaaattatataaattttagaagttatttcataaagccatacggtattgacatattwttaaggtagtcaatgagtatttttgaattttttttttttgagagttattctggaaatgtgttataagctaggagaatccctttggacagtctttatttttcttcttaaaaatttatatgattcaaaaccatttcttcaggttaaattgaggcattttaatctgcacagtttatcttctgccaaaataaaaatttactatttcctttatatacttgtttatctggactgccagtaaaacaaatgtgtattcaacaaaagaaaaaaaataaaacagtaacactttaaaacaagaatcagacattttcctatgcagtatttttttttaaagtttattttagtaaagttaaaatcttgaaagtagctaagggcataattatgtcataaatactgaacttcaggtgaacaaatactttatagttttaattattttctttgattttgaggagtatcttatttgctttctatcatcagtaaaaacagcatttaacttgctaaataaacatgaaaaacccttgtcatacttcttttacattggtagttctttcatataaagtggttatgttttatcttgttttagggatgataaaattacatctatgctgatgtaggattgccactgaacagtggagcttgagttaaatcttaattcagccttcagtttgcctttgccttgctactgtattcattctttattcagtagaaattgcagtgcctactatgtggcaggttctgcactaagttttgggktttttttttttgttgttgttgttgttkttttttttgagttggagtctggctctgttgcctaggctggagttcagtggtgcaatctcacttcaccacaacctctgcctcccgggttcaagcgattctcctgcctcagcctccggagtagctgggactacaggcacgcgccaccatgtccggttaatttttgtgtttttagtagaggcggggtttcactatgttggccagactggtctcaaacccctgaccgtgatccgcccgcctcagcctcccaaagtgctgggattacaggcatgagccactgcacctggcggttctgttttatcaatagagcaaagcagttatgctccctgccttgatggtgcttatggactgttaagacaaatatttatgtaagtataacattataaactatcatacattctctgaggagaaagtataattcccttacaagtgaatggggatctaatcatgattggacgtaatagttgaatccagaaagcaagccagcattaacgggggaggaattgctgttggcaaaggatccaaaggcagatgaagagcctagcatattccaagaactaaaagcaggattagacaaaggacagggtgggaacagtcttggtaggccatgtttagaatccgttattctaaggacagtagaaaattgtctaagaagaatctaaaattgatgttggcaatttttaagtaagctcagacattgagaaattgtgggaagactatagttgatcaagaaatacacattaartttgaaattactttgtagttaacaatgtaatttttcttaagtattaaaaacaacactattccacatagtaatttcacatcatgttttcccttaaacatttaatgaaaacaatacatggcacatcatccttttgggtgttcaagccaaaaattgccaagtcttgattcgtccctgtccttcagcccccctcattcagctgccaaatccttggcactaatgatttttatgatatttctattgtgtctgtagcattcacatccaatctgggtagccaagatctttcatctgtgctaccataatgggtcagcttgcattcattgttggtctgcacccgctcctttcccccatccatttgtgatgcagcactgaaaagatttttttttctcttgagacagtctcactctgtcgcccaggctggagtacagtggcacagtcttggctcactgcaacgcaagctccacctcctgggttcaagtgattatcctatcccagcttcccgagtagctgggattacaggtgcccaccaccacgcccggctagtttttgtatttttagtagagacggggtctcaccgtgttggccaggctggtctcggactcctgacctcaggtgatctgcacgcttttgcctcccaaagtgctgggattacaggcatgagccaccgtgccctgccgatctttttaaattttcatttcatctgcttcttaaaatccttcagtagcttcctattttcttaggatattaaaagcagacaaaaaaatccaacagcatgatatggtttatagatttctgcctaattaggctctggcccatcttcagcatttctgtcacttcatttgggctcatgccacgctaggctgctccagggctatggaggtgctgctccgtactacgtgagagctttcattcgtggcagtttctgctggaaactgaactccaccctgrctaaactagatttctgttaaaagtgtgccctcttcccacctccccaaaactgcttcawacaactccaggctccttcagaccactcatcacaattagcagttgattactaaatgccttatctcccactagtctgaaagttctgtgaaactatgtatcagtgtactgctagactctttyactacttgacaaccaacatgcttaaaacactgggtgaatgaatgggacctggagaatttgaaaatgggctaaggcctgctttcaagaagctccactatctataaacttttagaataatagtatattcttttaacatgttcatctgaattcagtgtccatgccattttattttacctcaggttctcagtgtagtgacttgtcatttaatctatgtaagaaatgtaactaaaccattcatgcttccttactcatgatcatgatcctgaggttcacaacacgaaaatttgttactactttttacctcctagtccaagtagtggagttcagtcttccccaatttctaggctagccaatctaaaaggcctcactaactcatccagtctgtagtaaagatgggcagtgtgtacaaaggggtttacaggaggcaagctgacaacccacactggctgggaattcttcccttgtgaagaataattgcagtcccctgccagtgcaggatgtagacatgctgagcaagccagtagcacatctctggatgcagaaaaaattttggaaggtgctttggggtgctggaacccaagtgtgatctggtttaggctgttggsactcccagtattcccaccaacaggggcaaggaatgggaagtggagagggaggagtttccctgtgtcaaaacccttgatttcctcagcattcagtgtggatgcacctttagaagagtatagagtttagaggggtataaaataaaaaggatatgctttgtttttgttttgaaacttaaaatgggagggagagaggaaccttttttggaagagagccccttgagaaggaaaggttgactaatgaaacaaagttcctgaatgagaaagatggtccagagcacagagaaatgaaattagcaatggacaagcaaaggcaagtcttactataaaatggcaggaggtaaaaatagacaaaaaagcatttgtgggtagatgcattaagatgaggtaatacatgccctaaagcctctccttgctctatgaagtaggaagaatgccatcttctgagaaggttggatcatgaggaggagtggaaaaaatgccccttgaaaggcacagagagagggttaagaattgctgattagtgttgaggcctcacctgagatgggatatttgaatttgtgggacactatgatttgtgacttctttttgtcccaccagcattcaacattggaagtagaagcagaaactaatgttggacctatagtattcatttagtatttgtactgagcaaatgaatamatgggtggatttatgattggatgttctggatgtgagcagtaaaaggacaaaggggcaagggaattgagggatagagtggcgagagtagcggaattgatgcattctgttacctaggctgagtagggagggaagtgaagctatgacatggccaatatacttggagaacagggagagtatcaagggattcattttccaatggggttccagtaggtacaagggcaggagtaagaagacaaaatatatatattagagagtgcctaattgtaggcattgttggaagtaggtgactgaaattgaaacaggtgaagctgaaggtgactggaattgagaataatgatctgcgaggctgtaggtatatcctcaacaagaaaggcattctgtgatggcaggagatacaggatggagaagaaaatagttgtattgtgattatatcttcctttaaactatatttgtcttcctccacagcagcaggcatgcagagaagatttaaaatgtgctgaataaatgattatttcctcattcttggtttttagtcaaaacctgaatcagttattagaaaactgtgggatatggccattttaaaaaaatacagtaggattagttgttacaatgtcatgaaaatcggtaagttgtttcctattttacctgcaaagatattgggcgatggtaaataacattggatctgtccttgaagaaagcaagaggcaaggaaatggagttcaaattaggctaagctctgaggccaaattcctacctgtagaatctgtaactgtggttgctctagaacattgggtaataagggggcaaagttaggcatcttctacaatttgcttggagtaggctggttccagcttatctgcatgactgcactgtaaataggtaaatagttctctcctggacaaggggatatccctttgcttttctatttgtaaaactcatttattcatcaggcattgagtacatagagtccaagagtattctaaatgctagggatataaggatgaataggatggaactaacaggaatcttaaaaaaggtaggaatggaacaattagatttgttcttaagaaacaactagtagtaatgtagaagaaggttttgagtagggaaagcctcagaaaaagactgtttaagaaggtcttgtcttgatgcagtggttcatgcctgcaatcccagcactttgggaggcctaggcaggaggatcgcttgaatccaggagtttgaagctgcagtagccatgatcacgccactgcactccagcctgggtgaaaacctgtctcacacacaaaaaaaagaaaaaaaaaaaaagctctgacaagtagctcaaaccagatatcagaagggcctgtacaagaacagggacaataaggatccagagaaggggctagattggagatttctgaggtacacaacacaatatttgggtacaatttaaatggagatgggctgtgaaggagagggaaaagtctgggatgaccagaccttttttttttttcaatatgagagttggatgcatggtgataccaatatccatggcgagaaataggaataggaataggaatagtctggggaggaaaattagttgtttgaaacgaagcagcctggagttgtgctatagtagctgctagccatatgttgatattaagcacttaaaatgcggctggtaaaacctaggagttgaactttaaattttatttggttttaattaatttaaatagccacatgaggctagtggctaccacattctttatttttaatttatttattctttttagttgggttatgtttctaatccactcttttttttttttttaatgttgtaaaggtatacaacattcccaccatcacagatgaaatagaagatactcatcaggaggaaaatttccagtgggcatctgaaaattggagtgtgaatcttggaggcaagattggggctagagaaatgatttaggagttgctgtgaaacagagtagtactgaggctgtgggaggatgagatactccagagaggaggtagagcaagagaagcagacgtaagtgagaattctagggaacataatatgaaaagttggctggcaacagaaaagaaactttcaaaagaggccaagaagtgtttcccatagtcccacatactttctttgcctcttcaattttatgttgtgtctcctgtatctaatacagtgccctcgtcactatggaacatagactttttgagaggttaatcttatttttaggttcttgggagcacctcactcttactttcatgtgatgattatgttagaaaccgttgcyttggtggagcaggttaggctgcctccaaggaaatctaataggatttttagaatataggactgggaagtaccatctttagattctactctatcagtcactctcctttgctttccttcatgtccagttatgattttccmgataatgttttaatcactctccttgcaataccctccaactcacttgcccttctttctttcatcatttacctactttaggagttgggaaacttttcctctagggccatacacaggctgtgtcacataatctttgtttttttctacactttttttcaaattgaggtggagctttgctttgttgcccagcatggtctcaaactcctgggttcaagcartcctcccatcttggcctcccaaagtgctgtgattacaggtgtgagccaccatgcctggcctacaacactttctaaatgttaaaacaatttttagcttttggtctgtacaaaaacaagacacgtgccagatttggaatgcaagctgtagttggcctacagtttacctagcaagatctcagtctggatgaacccagctcttcggttctgcgtacgtgcatgctgctaagtattgtgaaggaaatcagtaactggtaaccgtgcagattggtgtacatcagcttcataagctgtacgacattagagggcaagtttttgtagtattcttgctcattgtatttgacaaaatggcttctttacacctttttctcctcaaacctatttctctctaccacccatatattttagagataggattgagtgactggctgggcagttatgatcagcacaggctcaaacagaaaccctgcctgtttaccaaaaccagtatctgcgtcatattagttcttagagatactgcctgccaagactgtcttgactggcattcttgtgtgtcttcagtcagcttgtaggtcggctgatctaagccttcacctggggttactgggctctatgtggtttctcatcctccagcacattggcctgagcttgtttacgtgatctgaccaactcrtctaatataagcagccccattactccttattcctttttctactttatttctcctcacagcacttattactatataacatctacttttctgtctgtctccctcactagaatgtggtaagctctaaagccatattctccactttagtcatggtaataccattctcccagttgctcaaaccagatacctgaaatttatcctcgatttttctcattcctttcctctgccagccactcaatcctgtctctaaaatatatctcaattaacttcttacactctctgccacagtgtccttatctatgctgctcagcatctcttacttgagtcacctcccaactgatctcattctggctaggagccagagaggtttttaaaaaatgtaatcagattatgctattccttgattaaaaccctgcagtatggccgggcgcggtggctcacacctgtaatctcagcactttgggaggcggagaccatcctggctaacacggtgaaactctgtttctactaaaaatacaaaaacaaaattagcctggcatggtggtgggcgcgggagaatggcgtgaacccgggaggcagagcttgcagtgagcctagatggcaccactgcactccagcctgggcgacagagcaagactccatctcaaaaaaaataaacaacaacaacaacaacaacaaaccctgcagtatgttctcactgcacttcattccttgcattaaaggtgctgctgtttcagctccacttgcaataccatttacttgttgctcacagagttccagctacaagcatcttgcatctttcactttttttaaaaaactcttctgtgcattctgtctcctacctgcttttttttttttttttgagacggggtctggctctgttgcccagactggagggcagtggcgtgatctcgtgatctcgattcactgcaacccctgtctcccaggtttaagcagttctcctgcctcagcctcccgagtagctgggactacaggtgtgtgccaccacacccaattttttgtatttttagtagggatggggtttcaccatgttggccaggctggtctcaaactcctgactgcaaatgatccacccgccttggcctcccaaagtgctgggattacatgtatgagccactgtgcccggcctacctgcttttttttgaatagctaattccttctcattcttcaggattcagctgaaatgtgacctcctcagaaaggtattcccttaccactgtactgaaatagttttctccatgtcacttcacatttggcagttactatttgtgtttttacatctttattgtgtcttcttcctccttcaatcagactctaagctcttgacagagactcttttccacktatctccatgtatctagtgtttttcacagtacctgacatacagtagatattctgtaaatgtgttgagtaaattaatgcccaggtgaggagatggtctaagactgagattttttttttaatttttaatttttaattttaagttctggggtacatctgcaggatgtgcaggtttgttacataggtaaatgtgtgccatggtggtttgctgcacctatcaacctatcacctaggtattaggtgataagatatcacctaatccttctgtgatcttatccttctgtgacactccccttctttcctggccttggtcaaattttacctatgaatctgtcaaatgattccatttctggaccttcagttctttcaggtataatctatactgtaattgttgatgttttctaaatctgttgttattcaggaatacattatttcccactagtagcatagaaggaggcatgtctttacctttttaaaggaattttggatctgatttctttttctcagctaaaacccaaatccaggtattggaagagtagcttgcatgagataataattataaacataggcaaaacataagggtataaagaacttgaagccactggagggcaatcaaaaagcagaaactggagggaattagacccttgaaagacggagatgacactgtataagaacagtttctttggcatttcatctgagggtcatccccggtccatagggagactagaatgcaagcagagagccacagacattgtgtcagaagatggaccctggggctgcccgagtgactgcattttgagggagaaatttcagaaagtagacacagaaaacaagccctaaaatttttgtataactttcactcaaatctttacctgaccctgaaatgtacatgtgcagggaagattccaaaaagcccatgtaagcaatagctggaaagctaaaagggctcaatagatacatttcagccaccaccacagggaatatagaacttggaggttgaatcccaccaacttagatgggctgagaaacatgtaggacttttcactggaacatgcagggccacagcttactgtggaagactatgactcaggactaaggacttaccttgcaagaagggcaaaatttgaaacagacctaccacagtgtgtaaacaatgcctttgtaagtttaaagtaattcatcggtaattcagtggaatgctagaacaaaaagtaatactcttgagagtaaaataatagaatccagagattctataatacatctrtagcatccagtataaaaaaaatactagacatgtgaatgaacccatagtcaagagaaaaagccgtcaccaaaacaggttccaagatggaattcacagacaagggctttaaagacactattagaaatatgtgtatgaacttaaaggaaaagatggtttaatgaatgaacagatagtggttctcagctgagacatgagaagtagaaaaaagaaacaatggaaatcctggaactacaaaaaaaaaamaaaaacaaacctaaaatgaaaaagttactggaagccttaacaaattggagaagacagaagtgaaataacattagttggaaaccagtgtttaccagaggcaatgaatagcaccagaaatagcaaacagcatggaaaaacaaaaactaatttttttcttattttacttaaaagacaacaagctataacaaggtttataacattgtattattgtagtatgtattttataacatatagaagtacagtttcagacaatgatagcaaaaaggatggggtggaattacatggttgtgatgatcttatattttacctaatgtggtacaatattagttctaaatagattaagttgaggatacatattataatccttagtgcaaccactaaatacacacacacacacgtataaaataatatgtagagtgtatacaaatatatatgtgtatgtgtgtatggagagagacctatagctaaaagaatacaaagagttatagctaaaagaggttaaagttatatttgattaacgtatatccaaggagtccattttactggatgacacagcaaaaccctgtctcttaaaaaaataaaattattgaattaaaagtttgttctttgaaaagatgcaattggtaaatccctggcaagactgattttttaaaaaggcaaaaaagataataaggtctatcacgaacaccatatgccaatacatttaacaatttagaggaaatgatcaaattccttgtgttaaaatataaacttttccacattaaaatttcaagctggccaggcgtggtggctcacacctgtaatcccatcactttgggaggccaaggtgggtggattgcctgagctcaggagttcgagaccacccaggcaacatggtgaaacccagtctctactaaaaaaatacaaaaaaattaactgggtgtgatggcrcatgcctctagtcccagctacttgggggccgaggcaggagaatctcttgagccctagaggtgaaggctgcagtgagccaagattgtgccactgcactccagcttgggctacagagtgagactctgtctcaaaaaaaaaaaaaaaaaaaaaaaaaaaaaaaaaaaaattaaggtgttccagcagtgattcataaattaagcagctacaaaccagaaatggtytggggctctgttagagggggttgaagggacacagagcaaagaaattgtttcattggttaaagtttgagtgtttgccttatttggactatccaagtgagaaatttatgacaatataaccaatgtcccagttagccaactgtgattggctaaactaagtttcattttcctcatgagggtgttacagctacatcagtctaatggcctaccaattattttaacacttgagaagcacaatttatcaaaactgattaaagattaaaagtcagaatagctttatatctaattgagaaattgaattcattataaagaatcttcaaacaaggaaaatgtcaagcccaaatggttttattagtgaattctgttaaacatttaaggggaaaatgataccaatctgaaacaaactcttgctttatgagactagcataactctgatatcaaaacctgataaacacattacaagaaaataaaattattgactaatattcctcatgaacacagacacaaaagtatttatgaaaatactcatttggtcatgatatagcatcctttgtatctaaaaccaaatgagatttatcccaggaatggtaggttgggtgaacgttcaaaaattgatcagtgaaatttggtatgttaacagaatatatgatcacctcaataaatgcaggaaaaaacatttgaaaaattcaacacccatgcattataaaaactcagcaaactaggaataaaagagaacttcatcaatctgataaaaggtatctaagaaaaatttacagctaccatattatttaaagtgattattattacattgatgatttccccactgaaattagcaataaagtaatggtgtcaactgtcaccacttttattctattttctataggaggctctaggaggtaccataataaagaaaggaggcaaaaagcatgaagaccggaaagaaagaagtaaaactggctgggcatggtggctcatgtctgtaatcccagcactttgagaggccgagatgggcgatcgcttgagttcaggagtttgagaccagcctgggcatcagggcgaaaccccatctctacaaaaaaatacaaaaattagctgggtgtagtggtgtgcacctgtggtcctagctactcaggaggctgcagtggaaggatccttgagcctgggaggtggaggctgcagcagcctggttgacaaaagtgagaccctgtctcaaaaagaaaaactataatgaaaggaaataaaaggcataaagattggaaaggaagaagttaaagtatgtattcacaaatgacatcattatttatctagaaaacttagaggaatttacagaacaattactagaacaaataagtgaagttagcaatgttgcatgttttaaggtcaaaaaacaaaaatcacttgtatttctttttttgtgtgtgtgtgtgagatggagtctcactctgtcgcccaggctggagtgcagtggtgcaatctcggctcaccacaccctccgcttcctgggttcaagcgattctcctgcctcagcctcccgagtagatgggattacaggcgcccaccaccacgcccggctattttttgtatttttagtagagatgaggtttcaccatgttggccaggctggtctcgaactcctgacctcaggtgatccacccacctcagcctcccaaagtgctgggattacaggtgtgagccaccacacccagccaatcatttgtatttctataccgtagcaacagacaatttgaaaatgaaatcttaaaaacaattccattgacagtagcatcaaataacataaaatagttcagaatagccaggtgtgatggcccgtgcctgtagtcccagctactctggatggctgaggtaggaggattgcttgagtccaggtggatcccttgagcccaagagttcaaggctgtagcacactataattgtgcctgtgaatagccactgcactccagcttgggcaacatagtgagactccgtctgtaaaataaaatgaaacaaaactaaaatactgctgagagaaattatagacctaagtaaannnnnnnnnnnnnnnnnnnntcggtggcatatgacatggtgcgcatagcgtctcggtcctgagtggctagacaagagatgcggaattgagtcgtggcatgatatcgtggatctgctaactcaagcaacacgtatgcatgtctccgcgacgatgcaagacaatatgcgatacctctacattgtgacgtgacttcgcgggagtcgtcgatgcgacgcggcaagcacgtgcgacggcggcacatggcatgatagcggcgattcgttataaggctctttctcgttatcactattaacttcactagacatattatcaacggcagtcagccaggaggatagtcagcggtatgtggtgcatcgatcagaggtaggcagaagacaaacgagagactaaaacgaagcaccatgaacaatgaccccgctagacatctaagtgagggtcaaccaagtccgtatcatttctactctccactattatcatatgagtcacactataatttacacactcgatgggtgcgcatgtaataattggatattgtaggaggatagaattaaagatcgtgatgacaagctgtctaggatatacagagcaaagaccgtctcttccatgactgtgatgcagcgagtagatagagcataaagatcatgttgcaaaaagaatacggtcaaaggtccggttacagataaacaggatctcaaggtatagaaattttttttagtgcacgaaacaatgagagagtctgccacgtgaacttctttgaacacagacacgtcatccagccgatttgtcaatcttttccccacctttcctgcctttttatttctcatagctgccattgtcatcctggcccgatatcaatgagctgttgggctcacctcccagtcggggtggtggccggtcagaggggctcctcgtaaggagggacttcgaggccgtggcctgccctagaggggtgaagtgtgtgctgagtcgaaaatgaaatcttaaaaacaattccattgacagtagcatcaaataacataaaatagttcagaatagccaggtgtgatggcccgtgcctgtagtcccagctactctggatggctgaggtaggaggattgcttgagtccaggtggatcccttgagcccaagagttcaaggctgtagcacactataattgtgcctgtgaatagccactgcactccagcttgggcaacatagtgagactccgtctgtaaaataaaatgaaacaaaactaaaatactgctgagagaaattatagacctaagtaaatgaaaaggcataccatgcttatggattagaagactcaatattgttaagatgtcacttctccccaagtttatctgtaggttcaatgcaatcttgatcaaaatccccataaactttttttgggggaaggaaggggtaattgacaagttgattcttatttcatatggaaatgcacagggattcaaggttgcagtgacccctgtttgcaccactgcactccagcctgggagacagagtgagaccttgtctcaaaaaagaaattwaaaaaaaaaaaaaaaaaaggaatgcaaagaatctcaaatagctaatatcttcacagtgaaaaacaaatttggagaacttagtagtacttgattttgagacttagttgaaatctaaagtaacctagagacaatggtattgtcaaagtagtaggaagtagaatataacaagagtcagaaatagacacayatacattcaatggacttggtttttttacaaaggtcccaaggctatccaatgccaaaaggaaaagttttcaacaaacggtgctgaaacaattagaaatatggaaaaagtgaacctggaccccccatctcacgccacaacaaaattattttgagatagtaatagacccagaagtaaaggctaaaaatataaatctaaaaggaaacaatattttcatgaccttggggtaggcaaagatttattaaagaggacacaaaaaacaacaaacagaagaaaaacctgaaaattgcatcaatataagtgtctgctcctcaaaagacacctttaagaaaatgaaatggtaagccacagactggaagaagatatttcgaatacatatatttaacaattttgtatcctgaataaataactcctgtaaatccataaaccaaaaaactccaaagtcaggcaaaagattggagcagatgcttcacaaaagatatatgaatgacccagtaagcacatgcraatgtgcccaccattaattatatgggaaattaaaattaaaaccacaataatataccatttcacaccgaccaagatggaagttaaaattaaaaaaaaaaaagaaaggctgaccaatgtgtctatctactggagctctcctactgcgggtgggaatgtaaactrgatgtaatcagtcattttggacaacaggtggcggtttcctataaagctaaacatagacttaccctggcacccagccgacgtgggagaactgggtacacaggtgtacactttacaaaactcatcgaattgcacactcagattgtgtgcattttactgtgtctaaacgttagcgctataaaagcaaaacaaaatataagatcataaaaataaaagcaattcctaggggtcctctccgttcccgggcttcctcggtgcggagggaaacgaaactagcccgaggcaaaacagcctccgcgaaccccgcccgccgctagttgcactttcgattttccctttagttattaaagttcctatgcagctccgcctcgcgtccggcctcakttcctcggaaaatccctgctttccccgctcgccacgccctcctsctacccggctttaaagctagtgaggcacagcctgcggggaacgtagctagctgcaagcagaggccggcatgaccaccgagcagcgaygcagcctgcaagccttccaggattatatccggaagaccctggaccctacctacatcctgagctacatggccccctggtttagggagggtgagtgtctccagcggcgccttctcggcggaaaacaattgaggacttgtttktctcttgcttcgttcccttcttttaatcaatgcagakagcctgccagactccccaggtttgtggtaagatctccgcagcattttaggctasaggttgccagagtttgaggagccctcggaggyctaggtggggaaactgagttccagcgaggtgaagtgacttgcttaagggtgctcatctatttaggttcaaagctggggaagaaattttctgtttcatttattttcactaatattaaagtctactgtgtgcttggctgggtactgacagagattgagaaataagataagggctcttccttagtatacattacagtccaagggatgggacacaaagggcagataattacagtactgagcacaaagtgcggtctgagcttaaaggaagttgatgcttactctgccgaatcttatttgcacgcctaaagaagtggaagctggagaggagccggacttttccagaccgaatagctttaggctttaatacaggtgtttccatctaacttcggagacaggtgatcctgggtaatgaccattttgtaaatttgtatcgaattactttgtgctggagatgagcagaggcttctgggaaagaggtgaaaggaggtggtacttaaaagatatcgatgaggccgggcgtggtccctcacgctgtaatcccagctgtagagcacccgatgctgttgctgttcggggtgccactatgtaacccgcacggacctaggggactgaacaaagaggggcgaacgcgggaataaaagacaagagacaaaagagtatatctggaagaaggggtcagggggcaccttgcctctagtggacaagggccctgagctttacacagcccttcttattaggcaaaagagatagcgagaaggggaggtgcttgttggctggctgcttgattcacagcaggcttgcaagactgcattctttgaacaataggtgctagatttctcaataaataatttcaaggagcctggcgccagggagtgaggcgctcagcaaaccatttggtggcaaggcagtgtgagtttgcccaggtgctgcattcatgataaaacagtttgctgtttgatcatatagcctccagcggaatgctgagttggtcacatcccaagggccttcggctccctgcagccagcactttgggaggcctaggcgggtggatcacaaggtcaggagttcgagaccagcttggccaatatggtgaaaccccgtctctaccgaaaaatacaaaattagccaggcgtagtggtgcactcctgtagtcccagctactcaggaggctgaggaatgaaaatcgcttgaaccagggaggcagaggttatggtgagatcgcaccactgcactcagcctgggtgacatcgtgagactcttgtctccaaaaaaaaaaaaaaaaaaaaaaaaaaaaccgaaaaacaaaaaaaagtcgatgagagggggcctgggaatcctaaaagtctccaagtgccagtctttcctgatgttattgcagtttttggaaatggcgttaagaccggcaactaacttgaatgctaattgctctacaaaactaaaagaaaggttgtggaatggcattctagtgaccagtgtagcttggcacctgaagaagtacttggaagaaacactaacaactggtgtgaattccattttttcatgcactcatatattgatttgatacactttgatggaataaaataagcaactcgtgtcagtattatgttagcattggaggtaatttactcagcacctattacctaatagtgtcattgaaagttgaggaagcaatgatgagcacagtagaaactgtccctgccctaatagtgattagtgtgtstatgtgaatgcaggtaacaaaatagtaaataataaagtgcagcagtgctttgatggaaaaaagctgggatgtctactagagtccaaagggcacagccaaagcttyccagatatttggcatttgaactgaggtctaaagaaagaggaaaaattagctggaaggagacaataaattgcagttagagggctccttatgtgcaaaggtccaaggtgaaagagaaactagagtgttccaggtatccagaaaatattagtatggtggcattgtggagagagaggcaggagttcagagagatgaaacttgacaggcaagcagaagtgggatatgaacagttttggactttatccactgaaatgtgataaggagaggggaccaaaatagaatttgcattgtagaaaaacgactttgacttcagtttgaggaatggcttgaataggtacaagacagggagagagagaatggcagatgcaatgatgccaggacagcagagtggaaaaactggaagcaaggataccagttaggaaaataggaatccggaggaatggggagaaatggatggattcaagacacatttggaaagtataatcaataggtctcttggggagttgtggtgaggaggtaagggtgaggacagggtggaaatgacttccaggtctctggctttggtccttgggtgaataaatggtagtttctgagataggaaatgtgggaagagggacaggtttgcaggaggaggagaaaaattcggatttaggtatgctgggtttgtatgccttggatacatccatgaagagatgttcatcagattgttggctgcacaggtgtggagttcaggaaaagggtccacagttggggagacattaatgtggagatccttgctgaaacaatgagagtgggtgcaattgttactgaaacaccagggattcagcctaggttcttttgctggctgcacataaagccaatcactgagacaacaagttttgccaaggctttaattgggagctgcagcaaaggaggtaggagatcagtctcaaatccatctccctgacccgttgaaattaggggtatggatagaaggaaagaaatataactaggtgttggaaaatggactctggaggggtaaggaagcaatcatgataaatgaggggcctggtgtctcattgtctggatgtgatggtctgatgagtttcagttcttttataccttttgagaggcctgggggtccttttcctggggaaggaactcagataaaacaaatataagtttcagctttaagatcaggagggtcaatttccatgtttattcgaaagaattgtatatgggactattgtgttggtttcagtccccctctttctatttatcaattcctggatcatggggaatctgatcctcaatctttctggcagcttcatgctgaggaatggcgtggtgggcagttccatactatgggtgaccacgtggccatccaggaatcaaaagttaatctaatactatagttttcttctgagacacaatctgtatcattactgttccccgcttccaccaaagacatatcacagctggatgggcctacctgcaaaataagcctcagttacatatacttggcttatttacccacacaaagtgcagcaaaaattattgtccatatgggctctcctaattggctttgctggaacctctcacaaggccatttcagtcaaagccctgggaaaataacttgttcctccaactgtgtccccttataaaagaaaacagatttttattaaatgtatgcaagaaaacacattgccatgaactaagaatattcacaaatagtttataaattctggagaaattagggagagagaaaatgcctcaaattctgtttaaaagggtatactctacttaatatactgtattcttaaaggttatgaagagcttaaaagaaaaaattctccagattccaaaaaacaaaaattctccagactttttcaaacaaaaccataaaaaattatttcagtcccacattagttcagtccatgcaatcaactcctgctgtgyttcatattgggttagtaatctttataaacatgtcagccttttaattaagagggactctaattaagagtcctagaagttttctgtattccagtggcacagtctccaaagttatcagaaatctgcattcaagactccttttcatgaagtcccctaaataaacaagctctggactatrtctgattataagtcactttttgaaaagaatcaatgcaaaacaacaattgcaatgacaaaagtcttaggagagccataaagacacagttgacaaggaaatttttttttctgttggcatacaacaatttaacataataatcatcattactgacaccatatattaagacatatcagaattttaggaatctcatatagtcctgcaacacatattaatagcacatctatacaaatataacccaaaggaagttaaataccacctcacatttgataatgctgcctgtataattctaatataccaaagaagcctaacatgtctgtctgtattggaattcaaggaagctaatacacaaaaaagttagtttgaggttaaaaaaaaccccctgaatttagaacttgaaatatttgctgttgggaagtctgtcagtatcaaagatttaagacacttgatatcacaaaataggatcacaggtcgctacaaaatagttattcatttagccaaaaagataaaacaaacacatttaccctttgataggcgactcagtttcccaacaataaggcctaataaagacagcatgaggccaactaaatgtctctccctcttccttttcttccccccacagttcactcaaaaggtaaacaaatattttatgtcaatattatacaaacattttattcaaaagagaacatcaaattttacctttgtatggtatatttttaatgttaaagctaattttaataaaaccttatrarccgaattttaatcagtttgactataagataggatttctgtgaagtttttttttttttttttttttttttttttttttgagatggtgtctggctctgttgcccaggctacagtggtgcgatcttggctcactgcaacctctgcctcctgggttcaagcaattctcctgcctcaacctccctagtagctgggattacaggccatgccaccacacttggctaatttttgtatttttagtagagacggggtttcaccatgttggccaggctggtctccaactcgtggcctcagctgatccgcctgcctcggcctcccaaagtgctgggattacaggcgtgaghcaccasacccggcctgagycaccacacccagccatctttttataacgttttacgatttcctattaaagagtagagtaatgctccaagaaaaccctgttatgacacaggggcccagacattggccttgcatcagtgtgcttttgatgttaatgtttaatttatagaaaaaccctgaactaattttataactcaaaatcagcccttacaagctcacgtgctcaccttttstgcaatagttcctgggcgtagagggattgaatggttttaatttctagccctatgtctcatgaaagcagttcattttgattgtcaccttctcctgagtctgaagacgaggcttcatttggtgtcagtgctcaagatttagcaggtattggtgtcttttttggatccaggagtcaaaggcctttgaattactaaataattgtttcctaagaattatttaatagcatatttatactgcaggaaacctcatcattctctctaatatgtcacaaaataaaaccctgggatttggtgcctagtagttactgtctgaaacacttcaacccattatacaatccattgtattaaagtggttaggttactccttgcatttatctgctagcattctagtgacaaaactgtgacctagagcctcaaaaatgtggtaagtcctgtgccaaacttaccaaagtaagatagttaacttttctttccatcattaaaaaaaaaaatggtaaatgcaagtatcagttttggaaattcaatatgaagataaatctttcatttaaaaagtatacaacaaaacaaggacaaagtgacaataagcacacagtaatttcttttcagctattttgaaagagcctcatcatacatttccaagattggtttctagataaagtactgacaactgatttaagtgacttacaccactagaatcttcaaactggcataacacttgtatgtacatattttgttttcaagtatacatgtgaaggcccatcagtgataaatggcttaggataaaaaaaacactagaaagtcttataattttttttatgacttaatccaagtaaatgttatttaatcttaataatagtaaacacaactaaattagtttgagagaaagcccaatcaatataatttccttaaagacaaagccaatttttttctgaatattaagactttgtacccatatagcagttttgcctcattaaaggaaaagatctgaaacygctattgtttattgaattgaattaccttggaaataaacaccacttaaacatttctctcacctacttttccaaataaccaataataatgtactatttctgttcagaacttagaagaataaaccttttattattttttgccaggaatcttaaagttcttatagctctctagttcattagaggtaagcaaaaccaaacaaattttaaaggctggtgtccaccaacaatttttggaagcttgaaaaaggtagcttaggaactttggataagtagagcaaatgatgagatactggaaatgcataggaaacaaaatgattattcatggaaccaaataaaagccttccttacattagaaactaaaagccatcaatggttttattaatatgtatatataagtaaaacctaaagaagaagaaacagcaaataaatgcaaattaaaagaaaaaacaaacaggaaaccaacctgaaacttttctactcagtttaacttggaggctatagtgttacccagagccaaaaaaacacatgatgaatattttgttcctgatgcacaatttaatgtctttaagttcaccaataccactatatattttgtgcarttaagaaattcactttaggctgggcgtggtggctcaggcctgtaatctcagcactttgggaggccaagatgggtgaatcacttgaggccaggagtttgagaccagcctggccaacatggtaaaaccccatctctactaaaaatacaaaaattggccaggcatgatggcacacaactataatcccagctactctggaggaggccgaccagtaagtattatactgtaatgatagtatatctatgcagaagagcaaatacagtgtgaagcaatgcaagcatgtaggtgaaatttggttgttgctatatctggcttttatctggcttcatggttaactatattaagaaaggattgccaaactgccaatgtgtttctttacaatatttcttattttactttcatcaagactaagagctttaactatgagcagtgttaattagccagatttctccaatattctatctggttttaagagaatattatttaagccttttatactttgtattttctctgtctgtacataaaggtagacacacaaagaaataggaaagaaactacatgacttacacacaccatctatgatatgcttagactttctgatttgtcctggattttcgttctttttcttcttctttttttttttttaaacagtcattttactttagracaaaaaaaataccattataagatgctttgtcatacaaaattattttctttataaccttccttaccaaaaatacatctttatactcataactttctccacatctctctcgtctacttgttcttttctaccttgtttcataagtaacctttcaagtccataattattaataaactttagataacttctgagttagataaaatttttttctgaataaaaacacattgtcttttgcacattttatayatagaattacatatgaactagaattcttatccttagtaacaaccttaaatttcagtaaaaacctaggaagcaagaaatcttgagctgcctagcagatattagtattttatagatgagaaccattccacaatttttagaaacatgttccccacatcataaccttttcttaattggaaatgactcaaacatccaatgattatatttccgattatgccaaaagttcatttacagcatttgaccatttacattttatttatttttagcagtttatctagattatttctgcatcatttccttcttaaccattttataacctgtgaatgtcaggtgttcacctaaataaccttaaaattaatacgtgggcattttgatcaataactcagaagattcagctgttttcattaaactaacagcattaaattagtcttataaagaattcacacaaatattcactgggtttatagctttataacctgctgccaaactctgatacctcaaattatctagctgagacaaatataaagccgagacaaaaatgtatgctgacaattctgaagacatttctayttttattttaccaataattttaaagacagcttgtttattaaagatttactgaagtcatgtgaacttgaaaaacactttggacttaatttatgagcactcttatttataagccaatttggtaggtatagtgtataacatagttaatgtacatctagataaacacatctaaacatgtatacacacacaaagatccaacagcttttaccttggaactctagccatgagatagcaatacaaactcacgaatctacaaccaagtccacatggctaaaatttgtttgctccaatcggtaatccaatgaaggctgtgaaccagaattttgggtaaagcagtttccatggcagtttgatttttagaagctagattccaaagaamcctggggccaaacrgcactacagaagaacgtcatgtggaaactactcaccaggcccaaccctgcttaaaacagcggcataaaagccagaatacatgggactccacctggctttcccattcaacagccaactccagattccaaagaatattggggcaaacgtagtacaaaagaatatttgtttgttgaattctaatttcccattactatattgacacatacaatcamcaaaacacaatccgactgctgaagcaatagacaagcccgaacagtgtccaaactgaaacagtcgaggtgcttttctctctcaatygggctttattaacctgcaaacagaaatttcttaggaattttccaaattgagagaagccgatcccactgtctggtacccaaaaaagacactaacttggccagacacaaacacagaaattacaaacacgctctctagagtatcatactgagagtcagggtgcttccctttcttagtcagttgggctggtttaacctgcaaatggaagctccttttaaaattttcaaattgagcagatcttgctgtctgggccaagaaaggacactcacttayccagatgccagtgtcacatttcaaaggctgttcttcctagcaatcaggaactcagctggggctggcagcagcagggccagagagaccaaaactcacttccagccaaaattgggtgggcagttgcttaggagggcttctgagactcctagaccacagcaacccagccacaaaaatctgttactgaagcaccaggggtttggcctaggtcctcctggtagccacacagaaagccaaacagggagacaacaagtattgccagggaagaagcctttaattgggagctgtagccaagaagatgagagattagtctcaactccatctccstgacccactaaaattaggggtttatatagcagggaagaaatgtaactgtgtgggaaaacaggaactcaggaagcaatcatgatgaatgaggggcctggcctcattgtctggatgtgataatctggtgaatttcagtttgatactttttgagaggcctggtggtcttttgcctgagaaaggatctcagataaaacaagtgtaagcttcaagtttaaagaccagaagggtcaatttctgtttttctggaataaatgtctgtgggactgtggtcagtttcaagattgctttttggagtgtgagtagaaagagcctgggacggaatcctgtgcaagcactcatttaagagatgagcagaggaggaaaagagactgggaaagagtgccacatatgtgggcaaggaggcatcacggaaaccaagggagaatgatgtggtggataacatggctgaatgatgctgagaacccaaggtctgtcagaactaaaaaaacgttcccttactttggcattattgacttttggggccacccacaggactagtttctgtggaatagggatgaaggtaaaggtataagatggttgggaaactaactgcaagagtagactcaggaataaatagagggcaaggaagtggagaagataaatgtaggcagttcttttgaaaatatgattcacaaatgaaaaattacaagggaggtagtgcttaatagtatcttcacacaaatccagtctatacaatttggttacactgtgggttccaagaaaggagagagaagacagaagcaaagataaatggaaaaaatagaaaattttacttgtctgagaaagaaacagcactttgcatgtgagtttattgagaagggaatacattagtaggattttcatatttctcagatgaagaaataatcatgtaaacattcaggaaaaacaaacatgtgtggcttttttttttttttttttgagacagagtcctgctctgtcacccaggctggagtgcagtggtctgatctcggctcactgcaacatccacttctgggttcaagtgagatggggtttcaccatgttggtcaggctggtctcgaactcctggccttgtgrtccgcacgccttggcctctcaaagtgctaggattacaggcgtgagccaccatgcctggccacaaataagattactcaggtttcctctaacggaatcaacatcaagttggtctctgacttctctgcaactctaatgtaactaaagagtaaaactctgtgcagcatttaaaaggtaaaacaaagttgcccctattttatatttagccaggtatttatgtatgtaagcaagaagaaaacattattatatatgtggggtctcatatatatttcttacagaaattactggaaatgtgattccaaacaatgggaactgaaaaaaattagcttaaaaaaaggagttcttgtaatgcaaggattggtcgtgaatgttgaaactaggcatgtagagttgattttaaataattttataaatttgtccacaaaggtaagtgcaatagtcaagcatttcttttttaaattatactttaagttctgggacacatgtgcagaacgtgcaggtttgttacataggtatacacgtgccatggtggtttgctgcacccatcaaaccatcatctccattaggtatttcttctaatgctatccctcccctatcctcccagcccccaacaggccccagtgtgtgatgttcccctccctgtgtccatgtgttcttactgttcaactcccacttatgagtgagaacatacggtgttaggttttctgttcctgtgttagtttgctgagaatgatggtttcyagcttcatccatgaccctgcaaaggacatgaactcattcttttttatggctgcgtagtattccatggtgtatatgtgccatattttctttatccagtttatcattgatgggcatttgggttggttccaagtctttgctattgtgaacaatgccgcaagacacatacatgtgcatgtgtctttataggagaatgatttacaatagtttggtatatacccagtaatgggattgctgggtcaaaggatatctctggttctagatccttgaggaatcacccacactgtcttccacaatggttgaactaatttacactcccaccaaaagtgtaaaagcgttcctgtttctccacatcctctccagcatctgttgtttcctgactttttaatgattgccattataactggcatgagatggtatctcattgtggttttgatttgcatttctstaatgaccagtgatgatgagcattttttcatatgtttgttcgtggtataaatgtcttcatttgagaaatgtctgctcatatcctgcacccactttttgatggggttgtttctttcttttaaatttgtttaagttccttgtagattctggatattagccctttgtcagatggatagattgcaaaaattttctctcattctgtagtttgcctgttcattctgatgatagtttctttagctgtgcagaagctctttagtttaattagattctatttgccaattttgatttttgttgccattgcttttggtgttttagtcatgaagtctttgcccgtgcctatgtcctgaatggtattgcctaggttttcttctagggactttatggttttaggtcttacatttaagtctttaatccatcttgagttaatttttgtctaaggtgtaaggaagtggtccagtttcagttttctgtatatggctagtcagttttcccaacaacatttattaaatagggaatccttttcccattgcttctttttgtcagggttgtcaaagaccatatggttgtagatgtgtggcattatttctgatgactgttctgttccattggtctatatatctgataatctgttttggtagcagtaccatgctcttttgattactgtagccttgtagtatagtttgaagtcaggtagcatgatgccttcagctttgttcttttttgcttaggattgtcttggctatgtgggctcttttttggttccatatgaactttaaagtagttttttccaattctgtgaagaaagtcattggtagcttgatggggatggcattgaatctataaattaccttgggcagtatggccattttcacgatattgattcttcctacccatgagcatggaatgttcttccatttgtttgtatcctcttttatttcattgagcagtggtttgtagttctccttgaagaggtccttcacatcccttgtaagttggattcctaggtattttattctttttgtagtaattgtgaatgggagttcactcatgatttggctctctgtttgtctgttgttggtgtataggaatgcttgtgatttttgcacattgattttgtatcctgagactttgctgaagttgcttatcagcttaaggagattttgggctgagatgatggggttttctagatatacaatcatgtcatctgcaaacagggacaattggactttctgttttcctaattgaataccctttatttctttctcttgcctaattgctctggccagaacttccaacagtatgttgaataggagtggggagagagggcatctttgtcttgtgctggttttcaaaggaaatgcttccaacttttgcccattcagtatgatattggctgtgggtttgtcataaatagctctttattattctgagatacattccatcaatacctagtttattgagagtttttagcatgaagggctgttgaattttatcaacggcgttttctgcatctattgagataatcatgtggtttttgtcattagttctgtttatgtgatggattacatttattgatttgtatatgttgaaccagccttgtatcccagggatgaagcagacctgattatggtgaataagctttttgatatgctgctggattcagtttgccagtattttattgaggatttttgcatcaatgttcatcaggratattggcctgaaattttcttttttggttttgcctctgccaggttttggtatcagggtgatgttggcctcataaaatgagttagggaggagtccctctttttctattgttgggaatagtttcagaaggaatggtataagctcctctttgtacctctggtagaattcagctgtgaatccatctggtcctgggctttttttggttggtaggccattactgccacaacttgttattggtctcttcagggatttgacttcttcctggtttagtcttggagggtatatgtgtctaggaatttatccatttcttctagattttctagtgtatttgtgtagaggtgtttatagtattctgtgatggtagtttgtatttctgtgggatcactggtgacatcccctttattatttttattgtatctatttgagtcatctctctcttcttctttattaaactggcttgtggtctatatatttgttaatcttttcaaaaaaccagctcctggattcactgatttttttgaagggttttctgtgtctctatctccttcagttctgctctgatcttagttatttcttgtcttttgctagcttttgaatttgtttgctcttgcttctctggttcttttaattgtgatattatgatgttgattttagatctttccctctttctcctgtgggcatttagtgctataaatttccatctacacactgctttaaatgtgtcccagagattctggtacgttgtgtctttgttctcattggtttcaaagawcttatttatttctgccttcatttcatatttaccctgtagtcattcaggagcaggttgttcagtttccatgtagttgtgcagttttgagtgagtttcttaatcctcagttctaatttgattgcactgtgttctgacagactgttatgatttccgttcttttgcatttgctgaggagtgttttatttcctattatgtggtcaattttagaataagtatgatgtggtgctgagaagaatgtatattctattcatctggggtggagagttctgtagatgtctactaggtcagctttgtccagagctgagttcaagtcctgaatattcttgttaattttctgttttgttgatctattattgacagtggggtgttaaagtctcccactattattgtgtgggagtstaagtctctttgtaggtctgtaagaacttgctttatgaatctgggtattcctgtattgggtgcatatgtatttagcatagttagctcttcttgttgcattgatccctttactattatataatgcccttctttctcttttttgatctttgttggtttaaaatctgttttatcagagactgggattgcaacccctgctttttttttttctttccatttgcttggtaaatcttcctccatccctgtattttgagcctatgtgtgtctttacatgtgagatgggtytcctgaatacagcacaccaatgggtcttgactctttatccaatttgccagtctgtgtcttttaattggggcatttagcccattcacacttaaggttaatattgttatgtgtgaatttgatcctgtcattatgatgctagctggttattttgcctgttagttgatgcagtttcttcatagtgtcgatggtctttacaatttggtatgtttttgcagtggctggtaccagttttcctttccatatttagtgcttccttcaggagctcttgtaaggcaggcctggtggtgacaaaatctctcagcatttgcttgtctgtaaaggattttatttcttctttgcttataaatcttagtttggctgtatatgaaattctgggttgaaaattcttgtctttaagaatgttgaatattggcccccactctattctggcttgtagggtttctacagagagatctgctgttagtctgatgggcttccctttgtgagtaactcaacctttctctctggctgcacctaacatttttcctccatttcaaccttggtgaatctgatgattatgtgtcttggggttgttcttctcgaggagtatctttgtggtgttctctgtatttcctgaatttgaatgttggcctgtattgctaggttggggacgttctcctggataacatcctgacgagagttttccaacttggttccattctccccgtcactttcgggtacaccaatcaaacataggtttggtcttttcacatagtcccatatttcttggaagctttgttcattccttttcattctttttttctctaatcttgtcttcatgctttatttcattaaattcatcttcaatctctgatatcctttcttctgcttgattgattcagctattgatagttgtgtatgcttcacaaagttctcgtgctgtgttttttggctacatcaggtcattcaggtccttctctaaactggttattctagttgtcactcctctaaccttttttcaaggtttgtagcttccttgcattgggttagaacatgctcctttagctcagaggagtttcttattacccaccttctgaagcctacttctgtcaatttgtcaaactcattctccgtccagttttgttccgttgctggcaaggagttgtgatcctttggaggagaagaggatcacattttttttctgcctttttgcactggcgtttcctcatcttcatggatttatctgccyttggtctttsatgttggtgaccttcagatgagttatctgtgtggatgtccttttcgttgatattgatgatattcctgtttgttagttttccttctaacaggcccctcagctgcaggtctgctggagtttgctggatgtccactccagaccctgtttgcctgggtatcaccagtggaggctgcagaacagcaaagattgctgcctgttccttcctttggaagcttcctcccagaggggcacctgccagatgccagctggagctctcctgtatgaggtgtctgttgaccctggtaggaggtgtctccccaccaggaggcacaggtatcagggacccacttaaggaggcagtctgtccgttagcagagctcaagcactgtgctgggagatctgttgctctcttcagagccagcaggcagcaacatttaagtctgctgaagctgcgcccacagctgcccttttccccaggtgccctctcccagggaaatgggagttttatctgtaagcccctgagtggggctgctggctttttttcagagatgccctgcctagagtgaggaatctagagaggcagtctagctatagtggctttgccaagctgcagtagggtctacccagtttgaacttcctggtggctttgtttacactgtgaggggaatagggcctactcaagcctcagtaattgtggatgcccctcccccaaccaagcttgagcatcccaggtcaacttcagattgttgtgctggcagcgagaatttcaagctagtggattttagcttgctgggctctgtaggggtgggatttgctgtgctagaccacttggctccctggcttcagccccctttccaggagagtgaatggttctgtcttgctggcattccaggtgtcactgaggtatgaaaaaaaaaactgcagctagctcagtgtctgcccaaatggccacccagatttgtgcttgaaacccagatccctggtggcataggcaccggagggaatctcctggtctgctggttgcgaagacttgsggggaaaagcatagtatctgggccagggtgcactgttcctcatggcacagtccctcatggcttcccttggctaggggagggagttcccagaccccttgtgcttcccaggtgaggtgacaccctaccctgcttcagctcgctgtctgtgggctgcacccactgtctatccagtcccagtgaggtgaaccgggtacctctgttggaaatgcagaaatcacccgccttctgtgttgatctctctgtgagctgcagaccggagctgttccttttttggccatcttgccctggttcctagtcaagcattttttaagagaggattttcatatagtaaaaaaaaaaaaaaaaaaattaagtaaatactttggtttaaaattttagattgagtctgttaggagctagggaaaattatgataaataagagttaaatcccttgcctcaaaagggggagacttaaaatattaccattttccacttgcttctgtagttttaaaaagctatatgaatggttacagataatgataccatttaaatgaggttttatatgttttgttgttcttgagaggagaaaagaaactagtaatttaagctaaccagaaaatataggraagggaaawataaacaagataacacaaggaaaactagttatatcagctatggccatgtaattaggtcaaacatcttttaaataggtgtgaatgagtcagaaagcagaatccaggttttggtcatctgccagagacccatgtaaagtctaataacataaaaaataaaaatgggggccagacttggcagctcatgcctgtaattccagcactttgggaacctgaggtgggaggattgcttgagccccgaaaattgagcctatggtgagctatgatcatgctactgtacttctgcttgggcaatggaacaagaccctgtctcataaataataaataaataraaaagagataaagaagggacaaatatatattaaataaatgcatacgtaaagaaagcaagaattatacttaaattgcactagtggaaagtattaagataaaatgataaaggtattgagatatcagtgaagatttggtacacataaatctttgtttattaaatattagaaaacgtcaagaaatatgggaattataagatatctttattagtactgctaagtcagataaatgataataaaagcataaatgatctgtttaataaggttgatttaatgtctatgttttccattttgtatcatatagcaaatatatccttctcctccaattcttaaaaagctttgccaaagtgatcctatatgagttacagataaatatttaataaattcccaaagcataacttttatgagttttattttcaaatttgtaggctctgtgatactgggcaaatgtcttaactctcgtatgcctcagtttcctcatttgtaaaatcagaataaaaaccatgtttgggtgttttggaaattaaactgcatggtattaaattactgttagctattattctatatcccagaaattaatcataggtttaaaaaaattttcacagaatttcaaaatagcatccttttgagtaactyctagcagaatgagaaaatctaaacaagtatagctactttcaaaagtaagcacggcaatcagccaacatattatatattttaagatgtaataagcttttaatcagaatttatagcctaaatggatttattggtatttcaaaagaatgaacacttatgaattaattaatttgactgaagtaattgcaaaaagaacagccagttaactccaaagaaagcaaactggccaaaataaagaacaaaaacaaaattcccccaaattactggaactaacagagttcattcagtcttgttgcaatagataygtaaaataaaataaaaacggaggccacgcatttttatctactggaaaacaagtgagattatactggaaaaacagtattttcatatactggaaaaacraaccagattatataacatttccctaaatgcataaaagattcttacaaatccaatttagaaaaaaatatgaatgacctctcaaaactagctgtgagacatgaacaggaaatgtattaagaaataaccaaaacaaaagacactggccaaaggtggaagaaatcccacaagaaatcattaaaaacagtgaagtttgtttgtttggtctgtttttgtctctcagttttgcaaaggttatgaagattgagcaaattcagtgctatggagggaaatatcattcatacactatcgatggagggttagtacagtttggaaggtagttggggaaaatgtattaacattcattccttccttcattgattcatttattcatttatggattgattgattgattgattgagacagagtctcactctgttgcctatgctggagtgcagtggcgcaatctcagctcactgcaatctccacctcccaggtttaagtgattttcctacctcagcctcctgagtagctgggattaygggtgcaagccaccacgcctggctaatttttctatttttagaagagatgggggtttcaccatgttggccaggatggtcttgaactcctgacctcaagtgatccgcctgccttggcctcccaaagtgctgggattacaggcatgagccaccgcgcctggcctccacatttaaaagcatatactgttaaactgaggaattatacttctgagaacttattccagggaaaagttggtaaagcaggtaaagacatagatgggtgtgtactaaacgcattttagtttcgtgttaaaggaatacattaaattatactacatttatgtgacataaaactatgcagccactaaaagttgatgtaggtacatatttattaataggaaacaacacctgtaatccactgagtggaaaagagcagatttgttaaatcttacttatttaaaactatatatttatacacataattagatatgtagaaggatggtttctagaggatattacgtgtgattgaagatagtcatacatttaacaaaaaaaatgctgaaatgatatgaagaaaactatgaagtccctgaagagaaatctgtctctgatttgagtgaggaagagacagcctatgtttstgcctggggactrtaggtttgtaaacatgtcaattctccctatgctaatttatagagtacaatcacaataaaaataccggaaagtaagttaaaagaaaaagcacsctgaagaacttcttaatttttaatgtgaaagatacccttgaggtcttcttttgattccctctgcagaggcaaccattgttatgaagttgatttacatttttcttatttatgcctttttactttataatgtgcatctctgtccacataccttttgggttcaactcctttttctattttctattagattgataaagtttttctctattccctatttttttctaggctgctttggaggctctggattcattggttaactttaattgtgacatatatattgtatctattatatatttaatatataaaatatataatatataaaattatatattatatatctattgtatataatgatatatatttaaacatatatattatatataaaatatatatgatatataatatagaataaatatatatatgtttaaatatatattatatctatatataatagatataatatatacttttatatattatatattttatgtattaaatatattttatatattttatgtattaaatatattttatatattttatgtattaaatatattttatatattttatgtattaaatatattttatatattttatgtattaaatatattttatatattttatgtattaaatatattttatatattttatatatattaaatgtataatatatatatatatgtttttgagacagccttgctctgttgcctgggctggagtgcagtggtgggatctcagctctcagctcactgcagcctccatctctggggttcaagcgattctcctgcctcagcctcccgagtagctgggattataggcactggccaccatgcccggctaatttttgtatttttagtagagacagggtttcaccatgttggccaggctagtctcgaactcctggactcaagtgatccacccaccttggcctcccaaagtgctgggattacaggcgtgagccactgtgccgggctgtgacaactatactttatcagtgaggattcagtcagggaccagagacactaatgagtgttatggctggatataaaacytttgactcatatttttttgccatccgtggaaagcaaagggagcttatccacattcccccygtgcccacatccagcatctcgtttactctaaccctctctgcaatcagatattgtgattattgacgctagtaacgtcttggaaaaggagcactgaagccatgtttctcctggagaacttgcatggtaccctggaagctgcagcacttttctcactcacaggttgtccaggatgtttcaaggcagacctgggtgtgtgtgtgtgtgtgtgtgtgtgtgtgtttggagtcttgctctattacccaggctggagtggagtggcatgatctcggctcatggcaacttctgtctccctggttcaagtgattctcctgcctcagcctcccgagtagctgggattataggcaccagccaccgcgcctggctaatttgtgtatttttagtagagacggggtttcaccatgttggccaggctggtcttgaactcctgacctcaagtgatccacccaccttggcctcccaaagtggtgggattagaggtgtgagccactgtgcccagctgcagattttttatagtattttggagtcaaaggccaaccatgattctggaggggcaccaggtgggcagtattctgagtatccattcctttggtagcactttctggacacatgcgtgagccaggtactgtgctgatgatcacaagacaaatgttccaagtcacagtttcaggtggaagacaggcccacatttactatatactatgcagtgtaagtactttagtcagtagtcaataaagagctttagtcagtaaggagactgagaaagcagagaagggatcaagaaattctaccttgagaagctgaggtttgacatcacartgggccccaggacagcaaaggcagtgggaaatactgtcaaagatgaagttttgtctgcattgttggtgcttttgaggaaattgtcactactctgtagcagcagatattggggccaggtagtagaaggatgggcctgaccacatgcaaagtaaatgtgaactgcccagcatactgcaaggcagtttatctgggaaggcggtagctgtggctgggataaatttgcatctccacgtggaatatctgtaatggctgttagcatgttgaaaggaagctcaagcagcagggaggcctgggaacaaaagtacagctgtaaggaatgggcttaggaacagaatgaactgactcaatggaatacggtaggattgtgggtccagggaagctgggataggtgacaagataggttgctgttatgrgttgaattgtgtccccctacccaaaatatatgttaaagtcctaaaccccagtacttcagaatgtgatttattgggagactgtktctttacagaggtaattagttacgatgaggtcatactagagtagggcaggcccctagttcaatatgactggtgtccctctaagaaaacagccatgtgaagacatagagacaacgagaatgctgtgtgaaaacataggcagagattggagtgatgtggccacaagccagagaaacagaaggcaaagttggagggagtgttgtcacaagccaaggaatgccagcagctaccagaaaccggaagggcaaggaatgcattctccccagagccttcagaggaagcatgactctgctaacaccatgattcacaattctggcctccaagaacagagagaataagcctctattgtttaaaccacctggtttgtcctaattcgttattgcagccacaggaaactaatacagaaggctaaaatgaaaaagatggtaagaagtactgtcaaggatgtgtggaaattggaatcctcttagattactggtgggaatgtaagatggtgcagctccttgggaaaatggtttgacaattccctataatgttaaaaatggagttaccataagaactagaaatctcacacctatgtgtgtactcaagagaaatgaatatatacatcgtcacataaaattgctcatgaatgttcatagcatgtctatttgtaataaccaaaatgtggacacaamtcaaatgcccactgatgagtggataaacaaaatgtggtgtatccatacagtgggatattatttggcaataaaaaggaatgaataataacgtgctacaacatggttaaaccttaaaaacattatgcaaagtaagaggccagacatagactatgtattgtatgattccattaatatgaaatgtgtaaaataggcaaatccatggagactcaatttgattagtgtttgcctggggctaaggagagggagagtagggaatgactgctaatggatataggttttctttttatagtgatgaaaatgtactaaaatagtagtcatggattcacagttccaaaaaccattgaattttattttttgaaagggttgattttattgttgtcaagacagagaccttggcagagatccttttaagtagagcaagattataaggcattccttcttctcttccttcattcattaaacatacctttgtttattgtctattacgtgctaggtcttcttctaatctatgagaatatagtggttcaccagcctgacaacttgcttactcccttggaatttgcattccatcaacaatgggaaagaaaacccagaaaattatcaagtatcaggtcataccatggtagcatttttattactactccctgggcatgaaattagtgtacaaagttagaatgaccaccagcaggttggtagataattttctcccaaaaggaccatgraagtatcccttacttccttccttctcctttctttgtcctatttcaagacaagttttcactctgttgtccaggctggagtgcagtgatgccaccatagcttacgggaaccttgaactccttggttcaagtgatcctcccacctcagcctccaaagtagctgagactacaggtgtgagccaccacacccaactaattaaaaaaatatttttttttttttttttttgtagaggctgggtgcagtggctcacacctgtaatcccagtactttgagaggctgagggaggaggatagtttgaggccaccatgacttctccctttttgcagggagatttttttacacatcttcaagaaactccttttctagaatgtgtgctcagacctccacaccaaactgtaggtttccagagaggatgggaagagtggcttggtgaagaatgggcacagtcggcctgggcagaggttttgctgcttctccaaagattcttccaatgctgtgacttggtacaattcctgtccctatttgggaaggtctggtgatccttttctggtttttcttctaatgattaatagttctgcagtttgatgagtcatttttgcttctgtttgtagaagaggtgcagtatattcaggctgagaaaaacaacaagggcccaatggaggctgccacactttttctcaagttcctgttggagctccaggaggaaggctggttccgtggctttttggatgccctagaccatgcaggttagttcattctttttaatcacaaatcagaggatattactttgctgcttgacaatactgtaaaagtgaaaagctattaaatttgaagtatccacttatagttcatgcctcttagtctgagacaatgtaaagactgtttttaggcagatgatataattgtctacctgaaacatccaacaaaagaatctgcagagagattattgtcactaatggaagagtttagcaagattatttggatataagaccagtatacaaaaattagttgcatttctgcccaatggaagcaaacaaaaaatgtaatccaaaatgaagtatcatttttaataataacaattgtaatgtatttaggaataaatctaacaaaagatgtataaggtctgaatggagaaaatgataaaatgttattaaaagatattaaagaagtcctaaatggaaaaacatacccatgcacatagagaaggaggcttgagatcataaaaatatcagttctccctacattgatctgtatattcaatataattctaataaaaatcctacatactttttcagtgagtgtggcaggttgattctacaatgtatatggaagaattacgacccaacaatagtcaagacacccctaaagaagacaaatttagtagattggggcttttctttctacaygttagcatttattagaaagctacaggcattgagacagtgaaatgttggttttggcattgacaaactgaccattgaaacagaatagagaccctctaattaggaccatatctttatggaaacctgatatattagacatcactgagaaaagaggattactgggaaaggaggagctattcaaaaaatagcatttataaacagaataatattaaaagccgaacaaactcaagctggacatggtggcgtgtgcctgtagtcccagcctctcaggaggctgaggcaggaggactgctagagtccaggagtttgaggctgcagtgagctatgatggcgctgctgcactccagcctgggcaacatagggagacccctgtatttaaaaaacaaaccctgggccgggtgtggtggctcacacctgtaatcccagcactttgggaggatgaggcaggcagattacctgacgtcaggagtttgagaacagcctggacaacttggcaaaaccctgtctttactaaaaatacaaaaattagccaggcgtggtggtgggcacctgtaatcccagctacccgggaggctgaggaaggagaattgcttgaacccaggaggcagaggttgcagtgagctgagattgcgccattgcactccagcttgggcaatgagtgaaactccttctcaaatttaaataaataaataaataaataaataaaccctgtatttaaaaaacaaacgctaacttttatgcccatgtgggtacgaataaataaatacatttgtattccttacatcatgtttatcaaaaacactataaagaaagcaaaaaaaaaaaaaaaaaaaaacaaatcacaaactctgggagaagatattttcaaaatgtataatcaccaaaggattagaatctagaatatattaaaaaaagtcttaaaatcaactggaaaaagaaagaaaacatacatagagcaaaaaatttggacaaacatttcaatgaatacraagaatgaaaagtgaataaatgtaaaagattctcagcccaattaggaatttgggaattgtaaattaggaacacagtgagataacattttataactactgaatagcaaaactgaagtccaacagtgctaaggcttaaagaagatatttaatggaaatcttttttttttttttttttttgagacagagtctcgctctgttgcccaggctggagtgcaatggcacgatcttggctcactgcaacctccgcctcccgggttcgagctattttcatgtctcagcctcctgagtagctgggattacaggtggccaccaccacatctggctaattattgtatttttagtagagatggggttttgccacattggtcaggttggcctccaactcctgacctcaggtgatccacctgcctcagcctcccaaagtgttgagattacaggcatgagccactgcacccagctggaatatggtggttcttaagttggatagtaggttcacatatgttccttttcttgttatactctttattatatatgttgcaaatattctggtacatgcatcaaatattacataatttttacatttctgttttcagagctatggtgttttctatcaacagaagaatcatgaagttcataaatttggaaaggagagctttatttttcataaagggttgcagtctgcatggtggccattttgacaggctgggaagtgtagcctcgggccagaagcaggaaacaggcacttggagggtggggagagtaaaacagagatttatgctgaatagggtgaccaaatattcagtaagctacaggaggagtcatgaaagtagaagcatgcacctgggcaggtgagcttcatgcctttcyatgggacccatgttcaaaaactggcagtgttagcaagatccaagggtggagtttttggccctctgatgtcagaaggtgaagcagaggacatgaaaactctcactgcacatccttcatagactggccagacccactctgtggttggtggtctcttatcaggaagaagtgctggttggttggtgtgttgaaactgctaaagggaggggcagtcaggaggttggttgaaatcagcaatggagcaagtctttccaaagggctggtttctgtttctcatcagagaaagcactgtttctccactttggggatatgattaatctggatattataagttattttaatccttaccaacctgtcaggtaaaaacagtacttttaattttcattttaaaaattgaataaggtttagtattggaagtcctagctggagcagttaggcaagaaaaagaaagacaaggtatccaaattggaaaggaagaaggaaaataatctgtttgcagatggcarawttatttatttatttatttattyattcattcattttttgagacggagtctcgctctgtcgcccaggctggatggagtgcagtggcgcaatctcggctcactgcaagctccgcctcctgggttcatgccattctcctgcctcagcctcccgagtagctgggactacaggtgctcgccgccatgcctggctaattttttgtatttttagtagagacggggtttcaccgtgttaaccaggatggtctcaatctcctgaccttgtgatccgcctgcctcggcctcccaaagtgcttggattacaggcgtgagccactgcgcccagccgatggcagaatcttatatgtagaaaaccctaaagattttagaaaaaactattagaactaattcagaaaagtttcaggacacaaaatcaacacctcaaaattagtcgcatgtctatatattaacaaataatccaaaaaagaaattaaggtaacaattccatttataatagcattaaaaagattaaaatacttaggaagaaacctaaccaaggagataaaagactcataccctggaaacaacaaaacattgctgaaagaatgaaagataacacaaataaatggaaagacatccccattcatgaattaaagacttaagttgcctatactaccaaaagcgaactgcagattcaatgcaatccctatcaaaatcgcaatggcattttttttgyagaaatagaaaaaattatccaaaatttatagagaatctcaaggcatcttgaataggtaaaattttgatratgaagaataaaccaggaggcctcacctctcctaatttcaaaacacattacacatctgtagcaatcaaaatgatgtggcactgccataaagacagacaaataggccaaaagagcacccagaaataaattctcaagtatatgctcaaagataccaagaccactcaatggggaaaggacagtctcttcagcaaatgttgttgggaaaactggatatccatatgcaaaagaatgaattttgacacttataccatgtattagagttctccagagaaacaaaagcaataggatatatttatgtgtgtgtacatatgatgggatatgtatacacattgttacttacatgtatgtgtatatatatttttggaattggctcacatgattrtggaggctgagatgtcccatgatctgctgtccacaatctggagaatcagaagagcagttggtgtaattcagagtctgaaggcctgagaaccaggacctctgatgtccaagggcaaaagaaatgatgagctcaagaaaagagaatttgcccttcttctccctttttgttctgttttggtctttaatggattggatgatgtctgcacacatcagtgagggtgaatttctttattcagtctgattcaaatgataatctgttctgaaaacacccttacagacacacccaaaagtaatgttttaccagctatctgggcatccctaagcccagtcaagttgacacagaaaattaaccatcacacactatatacaaaatcaaatcaaaatgcattaaagagcaaatataagacctaaaactattaaaactcctagaagaaagcataggggaaaaacttcatgacactggaattggcagtgatttcttggacatgatatcagaagcataagcaacaaaagtgaaaaaatagacaaatgggactatatgaaacttatgtgcctcaaaggacataatagggtgaaaagtcaacccacagaatgagagaaaatgtttgcaaatcatatacctgataaggggttaatatgtagactatatcaagaactcctgcaactcaaagacaaaaaatcaaattaaaaaataggcaatcccagcactttgggaggctgaggcaggtggatcacctgaggtcaggagttcaagaccagcctggccaacatggcaaaaccctgtctctactaaaagtacacatagctgggcgtggtgtcacacgcctgtagtcccagctactcgggaggctgtggcaggagaattgcttgaacccaggaggtggatgttgcagtgagcagagatcatgccactgcactccagcctgggtgacagagcgagactccatctcaaaaaaaaaaaaaaaaaaggcaaaggacttgaatagacatttatccaaatatgatatacaaatggctaatgagcatatggaaagatattcaacatcagtaatcatcagagaaattcaaagcyataatgcaatatcacctcacccccattacaatggcttctataaaaacaaaaacaaagctgggcacagtggctcatgcctgtaatcccagcactttggaaggccgaggcgggtggatcgtgaggtcaggagttcaagaccagcctggccaagatggtgaaaccccatctctactaaaaaatacaaaaattagctgggtgcggtggcgggtgcctgtaatcccagctactcaggaggctgaggcaggagaattgcttgaacccgggaggcagagtttgcagtgagccgagatcgtgccactgcactctagcctgggtgacagagcaagactctgcctcaaaaaataaaataaaataaaaacagaaaataatgcrtataggtgaggatgtggagaaactgcaaccctgtgcctgattggtaggattgtaaaatggtgttaacagccatggaaaacagtatggcagtccctcaaaaaattgaaaatatatatcaccatatgatccagcaattctgcttctggtgtatttccaaaagaattgaaagcaaggtattgatgagatatttgcacatccatgttgatagtagcattattcgtgatagcttacaaggtagaagcaactcaaatgtccatcagtgatgaatggatcaacaaaatgtgatatacacatacaatggaatattattcagccttaaaaaaaaaaggaaatcctggcacatcctgcaaaatggacatacattgagggtgctgtgctgagtgaaataagccagtcacaaaaagacaaatattgtattttgccacctatatagattatctaaagtagtcagattcatagaaacagaaagagtggtggttaccaggagcaggggtgaggagagaaaaaggaatagttgtttcatagagttttagatttgcaaggtgaaaaaggtctggattttttttttataacaaaatgaatttaacacgactgaactgtacatttaaaaatagttaagatggtaaatgttttayctgttttttactacaattttaaaaaagaatgaggttgaacatcttatgtatgtttcttggccattagtatttttctctgaactttctaaatatgatttttaaataaatatcttttaaaggcatgtagaataatattaagtaaatttcccatttacttaatattatcttagaaaaattagaaggaaagttccttgtgggcaggaattaaggtttatatttctttttgccttctttactgctttccactgagaagatacttaataaacctgttgactctgactttttaaagacaaatcagggattgtaggtgaagtctatgagtcactttggaagaaagattttatactaagatcaaaatgtaagacttcaaagttttccttagtactttttcccaatagataataaatattgctagaagacctaaagtgttggctgactaaaatgaatactgttttctttttgaaaaatcaatgacaattgggggtaatttacagatattttttgaattctaccaccatacattcaaacatgatttctatgatactaatctcaaagtatttttcagttggtttcataaaagtccacattttttttcttttttttcaggttattctggactttatgaagccattgaaagttgggatttcaaaaaaattgaaaagttggaggagtatagattacttttaaaacgtttacaaccagaatttaaaaccagaattatcccaaccgatatcatttctgatctgtctgaatgtttaattaatcaggaatgtgaagaaattctacaggtaagttaatataaaatactaaaattgggggaaataattataacatgggaaggtcttctgttttctatactgttttagacctgagaaagatcattgaaacccacaaaagtactcatagaatagtacttttttttttttgagacggagtctcgctctgtcgcccaggctggagtgcaatggtgtgatctcggctcattgcaacctccgcctcctgagttcaaccaattctcctgcctcagcctctcgagtagctgggattacaggtgcgtgctaccatgcccagctaatttttgtatttttagtagagatggggtttcaccatgttggtcaggctggtctcgaactcctgacctcgtgatccacccgccttggcctctcaaagtgctgggattacaggcgtgagccaccgtgctcagccagaatagtacttttaatgtgaactgagtaatttttatgtcacaaagtttttttgaagtttgccctattttcagttaaaatcaccacagtctgtgaatagtattttatgcaaatttaaattgaacagttgagcaaatgagaaagggctacagactctagcagttaagtgtttagactctggacacagatgaattttgttagaatcatagctcaaccactagcggtatgatcttgggcaagttacttagtttctctgaatatctatctgtttccttgtgtgtaaaatggaaataataatgttaccttataatatggyattttcataagggtaatgagataatatatgtaaagtactcatgtatgtcttgcacagagtatgtgtacaataaactttagttattatggttagtaaaagtcatacaaattcctcaaccctgaaraaaaatttgttaatattttgttatctgtttccaaatattgctatatgccaatatacccatattgggaatggttgtcaaatgattattttcttaatattgctgatgaggataggtataagaacttagaggtgatgagaaggcttggcttgacatagtgacatcatgtgtaaaggacaaagatgaaggaaaaagtatcttaaaagactgtgttggatggggcaaaaattgtcatggatatgacccactgagctgtaatgtacaatggctttaaatcagatagtacatgactgacatttcttcagtaaaaattgataaagggaaaacttttgagataattgatcaataaactacagttaccttgcttagatttgctctactaaggggatgatggcaggtgcagagaaattggtggaatgccttctcagatcagacaaggaaaactggcccaaaactttgaaacttgctttggagaaagaaaggaacaagttcagtgaactgtggattgtagagaaaggtaagacactgtaccctcctcacagctctacttaggactcgctcattccaaccggtcttttacatcccatcagaggcgtttttcccctcagatagccagagctacatctctaacgcgagaccagcaggaagctggattctgggagggaggcagttacttgcctacaaaattagtttggttgcatataacccctaaaaatggactggggaaaaccactctcatccagaattagcccatctggcccaaaggatttgaggaaggcaaaatccgaactctcagtctaagtttagattatcagagaaatagcttgagaattctagagttaaaggttcaaactccaggacttacccccttttcagagttgatttcttgacagacattgcctggttctcttactggaagccatctggaactgaatccgacgggtgaaagaattggttgtcattaagtgtctgaactatcatttggtttcttgaagctgacactcagcattgtttcaaaggctgagtttggtaaacatctgaatatctggtcttagctttcctaggcttctttagatcataagttgtttcagaaactgtataaatacacatctgatttaatgggtcaagagtcagtcagaaaaggaagacatgaatgtctgctaaatcatgctcttttttttttttttttttttggtgcatacgaatccctccgaggtcttgttaaaatgtggattctgattcagtagggcaatacgttccacactttgagtaatatagctctaaattacattggaggtcaacgccaaattgagattttaaactcaaaatgattctttcaactgttttaaaaggtgaaggggagtggttgtgagaaattttaatagaagttaaaaatcttagtgttatgaccattttgtggagctttcaccatcaaaactataatcagattatgtgaagattctaagacttttttggtcttaaaaaggtataaaagatgttgaaacagaagatcttgaggataagatggaaacttctgacatacagattttctaccaagaagatccagaatgccagaatcttagtgagaattcatgtccaccttcaggtacctggtattgtttgtccttttccataatggtgctcttctggtatttggtgtggggacttgttttgcagtacccaaagtcacagccttgtgaaaagttttgtaaggaaaattaagaaagtaaagagaatttatgttacaatagatactttttctatatttagaatgccattctctcctagttcttccactatctttttttcttcttttactatcttttttttcttcttctaccactragaaagtatgggcgtgtctatattggaaatgcaaatagagtcttcaccaaaacccaatgtctatgaattcccaaatcaaccttgctttctaaataaatactacttctatttctgagtcacttgctcaatttccttttaggatccctgggctgccctgcaagttgatgaagttagtgtgctacccaaatgcgcctggctgagaggttgagtaggggctgagatccagcctgtgtcgtttgcaacacagtgcactgaggggctgtgtcctccaagaggagctcccttttgtcatttacacaaaggcactgtataagttagctgtggccctgtgaggcccccttatgcttctcaaagcatattttcttgatggttttatgagaccggmaagttgcataatatgccataataaaaagttatgtataaaagagtatcaggaaggaaattgggattaatagtggtggtagaagaaaaatgatattagaataacatcataaagagaaaatgtgcakattacgtctgcaactgamtgttacaagtttttttgttttgttttgtttttttggtcatttcagaataaaatctgttaccccttggaaaaaaaaaacagatacatgaatatgagttgctttaaattttctgacacgtgaagattcttgcatgccttttgttgttgttgttgttattgttttttgagactgagtctctcgctctgttgctcaggctggcgtgcagtggcacaatctcagctcactgcaaccttgggttcaagtgattctcctgcctcagtctcccaagtagctgggaccacaggcatgtgccaccacatctggttaatttttgtawtttttttggagaggtggggatttcagcatgtcggccaggctgttcttgaactcctgacctcaagtgatccatccacctcagcctcccaagtgctgggattacaggcatgagccactgcacctggcctttacatgtctttcgtgtgagtttaattcacttaaccttttagaaattctccctttctctaaaatgggtaggttagactcagtagataatttccaaagtctttgctagctcttaatgatttatatgcctacctgttattgagataaagcctttgattattttttaaaacttctggttatgttgagagaaaatatcatttgagaacttgaagaacgacaaagcattattgctccttaataagaaattgctttgagaatccaatgttaacagtttggttttcttcaaagatcgtgggaggatttgttgcttttttcacatacagcattgcctttagtagacagcttgtcttaccctgaatggggccattctttctttggtttctgttagccttccatgattgtataaaaaataattcatgtttttttttttttctttcttgccatcaatactttgtcactgagagaattctgtacttcaaattagtggaaaagctagaatggttaccaagagaaaggattctaaactttctccaatgaggatcttcttgctggagtcagaatttgtggacattagactgtagctattgccgtgattcctcagagcaggaactgtttggtaattttgctccttttgtattccagaagtgtctgatacaaacttgtacagcccatttaaaccaagaaattaccaattagagcttgctttgcctgctatgaaaggaaaaaacacaataatatgtgctcctacaggtaagcctattgccattacttacatagtttttctgtttgcttccttttttttcttttgttgaatactgggacagaatgggcaagtttcagttttttccttgttccatgtgtcttttgagaaaactgtcctaatataatcctaatgttttttatgggattatgtaattaattaattatgtacattaatgtatttaatgtattttctttacctttcatgagaaggtaaagaaaagtgtcctcttttagcttgcttttgggtcctggctgttggcatgctacttagggagcagcttgatattttttagtcatagtgtaaattctgtaatcattaacatatttaaattatcaattaattagtcagctcagtggtattagaagagccaaaaataaacacctttccagagaaatatctaatatatgagttacatgttttcttttttccttacatgttaaaaggttgtggaaaaacctttgtttcactgcttatatgtgaacatcatcttaaaaaattcccacaaggacaaaaggggaaagttgtcttttttgcgaatcagatcccagtgtatgaacagcagaaatctgtattctcaaaatactttgaaagacatgggtaggtataatagttgcttcaacttctttttctccagcttcatgtaattgatgtgttttctgttttgtttttgacaaatgatttaaaaaaatttatattagattcagcttttttataatccagatgttatcccttcatggattcaagtcttttttgttagatgtaccagaaawcktaaactcccctggtttgcccttctatggggagtaaatgacttcaggaataaatttgatgtttacgtggcacatttaacttctttagtgattttataatttatttgatattattcttttacgtactcttttctctcytagtgacttaaaataatatatagtactataaattacaactagcttggatttattgatctcttactatgtgtcaggctctgtgctaaggacttgcctacagctattcttcttttggactcagggagaatttaatcagttgatgttctgatctagcatttcatctttgtggttccttatccacatsgtggttagtaatatggaatttctgtcatttcccaggtatagagttacaggcatttctggagcaacagctgagaatgtcccagtggaacagattgttgagaacaatgacatcatcattttaactccacagattcttgtgaacaaccttaaaaagggaacgattccatcactatccatctttactttgatgatatttgatgaatgccacaacactagtaaacaacacccgtacaatatgatcatgtttaattatctagatcagaaacttggaggatcttcaggcccactgccccaggtatctccaaagtcagacgaatgcttcagargagctataatcttcctaactcctattttcttactcttatggccacactgaagatgtccttctcaggtcccaagtccatattgtacaactcattatgaattttgtttcctttattcatttgttcacttagtaaatatgcattatgtgcctccatgtgccatacactgtgtgttagtaaaaacaaaaaaacgccctaccccagcaggaaagagttatatgaggggttgtggaaacattgtaccatttctcagacatctaatgattttgaatgctccttacaggtcaytgggctgactgcctcggttggtgttggggatgccaaaaacacagatgaagccttggattatatctgcaagctgtgtgcttctcttgatgcgtcagtgatagcaacrgtcaaacacaatctggaggaactggagcaagttgtttataagccccagaagtgtaagttggatccaataacaagcctttgagattctgttactctctactacctctagttcagagccatctagacgaatactgaactttsaccctctctctgtttagtagaaaatatttaaccttgaacttgagtaacagtcacattttttagcctctctaactgagctctcatcccaagcaatggatgaacctcagaagtggcctgtagagagcaaacattcttcctctttgcttccaaaaacctcttataaatgtactagcaatgcaaaagaggtgatgagagaatttaggcatcagatagccaagagctgggctcactcagccttttcccatgctctgtgcctgtgtggtcatcactgtttgaatatgtatttgatcattttagttgaaatggaatgatctgaattcatgatgtcactcctccaaagatcagatatgattttttaatatgactaacagttgtttattgatgttattattacactaaccctgaaaggaagagagggatacagaaaatatatatgacttcacccttgctctctgagtagtatgtgactgtatttctgaggtagaacaaatagacatgtaatagggagtggtgtagataagttcctttttgaaggctgcttgtaagtaaggattttgatgtacctgatcccaacttttcagtgtcacatatgaatttctttacaatccggttcctcctgccctctgagcttcatcacctccaaacattcataaacccaaccatgttgcattcctctgggctcctcaatcatgccgtgtgctttctctctcccaccttttgtctgtgcttcctttgtacatcactgctcttttttttttttctttttctttgccaagttgtgatggaatatacatgactactcttgctttcttctttcttcttcctgtatttattctacaactctgacttccctggaagaattaggtgttacttyccctgtgttttgtgacactttgcgtgtactacttcttttttttttttttttttttgagacagagtctcgtgctgttgcccaggctggagtgcagtggtgcgatctcggctcactgcaaacctccacctcctgggttcaagtgattctcctgcctcagtctcctgagtagctggaattacaagcgtgtgccatcacgcctggctaattttttgtatttttagtacagacagggtttcaccatgttggccaggctggtcttgaattcctgacctcaagtgatccaccctcctcggcctcccaaagtgttaggattacaggtgtgagccaccacacccggctacactttacatgtacttctgttagagaactgctacggttagttagccatgtatatttctctcccttaagatcacagccctgtatggagcatgaagtgtgttctttcaactgtctataatcaaagcatggcacattgcaggcaattaataattaggctgaaataatatattgataaatggtaggatcagtgtgaatactgctgggagctgtgtggggagggagaatatcaaagcacagagacagggttagattgtggcacttgcagagacatgagagatgcccgcctcatcagagaggaggtaacaggacagccacagtaagaagctggttaggccgggtgcggtggatcacgcttgtaatcccagcactttgggaggccaaggcgggtgggtcaccagctcaggagttcgagaccagcctggccaatatggtgaagccccgtctctactaaaaatacaaaaattagctgggcatggtggtgtgcgcctgttgtcccagctacttgggaggctgaggcagaagaatcacttgaacctgggagacggaggttgcagtgagccgagatcgcgccactgtactccagcctgggtgacacagtgagacttggtctcaatcaaaaaaaaaaaaaaaaaaaaaaagaagctagttagacctacaccatgaaagacaggtgttagaatcagtacaagaagcaacagggagccattgcattttgagcatttgttgtatcatctggaccacctgccagttagcctggaaccttaggtttttcagaggaagtatcaaaggcagagaaaggttttagagatacctactttgaactacaatctgtccttcctgaaaatatactcactctttttttctttttcttttttttttgacgtctcyagttttcaggaaagtggaatcacggattagcgacaaatttaaatacatcatagctcagctgatgagggacacagagagtctggcaaagagaatctgcaaagacctcggtgagataaatctcatattttgtgttctctctactggggaatagccatttattgttcactatcgtctttttgtgttctccttagttcagacaatgtcaagaccatatccagaggttgtcttccttgattataggttatttaggagccttatatgtcctcctctattctttctttcttcctttttttccttttaaatccaaagtaagttcatmcagacacatgcacctgaaaaataaccatacttaagtcagttcattgctttctctaccttctaaatcagctttccctcctgactttcctgttcacctgaatgaaaccaccattcctctactggctcagatttatayctagggacaatcacccagcacatttcccagcattaaaggagtgcgactagagatgggccaggggaagacagtgaagggcctggatttgaattttatcctaaaaacaatggggaaaaaagtgaagattaaaactgattagtgacgtaataaagataccagtgaatgagaaggaccaaagagaggcagtagagatggattggagaaggaaggagacacatgtgagatgcttccaactgtgagtgttatgattgaatggctaaacggatttgggtggggatgagaaaggggcaggaggggctgatttccccccaggcatctggcttaggcacctctatgaatgccagtgggtggtcctggtaccaggactagaagcagccttggcaggtacaaggttttgagttttgagttttagggatgttaaatgtgacgtctgtaagacacctcatggagtgtctcctctcacacttattttgcttttctctccccttttctttcacagtttaatttctattataattgttctaacagccttctagctgattttgcctacctctgctctctcttccattcaacctctcatgaactagttagtcttcatgaatacattttatcatgtccctgtcctgcttaaaaaccctttgcctacaggataatcttcacgcctctaacctgcagtctgagccctgcctgaacacccaggttctacttatctttccaatgttatattctactacttccctacctgaatccttttgatttagcagtttcccgaatgtgttcatgcatatgttcattcatttagtgctaaggaatgggctaggtgatgggaatacagcatgaaccctaagatacagcccctggcctcagggcatttctagtctgatggtaagaccaaaattagagaagtaatactaatactaaagcagctggtgtggtgggggtgataaggtgtgtttcaggcacagggaatagcatatgcaaaggccaggagactagaaagagtatagggacttccattagtcctgtagaatgctgaaaggagagtggccagaaatgagaagcaaaagcaagcagaggccagagcatggggaggagcgtgtgagctggkgcaggattttggctgcaggaacccactaaaggcttttaagcagtggggtgggatgatttctcatctgcaattttgcaaactccctctaaccactgggtagagtatgggttagagggaacaaggcaagaggaagggagaccagtttggagattgtcatattatccagcarcacactgatgtggtttgaattggggaagtagcagaaggatggagagacggtgatggagtcacgtgagtttctattttcttactcctcccacctcccgtaccctgcctccacctttttgccagtccgaatccagttagctgctcatctctaaactgcttaggctatttttacacctacccaggttcaatcagtacctgttggctcatcttctttactgctggccacctcgctgtagctgcaacttggaaagaagcatgtcaatactacttgtttgggtagcctcctttgttcctattattgaaaatgaatgagtgaggggaagaatttaacccagaaatacagctcttgcttgtgacttttgttgtactgtgctcttcatgaggagccctggcgaactgataccagagtaactcacagactcagctgcttgagaacacagccatagtytcctcatcttatccccagcaccctacacagagcctggaccacagcagatgccccagctttgaaccaagcaactgaggcttatcctaggagatgcacacagacagatgcatgtgtgatwagtgtcttttgagggccgattctatgcttggccctgagaatgctgctctggagaacaggaggcccaagttcacagcaaagcrgaacatagggtgaactgagtcctaaatctcctccttgattttttttttttttaagagtctcactctgtcgccaggctggagtacagtgacgtgatctcggttcactgcaacctccgtctcctgggttcaagcgattctcctgcctcagtctcctaagtagctgggacttcaggtgcgtgccaccacccccagctaatttttgtatttttagtagaaacggggtttcaccctgttggccagggtgatctcaatctcttgacctcgtgatccacccgcctggggctcccaaagtgctgggattacaggcatgagccactgcggccggccaatctcctgcttttatatatcctcctctgatgaagctcttgagacctgttatttttacttcttcatttttaaaggcaaagttgggtttttcatgtctactgttttatttctgggctgctttggttgtcagctcatagagccagtagagcttgggcatctgacacatgtgggtttgaattcctgccctttctccacgtacttgctgtgtgactatgggtaaattacttattacttggcttttctgaacttcagtttcccaatatatgaaatgtaatatgtatctcatgggttgtgaaaattaaatgaaattatgaatgtaaggtactttgattcttggtacacagtactcaagaaacaatcaaacacacacacacacacacacacacacacaaacaaacacacagatgcactgcttaaaactcaagggagggaacaaggcaagaggtagggagaacagtttggaggttgtcatattatccagcagcacagtggtgttatctcaatgggggaaggagcagaaggatggagagatggtgatggagtcacatgagtttctattttcttactcctyccacctcaggtaccctgcttccaccttttcaccagtctgaatccagttaaatagttttaactagatgacttaagactatttcaggaggaatatcctgtttgcagagagtaagaaagaaaattaggccaggtgcagtggctcacgcctgtaatcccagcactttgggagaccgaggcaggcggatcacctgaggtcaggagtttgaaaccagcttgacaacatggtgaaaccctgtctctactaaaaatacaaaaattagccaggcgtgatggcacacgcctgtagtctcagctacttagcaggctgaggcaggagaatcgcttgaatccgggaggtggaggttgcggtgagccaagatcgtgccattgtactacagcctgggcatcagagcgagactctgcctcgaggaaaaaaaaaaagaaaaagaaaattagagggtgaggcctgtttataaccctaaatgactgaccatatgagacagtgaaaaacttttttttttttttttaacagaaaacttatctcaaattcaaaatagggaatttggaacacagaaatatgaacaatggattgttacagttcagaaagcatgcatggtgttccagatgccagacaaagatgaagagagcaggatttgtaaagccctgtttttatacacttcacatttgcgggtacgttcctctttttaagagtcgtattctggtcacagcacctactgggagtggcaccgtggaagccaagataacatcaacttctcatcctgtcctcaagagctcacttaggaacctttccagaaagttcttatgaagcaaactccaaaagttgtcccattcaacatcatctcgatttcctttctgaaatttcatactgcaggcaacaggactgaaataaaggctcagattctatgccatgcctctagcattaactgacatggttggaaaaaattgggtgattgtgagagaacattattccagatacaagaccagtccagtgacagcatcttgaaagctcagcaagtggaaagttctgttgctatgtcctgaagcacacatttcttcacctttggtgacgccccatgctcagaaatccaggttctctggctcaccaagaagttaaggaactatagtgacagctatcacctctgcttatccagccattgaaaatatattaaaatgcattcaattagcatgcatttgtagaattttagttagcttagttgtacatttgatggatgtggtcagggccatcattttggaaggtacactgacaatttagtgatggcttcagatgtatatagaaatcaagtgaaatgttggaattatgaggcaggttgatgtggaagttgatttactttccttatttttaaattttgatatgtgtttttcgtgcagtttttcttttctaaggtaaaattcartaatccaaagtgatgataattaatgttactagctaattgagttttcttttaacagtatttggttcaaagattttgttacataactgttagaggccattcatctttaaaaagctaagttggaatagatttgaaaagaaaagttttcttaaaacaattcgttaaatacaacgaattgaacttaaatacagtgaatgtgttagacattggaagcatattgagacagtttttactttcaacagaaatataatgatgccctcattatcagtgagcatgcacgaatgaaagatgctctggattacttgaaagacttcttcagcaatgtccgagcagcaggattcgawgagattgagcaagatcttactcagagatttgaaggtgagtggtgttttcagaggaggaagccacagtagcattcttggtgactggaatggcaaaacaaacatgtattgcatttaatatatataaacttggggatgcttagggagttgtcctggatgtaggaagatggagatggtaggactatttagcttcaatgaaatctagtacctatgggaagagtctgttgcttataccattccctatttagaagaaggaaaaacaagatttgcaaagggtgtttcccatatggttcacagacagtagcattctttttgtttaacgttcttttttagtaattttataaagctttaaaaaatatgaaaaagtgttttaacgatattaaaaaaaccataatttatgtatactttttttttttttttgagatggagtcttgctttgtcgcccagggtcaagtgcagtggctcaatcatggctcactgcaacctctgcctcccggattcaggcaattctcatgtctcagcctcccgagtagccaggactgcaggtgtgcgccaccacacccggctaatttttgtatttttagtagagatggagttttgccatgttggccagattggtctcaaactcctgacctcaagtgatccacccgtctctgcctcccaaaatgctggaattacaggcatgagccactgtgcctggcctatatatatttttacataaagaggaaaccaaaatggcacataatctcactgcctgcatatgattaaaaaatagatattaaacaaacaaaaaaaagttttccttctccctgttttgaattctttcccaaaggtaattagtgctaataattttggggtttttttggcctctacctaagtatttactgtacatatgtgtaaccagtgctgtgctggttaatatttaacaacccactagagaaaaaatgtatgcatatatatgtacataagcttattattttattgatatagaggagttatacaaaccacaatttataaataaaaataaactattctttattgtaaattccacatagccaattggttctcatagaatgcttttggtggtttttgcagattttttgtatccatggccaaccaagggttgcaatgacaaagaagtgtggttctttctgatatggttgttggtatatagtttcattaatgttagaagataaagatgaaacaacaaaggtgtatgttggaacttcactcgtttgccagtgatgcaagcaattttttgctgaactgtataatagtttttcaaaaactgggagaatgtttctcaatattttgtgctattcaatgtaatagctaaatttaatctgtattattattttttgatcatgttcataagtctaaactctcaacataaattaagccgggcatggtggctcacacttgtcaccatggcactttgggaggctgaggtgggtggattacttgagctcaggagctggagatcagtctgggcagcatggcgaaaccccatctctacaaaaaatacaaaaattagctgagcatagtggtatgctcctgtggtcccagctccttgggaggctgaggtgggaggatcacctgagcctggaaggcagacgttgcagtgagccgagattgcaccactggaccccagcttgggtggtagagtgagtccttatctcaatcaatcagtcaatcaataaagcactgattttttgtgttttcttgatttccatggtataactgctcccactgtagtgaattccaggctaccaacatgatgtcattgaactagtgttaaaaagagatgagcagcagcacatcattctatagtatttctaccatatagataacaataggtgtaactaacctcaaaagcgtagataattgtaaaaagtaataaaatttaacaattggccaggcatggtggctcacacctgtagtgccagcactttgggaggctgagatgggtgggccacctgaggtcaggagttcaagaccagcctggccaacatggtgaaaccccatctctactaaagatacaaaatattagccagatatggtggcacgcacctgtaatcccagttacttgagaggctgaggcagaagaatcgcttgaactcagaaagcagaggttgcagtgagccaagagcgcaccactgcactccagcctgagtgccaggagactccatctcaggaaaaaaaacaaaaacaaaaaccgataaaacagaaaccacaacagttgactcccatagtcccatagtccggtatgatctggctgtaacacacccctgttttataactatatgtattttttttctttttccttttttttgagacagagtatcattctctttcccaggctgtagtgcagtggtgagatcttggctcactgtaacccctgcttcccaggttcaagtgattctcctgcctcatcctcctgaggagctgggattataggcgcccatcaccacgcctggctaatttttgtattttaagtagagatggggtttcagcatgttgaccagtctggtcttgaacccctgacctcaggtgatccacccatctcagcctcccaaagtgctgggattacaggtgtgagccaccacacccggcctgactatatttttaaagatgggataatactgaacatactgtccttaccttgatttttttaaccttaaaatatttttggtatcatatatatcatgtacatagctcccttattaattttcacagccacattgtattaacatcagatgcatagcccatgatcttttgaactgtttccctattgttgggtacttaggttttctgtttttcttttacaccctgaacagtggtacagtgaaatccttggagacctcttccataattttctaaatataactgtgtctcaaattcttagatgtagaattattggatcaaaagatgtgtgtgtattatgttttgatatatattgccaaattacctcttaaaaggttgtaccaatttaaaacagtacttactactcataaaattctggtcaaagatttagagatcagctgtttgaacgatagctaaaggtcacagtgtgttctaaatttttagaatttataagccatttataaaatgtttcccatttgcagaaaagctgcaggaactagaaagtgtttccagggatcccagcaatgagaatcctaaacttgaagacctctgcttcatcttacaagaagagtaccacttaaacccagagacaataacaattctctttgtgaaaaccagagcacttgtggacgtaagctttttttctccttgtagataacaaatggacccagcactattcattgaaaagattgggctgggtatggtgtctcacgcctgtaatcccagaagtttgggaaatcaaggcaggagaattgcttggggccaagagttcaagacctgcctgggcaacatagtgagacctcatctcttaaaaaagaaaaattagctggtgctgtgcacctgtagttccagttacttgggaggctaaggctagaggattgattgaggctgcagtgatcatgacagcgtactctgcactccagcctgagcaacagaggtagaacctgtgtctaaaaaaaaaaaaaaagccgttttctctctacggtcaagaaaccatatatgtgtatgtgtgagtctgttctgagtttctctattctgttctgattatatgtttatccttatactaatactctaatgcctcactgtgttgtttttttttcccccacttagagacggggtctcactctgtcacctaggctggaatgcagtggtgcagtcatggctctctgcaccctcaacctctcaaactcaagcgattctcccacctcatcaccctctgccaccatgcgtgggactacagtcatctgccaccatgcccagctaatttgtttatttatttttgtagaggtggggtcttgttatgttgcctagactggtcttgaattcctggcctcacataatcctcccaccttgccctctcaaagttttggaacctggcttcatgctgtcactatgttagtcactctaattgtaagtattgatacttgtagagcaagcatttcttcctttttttactttttaaattttagtcattttgtgagtaggtaatgatacctcattagagttttaattttcatttcactaatgagtaatatggctgaacatctttcttctgcttgttagcgatctgtaactgccttggtgaggtgtctgttcagatctttgaaaaccaatcttttgaaaagattggtatatcatctgattgagtttttgagaattctttttatagtctgacaaaaaagtcctctgtcagaaatgtgatttgcakatattttcttctggtctgtggcttgtctgcttattctcttgacagtatcttttgcagatggaaagttttaagttttgacaaagttcagtatatcagttttttcttttatgggtttttgcctgtggtggtattatctctaaaaatcctttgcttacctaaggtcacaaggattttcactatgttatcatctagaagcgttacagctttacattttacayttaggtctacagtcaattttaaattaattttgtataaggcgtgaggtattggttgagatgctttcttttttttttctttttgtgtatggacattcagttgttccagttctctatgttgacaagactatcctttcttcactgaattgcctttgtaacttctgaaaacatcagttgactatatttgcatggatctgtttctggattctctgttttgtttattgatccatacatacacctcttcacccattccatgctgtcttgatcactgtagcttgatagtaagtcttgacatggggtgatgtgagtcctccaattttttttttaaaggttgtttttagctatgttcctttgcctttctatatacattttagaggcagctggtccacatctatgaaaaaatctgctgggattttattgaatctgaacacaaaactgaggctgggcatggtggctcacacctgtaatcccagcactttgggaggctgaggcgggcgratcacttgaagtcaggagtttgacatcagcctggccaacatggtgaaaccctgtctctactaaaaatacaaaaattagcctagcgtggtggcttgcacctgtaatcacagatacttgggagactgaggcaggagaatcacttgaacctgggaggtgaaggctgcggtgagctgagattgcaccactgctctccagccgagtgatggagtgagacttggtcttgaaaaaataaaatatttttaaaaatacataaagataaaattggggaggaatgacatcttgacaatattgagtgttctaatccatgaccatagtatatctctttatttatatatggcttccgtattagttatataatgctgaggaacaattaccctaaaactgagtgtctggaaacaacaaacatctattatcttacaatatctgtgagccatgaatctggaaacaatttaactgggtgtttccggctgaagatctctcatgaggctgcagtgaaggtgytggccatggcttgactggggaaggttaacttccaaactcctctcatatggctgttggctgaagagcctctgagttcactcatgtgggcctctccacaggtccatctcacagaccagcagatggcttcccctagagagagtgatcccagagattgagatagagggtgtctaatttggaagccacagtcataacttcatcttggaaatgatgccacattgcatctgttgtattttattcattagaagcaagtcagtaagtccccttcacactcaggggaggggattacatgaggatctgaatacagaaggtggagatcattgagggctaccttagaggtagactaaccagatgttctttggtttcttttatcagtgttttgtcattttcagcagattctgcacatattttgttagacttatacctaggtattaattttttgatgctattataaatggtactttaaaaccttttttttttttttttttttttgagacagggtctcactctcattgcccaggttggagtacactagtgtgatcacagctcactgcagcctcaacttccctagctcaggtgattctcccatctcagcctccccagtagctgggactgcaggtgtaaaccaccacacccagctaatttttatttttatttatttaattttgagacggagtctcggtctgtcacccaggccggagtgcagtggcacaacctcggctcactgcaacctatgcctccccggttcaagcgattctcttgcctcagcttcctgagtagctgagactacaggtgtgtgccaccatgcccagctaatttttgtatttttagtagagacaggcttttgccatgttgccgaggttggtcttgaactcctgggctcaagtgactctcctgcctcggcctcccaaaatgctgggattataagtgtgagccactgtgtccagtacttaaaaacttttgaaattccaatagtttgttgctagtatgtagaaatacagttgaattatgtatattgatctcctgtcctgtgatcatgctaaactcacttattctacatacccactatttttgaacttttgttttttcttttaaaaatgtcttagagatggccaggtgcggtggctcatgcctgtaatcccagcactttgggaggatgaggtgggtggatcacgaggtcaggaattcaagaccagcctggccaacatgatgaaatcctgtctctactaaaaatacaaaaattagccatgcatggttgctgatgcctgtaatcccagctactcgggaggctgaggcaaagaattgcttgaacctgggaggcggaggttgcagtgagcgaagatcgtgccactgcactccagcctaggcggtagaccaagactccatctcaaaaaaaaaaaaaaaaaaaagtcttagagattaaaccatatcaggttacagagatctatgccattttagttaattattacatagagttcaattccaaaatgctttttttctcaggtttgtcagtctgaaaactgtacgtgtactaactttaaatttttttctttttgcatgtatttcaatattgaattaatacaaatgatttataaggagtgtccarttgataattgcttttcattttcaggctttaaaaaattggattgaaggaaatcctaaactcagttttctaaaacctggcatattgactggacgtggcaaaacaaatcagaacacaggtatttatatatagtgaattagatttagtggattatgcatttaagaatatgtgtgtgtgtgtatgtatatgtgtgtgygtatatatataatatatatttcaaattctgttttaatatatatttcaagttctgttttaatgcttctatcagtcaaggtttaaccacagaagcaaaagcagtaggtgattatacatatatatgagaggtgtgtgttgtatatgtgtccacatatgcatatatacagagatttcttgcaaggaattttacacaattgggctggcaaagcaagtctgaagcgtgtagggcaggtagtcaggaagagactatcaggaacagactggaaccccccagacatgagctgtttggagtctctgactttggagaaggcctaagccgtcttttaaaaggctcacctgattaggccaggcccacctggagtgaactctcttttgatctgacttaaagtcaactgattagggacttgaatcccatcggtaaaatctcttcagagcagtacctagatgaattactgggaactgttgtttggcctagccaagttaatgcatcaaaaagccatcacaatgctcaaatgccaaaaaccactccagkctctttccttgtagacattgcctcctctcatatgtcctgcagacaaagccagggttgttttttaagtcatgcttgcacgcattatcatcctgctcaaattttcaaccaatagattaagattgtctagaaatagaaatgttctatttctgttttattgttattctttaagcagtagatatgcatagcttttgtgtatattatgtattttacaattttaaaaagtccaagcagacaattctgaaatccagctagagtggtcaaaggataaaaggctgcctgtgttattatctgggaggatcctaggtggcccgccctcatcctgaccacctcacagctgtgccccccacccctcagtgactggcactgacaagtcttcctatttagtgttgtttataataagcaccctcccatacccaccctgtcagtccctagttatcaccctcgcactttcccttcatgtcatttttaaacttcataaatatgaaaagtagattcagatcttaaaaagtggctcaccaaatgaagtctaacaccatatttttgtggttgggattcaaagttctctgcgatctgactccaacatgagtcctccttgattttcaaactttgttgttcctccacaagtagacactcaggaaatattttcttattggtttgttcatttattcatccgttcattcaacaacatttatttataacttgtgctgtgccaggcattgtgcttctgccatgtagccttccccaacctccaaaaactggtagagagctccttcttccacattcgcatagcatcctttctgtgctcatcatactcaattatagcttcttatttatatttttcttctacaaaatgtgagctccttgtggataaaaatggaccttttaatcattatttttatctgacaagccataattgctgaataaatgtttgactgaatagatgaataaactaagaaattaatcacgtatgatgtctgttccagagatgctcattgtttagtagatgatgatggtgaaaagaaattgttttggccttagcaaaatatatctcaagatttgggctggaaatatattaggaaaaaattggaacttttatttattttattttatttttgagacagagtcttgctctgttttccaggctagagtgcagtggcacgaamtcagctcactgcaaccttccagtttcaagtgattctcatgcctcagcctcccaagtagctgggattacaggtgcacaccaccatgcccagctaatttttgtatttttagtagggacaggattttgccatgttggccaggctggtcttgaactcctggcctcaagtaatctgccaccttgacctcccaaaatgctgggattacaggtgtgaaacaccatgcctagccaattggagcttctataaattctgttaaccctgaggtagagaccactgaagtattttcttcactcagtttatcagtgtgaactctatagcttttatcgaatgggttaaacttgatttaccagtaaattaagacaattttagctgaatttgtttctggtctgatcctcttccttgcacagttaagctagaagaattgtgaacacctttttttacaaaaagctgcatgtaaacaagcaaaagttcagtttgctaaatttgtatatttccacatttccatttcttaatttcctgtttcatgaagaagcaggttacctaacctcttcatgacttactttcttcatctgtcaaatggaaaaataataatagtacctagctgagagggttaatgtcagtagcaaaatctggctcactgcctgcttatgaatgactcttgagctgagaatgatttttgtttgaaaaaaaatcaaaagaatattttatgacatgtgaaaggtttgtgcaattcaaatttcattgtctataaaataactttttgggggaacacagtcatgaccattcatgtatgtattgtctgtggctgctttccaactataatggcagtgttgggtagctgagacagcatgacccacagagcctaaagtatttactatacatctagcccttatggaaaaagtttgcccacttctggtttagaacaatgcctggcatgtggtgagtgctcaatgtatgttaaatgttagttactattcacatccagaacttttatgtaatggtccacaatgctcatcatttgtttgattttggttttactgagaatacatggattcaaaaataacagaaagtatgtatctttaaaaaaagtattctggataaagaaagctcaaaagtaaaatcaaaataatgtttagagattgatttttaagcaactttctgaaaataaagctgcctgcatttgaattttcatgactttgaatggtaaataattcaaaaaccacaagggatctttttccacaaactcttgagtccactgccagctaggtaatggaaagtaatatggattaccttgctctacctgcctgaggtgggtccgccctgtgagcagtgagtggagatcaggtgattctactaatagataaacgtagatgtctttaggatccacacggtttgaagtgcgcatattgtttgagccaccattttgggtgtccgccatgattacacaaactgggtgattatcacatccaaacttcacactgtattcagacaatttaaatttagcctccactatcgcaggatattagaaggcagtatgtggttgtcttagtcaagatcctttcttttccccgattaacagaaacccacttacgctagtctaagtagaagggggtgtggctgctaccgggataattgggtctaccatagaacccgcagttcggaagtgcactcgggctttgtggacaattgcaatcctgaatcctgcacatctgcttcacagttttccctttacagattgctgtctctgcttctccattcatgactgccccacaccttcctgatttactacctgtctccaatcccaatttcagattccaagagggaagaattggattggcccaacatagttcaaatgcttatttcagtccagtagctgcagccaggaacaggctgtgtataaatcagtgtaatctaattgctctaacagacaaccctcacgatctcaggggcagggcaaaataaaagttatagctcacactcacagatgtggataggtaggggtgggggctctgctcacttatgctcccaagtgtagataggtaggggtgggggctctgctccatcctcttccacttattgtagggacccaggctccttccttgttatggctctgtcatcacagggggtctccaaatcctccactatgaccttatctggtccattgatgagaaataacaagaacatggacaatttttaggggtctggtttggaagagacacacatgacctctgtctacatgccattagtgacagtttagattgcgaaatataattcagctgtgtgtgcctagcaggagaaagaaacaagattggtgagcagatagcattgcctctttcatagagaaacataatacaactgtattgtgggtgggtgtggcagaaaatgattcttagtttgtgtatggggaggcagacaccccaacagtgcacactattagggtcttaaactgaagttcaaggcccaacactgctgatagctagcttgtcagtttacctcacttctggaacctcaagcccctcatttgtgtcttttttttttttaagatagagtctcattctcttgcccaggctggagtgtagtagtgccatcatggctcactgcagcctcaacttccccagctcaggtgattctcttacctaagcctcctgagtagctggggctacaggtgtgtgccaccatgcccagctaattcttaaattttttgtagagatgggttctccctgtgttaaccaggctgatttcaaactcctaggctcaagtgattcacctgcctyggcctcctaaagtgttatgactataggcgtgaaccaccatgcctggcacgaccctcgtttgttaaggggaatcagagcacttaccctttgacctatagggctttatgatgctctggtgagtgagaagatgtgaaaatgttttgtcagctataaattcttacacacatgtaaaggtgttacaattaggtgttgatatttctgcaaaaatgtctatttcttggataatatggctaaagccatacaactagtaagtcccccagagctgggatttgaactcagtcttgtggcagagtctgagtgttagatgccaccctaaatgtcctttctgaaacaggcataggaatagatcccactgcctaggtgtgttgtgagatcatggatataaagtacttatcacagtacttggcatataataagcattccataattagtagctgttttttcaagggggaagttccctctttggtgagttgtataatgccctcttactctgacacaggaatgaccctcccggcacagaagtgtatattggatgcattcaaagccagtggagatcacaatattctgattgccacctcagttgctgatgaaggcattgacattgcacagtgcaatcttgtcatcctttatgagtatgtgggcaatgtcatcaaaatgatccaaaccagaggtaagagaagctttgaggccattcctacatggattctgttttgactgatttwtaagtgtatgtgtcattctggcctttctctttactgagccatggttgagtatgtgaccaatggcacagtgcactttggtatcattggcccttaaggtggctacagttttgttcactaacataaactctactttgattcttacaatgatgctgctcacttgcctggcattgactgatatatttatggargaataattccaacttggattgaagctttgccagtcaacatgtaaacctttcatggtggtgctggtgggctgaagggccccctgtattcaagaagggatactccagagttgttctgccccacctggacttgactagtctcctaactattctttcctcctttttccttttcttcttaaaattccataagtacagctatcatattacttttcctgaaaaacagctcgatcgtgtcacttccttgtattgaaacaccagtggttccccaatttacttgatgctaaagagtttccaaaatccaacacctatttcattccaactttatttcccattcttcccttttgtgcattatccacttccgccaacctgacttcctcacttattgcttgttgayggaactgctcagatactgctactcttcattttacctcttcccctgcctccatatcacctgaccctaatcctcccagctggcaaaaatctctcttttgaacatataaagcctataaccttttatatctrtctttgtaatagcacttaaaattttccacctatgttttgctggttatgaagagatcttatttcctcattgtctagaaggttcttgaaggagggcctgtttactgctcatcttagagccatcacagtgtcatactgggggttcatgtaggtatctttaaagcagtgtttctgacagtacggctgtctaatcaccctgcattgttgagaccctgagaaagccagcctaaggtgggctcctagtttttccacatatttaacatgcaggtgcacacctgcatttgagtctttttttttttttttttttttttttttgagataggtcttgctctgtcacccaggctagagtgcagtggtgtaatcctagctcactgcagcttcaaactcctgggttcaagcaatcctgcctcatgagttcactctttaacagctcaactttcctgggaagtgggattcagtgaaccaaagttgaattttaggagtacctctatttgtttacctatttgcagattatatcagagctttaagtcaaaaacaccaamtaaaatatttattttctaataggcagaggaagagcaagaggtagcaagtgcttccttctgactagtaatgctggtgtaattgaaaaagaacaaataaacatgtacaaagaaaaaatgatgaatgactctattttacgccttcagacatgggacgaagcagtatttagggaaaaggtaagtctayrttattcttccagcatctgaccataaataactatcagggaatgtgaggaggatggttggtatcttttatcatattgcttagagtgttrtattayaacaaaaagtttatacttagtgaatattaaattcattctgtttttaaatgtcaatgaggttaaattatatttaatagtgctaataactgaagttatgttttcagatctaaaaggcaaattgagctaggatttctctagttgacagttcatctcgaggactatatcctaatactggaaaaaacagctgttcttagtctcttccttaaatctctctccaaagagtcctcagagaaaagctcctaggtcactgtgcaggtattggaatgtctttttatagctgtggacaatgatatacaccttggaatgggatgcctattcagatcaacctcttagtgtaatgaccttcatttcattgtaatttccgtaacacagaaacatgaaatcagattggagaaagtcaagaaacacataccyatactttctccagacccattgcagagattttcatctcagaatctctggaagcatgatcactgcagggctaggggagagctttaacactagaatccatggttcaaatcccagttctatcasttgcaagatgtgtgacctcaggcagttgctctgtcttttaaataatcaatctcctcatgtaaaaagtggggaaaataatagtatttaactcccagggtggtcatgaggataaatgagatgtatgcattgcatctcttagcgcctggcataaaatacgtgcccaagaaatgagagctgttactggacagaagtgtgagacatagwttaacttcatgaagatgaaccttacagtttaatagaccaactccatagtgtctataattttaaaaagtcataatctctgtgctccaaaaagtattgaccatcaattatctaaagcagattaacacttattttaggacacaaatcaaaactttgtcaatgtttactagtctaaaaacatttttcttcctaaagctgggagattaagttatctagaaccacctcttccacattttcagtgagaagaattgcagggaaattatttagttcctcccttagttttactggggatgggattctytattctctcttcactgagccacctttccattttgtaaaatatattgccaatacacrttttaaaaccacgagttttaatagccatggcataatttttatctcttctcctaggtgacaagctacttagactcatgtgacagaagcaacagagtaaaagtctgttgaggaagagagaggctagaccagatgtaggcattcttttgtagccagcacaccaggataaggagtggggtgaggaggaaatgggttaagtatctgttgaatcaggctatgtaatagcatttggggttcccgtaacacttacagatagataggcagagatggtagggaacaagaagccctataaccagtgtagctgggagttactggcagctgggaagcctgagttgtgttggtatccctgtcctatcatacatgaccaggcccagctgccctgctcaaaggggaaggatttgctttcaaaggcttagtaaaggccgggcgcggtggctcatgcctgtaatcccagcactttgggaggccgaggcgggtggatcacgaggtcaggagattgagaccacggtgaaaccccgtctctactaaaaatacaaaaaattagccaggcgcggtgacgggcacctgtagtcccagctactcgggaggctgaggcaggagaatggcgtgaacccgggaggcagagcttgcagtgagccgagatcgcgccactgcactccagcctgggcaacagagtaagactccgtctcaaaaaaacaaacaaaaaaaggcttagtaaaagtataacgaggtagggaaaatcttatattcttaagactaaagggaattatggttctaggggtgagccccccttttgtgggtgctttgataagggtttggggtttgggtttgagcatcctggtccctgtatatgggttttaacggaaggaaggaactctgcagaacagagggcaaaagcttggagctctttagggcaatctgcaagaacaggaaagggagagggatgagcagagtactggsagactgctttcttccccagcgccccagctgtactgtccattgtctgtgtgtggcctgctgtcactagagcactccccatcccccgccccagaattctctggtcactctgcagccatcttaacatgtagacagcccagaggtatccaagaactgatttccatggtggacgcttcaggatttggtggtgtttcattctggaggaataagggatgaacggtatgacagttgtggttgtgaaggtttatttgaaatcagaatgaggaggaagctgtttttctttcctcatggagcagagaataaagatggggtgaaagaaagttcattctgaacaaagaacttccaacatgcatacccatgactacacataattaagatagtttgcttttctccacctcagtgtgtggagctaggctgcttctttagccacaggttgcatgggtgaaggtcagtatgccatagacttaacttatgattggttgagcctctttacccagttattgatttttacttagttttaagtatagctgtaatagttttaacttattaggatttatacctattgcctagagtaacacttaaaatatttgagattattagtatttaattgaatttcagtatataattgaataccattataagtgaatttttttaaaaagttggatgcctgaaaggcaaggttatattttcaccttctttcctggtaacctctattctgcttaagtagtgattagaaccatatctgaaaaagaaattaaaaaagaaaattaaaattgctcataggaaaatgtgtatcatataacccagggatttcaattctagaaatttgtccaaaggaaagaatgggataaatacatataatgtaacagttttacaactgaaaaattggattaaaaacaggaggcctggacaccctttatttttacaaaaataatgaagataatttcaggtgggatggggccaagaagtggggaaggggaaattatatttggtttttaattttttaattatttcttatttatttttttgagacagagcccaggctggagtgcagtggtgtgatattggctcactgcaatctcagcctcccaagcagctaggactacaggtgtgtgccaccacgcatcactaatttttgtagttttagtagagatggggctttgctatgtcgcccaggctggtcttgaactctggactcaagtgatatgccagcctcggcatatcccaaagtgctgggattacaggcgtgagctactgtgcccagccagtatatttgtttttttaaatcaaaacattctaggtctagctgggcatgatggctcacgcctattgcgccagctacatgggaggatcatttaagcccaagagttcaagtccagccagggcaacatagtaggaatctatctcaaaaagggggagtgggggaaaggaagccgggtgtggtggcttacacctgtaatgccagcactttgggaggctgaggtgggtggataacctgaggtcaggagttcaagaccagcctggctgacatggtgaagccccatctctactaaaaatacaaaaattagctggatgtggtggcacctgcctgtaatcccagctacttgggaggctgaggcaggagaatcatttgaacccaggagctggaagttgcagtgagctgagattgtgccactgcattccagcctgggtgacaaaatgagactctgtctcaaaaaaaaaaaaaaaaaaaaaagctagatctaattttttttttatataaagcaaatttgaatttgaagtggtatggtaatcaatatattatctatgtatgatccgtaaccaattaaaagatataagggggagggagatttccattcgcagtgacaataagtgtagctcatgcatgtagaacactgactctccaacagtccctgcaaatgctttacttacatcaataggctttacagcaatccatacagtagtgcctcctatgtcattttataggcaggaaactgagacttgaatagcttcagtgccagtagatcacacagctagttcatggtagagttggtagaacccatctgtttcaccattacatctaccagcctaatcagaaaagtttgaagcagaaatgaggacaaataaaaaaattttactgggagatattaagataaaagaaatgccatgctcttgaatggaatgactgaatattttaaacacgtgcattcaccccaaatttgcttattcacgtgtcacaaaccatattgaaagcataaatgatacttttaacttgataaaatggttctagagtttatataaaataataaatagatgaaaatagctatatttctagaaaaataaaaatgggggtagctagtagtttcgtattgataaggcaatccctaatgaatggagattgccttatcaatacaaaactacaagccaccccattaacattttcatggctcttagcataagactagcctaacagagaagaggcaacggtgatgggcatttaccctgtgctgggcaggcctgagcagtcataaactcatgttatctcctgacagtccgtgaagcagatgctattgtcccattttgtatgtaaagaaacgaggcacttgccccaaatcacatagctgctaagtgacagggacactatttgcacctaggctgtctggatccacctgggacacgtgaaagcataatctgatatggagaggcgccaccataaaccataaaccagtgggacggacagaatcttccatagaagacatggaggaaatcagtgtgttctttcttccttcatgaggcttcagggttccttttatcatttcctctgtttagaaaacttcttttagccattcttttagggtaaatctgctgatgacagattctcagtgttccttcatctaagaatgtcttcatttctcctttatttttgaaggtggcattttgctgagtctagggttctggggtggactgttcttttctttcagcgtttaaaaaatattgtgccacttccaggtagcctccatcgtttctaatgacaaatctcctgttattcagactgatttccccctatgggtaaggtgtcattttttttttttctggctgctttcaagatttttttcttcagttttcataaatttaattataacctgtcttagagtgttttttgaaggggcttatcctgtttggagcttgttcagcttcttgaatcctggttgatgtagcttgttaaatttgggatatatttggaggtcatttctgtgaatactttttaagccctgctctttcttcactccttgcagaactccagtgccatgacatcattttttatagtcctacgggtccttgagactttgcgctttttttttccccagtgtatttttttgttgttcagattgggtaatttctgttgttctttcagttcactgactcttttctttgtcccttccattctgctatggaaagcccatccattgaactttttattttggttgtatctttcagttctaaactttatgtcttccatttcattgttgagcctttatgttttctctttatgtttcaaaagtatttataattgcccatcgaagcatctttattaggtgctttaaaatctttctcttctcagtgttggcatctatgattgtctttttttttcattcagtttgagatctttctgtttattggtatgaagagttttataatatcatgtccatggttctaagttggaccatgttcttagccaaggcctagattttgaattagaatacaatcatactatacatatgcaacaatattccctgtggctgaaggggagagagaaaaaaggttttagatgttgggggctgtattagtctgttttcatgccactgacaaagacataaccgagattgggaaaacaaagaggtttaattggacttacagttccacatggctggggaggcctcagaatcacggagggaggcagaaggcacttcttacatggcagcggcaagagaaaaatgaggaagaagcaaaagtggaaacgctgataaacccatcaggtcttgtgagacacaatcactatcataagaatagcacaggaaagactggccccccatgattcaattacctccccctgggtccctcccataacacgtgggaattctgttaagatacaattcaagttgagatttgggtgaggacacagccaaaccatatcaggggctcttctgcctgttgtatcactcactgagtttgtgcctgcaaatggatataattatgcctgaaacagcgcatattgtatatctggtacaggttttgttttttttcccaagttttgccaaacactaaagtagaaagcatagttcatatgactattctatggacatctttagtgcttttatgagcatttttgatgaagaaattgaaagactaattggaggccacaattaagcattgactaatactaagttaggagaaccaataaaatctgtgattttacaaagtcaggtaccatatgttcatggaagttgtatatgaatgattatacatgtgcgtgcatgtatatgtattgtacgtatctgtgcctgtttcttgctatatatgttgtactcaaattacatttgcggtctttctttttgcattagattctgcatatacagactcatgaaaaattcatcagagatagtcaagaaaaaccaaaacctgtccctgataaggaaaataaaaaactgctctgcagaaagtgcaaagccttggcatgttacacagctgacgtaagagtgatagaggtaagctgcctttttacaaagtgcctggtcatgttttagcactagctacagcttactgttggtgaaatatttataataaaactactattatttccattgttactgtggccatgatctgtgtatttaaaaaaagctaagaagtgaaaaaaaaatactaaatgttcaataataaagaaatagtttttggccaggcatagtggctcatgcctgtaatcaaaacactttgggaggccaaggtgggcgaatcacgaggtcaggagttcgagaccagcccggccaacatggtgaaaccccgtctctactaaaaataaaaaagttagctgggcgtagtggcaggtggctgtaatcttagttactcgggaggctgaggcaggagaatcgcttgaaccgggaggcagaggttgcagtgagctgatatcgcgccactgcactccagcctgggtgacagagcaagactctgtctcaaaaaaaaaaaaaaaaaagtcatgctaaatgcaatgacgtgtcctggattagctcctggaacagataaaggatacaactagagaaagagtggtaaaatctgtagtttagataatagtaatgtactgatgttaattatcttggttttgacaaatgtgctgtggtatatgagatgttaacatttggggaaactgggtaaagggtatgcagaaattttctgggatatctttgcaatttttctttaaatctaaaattgttccaaagtaaagtttattttaaaaaattatgaagtttatgtagtataatgaaaaactgcttacaaactaatggtaataaggaaaaaagtaaccagaacacagaattgtaaagatgctactttgtagctgtgtgaaacaacagcagcaaatacattcattgtcattgtcaagagaaaaagtcaaaaaacctaccttgctacagaaaaacaaaggctaggggaactataccaaaatgtattaatattttggtggtgagattccatgactttttttctcttttcctactaccttatgttttccaaacattccttttgggctatggatcacttttataatgaaaacaaaatatctccttatttgtaaaatgtgacatctgcagattagccttctattgcagccttatatttctttcttaaaactttcagagaaagggttagaaaaatctccaaagagaaatatggggtataactcttgcatggggggcacagtggaggggctgggctggctcagatgaggagttattacttcaggatgttccgttcgtcttcagaaagcagaaatctctcatcggctcagctgtttgggcaaaaagcctatcaggagtcatattgctaagttcccttacctttctaagtctgcttctttagctgtaaaaggtcctttcagctccaatttgggtgattgttctactaaaaatggcccttttagaccctatgttttcctgagggactagtatgttggatctgcatttgtttctgagctgtttactctaaagttgactctaggtggggcctgtggacacattagtccctgaccttcttcaattgcatcttgaccttggtcgttttccctgtatcctttggattgtgcctgccagggccactggtgaacttcagcttcacaaattttcagcaaacatcgcttctgtttttgaataatgagtatctaccttcagaagctgggttacctggaaccttcttaatcttcttctttatgaggtgcccagtgtcctcacttgcaaccccaccctgcctgtagaggggagtcaggtgcatggatcctctggactttgggtgaatctatttttttttttcctccaattgtaaaataagtgagacccacctgttctttgcctc

SEQ ID NO: 97940 - DNA, 24113 bp, Homo sapiens
tgtgtcctgtttcatgttgggtaaagagcttagggcatgagcctaagcaaacatccatgcatggtgacagcaactgaatttctgttattaattccaaactctcatgtcctatggctttgtacctcattttcaagatttgaccttaagttctccatctgtgaatttaatatccactaatgggtgttttaaattttatactatgggccaggcacagtggctcatgcctgtaatcccagcactttgggaggccaagatgggtggatcgtgaggtcaggagatcgagaccattctggctaacacggtgaaaccccgtctctactgaaaatacaaaaaattagctgggcgtggtggcgggcgcctgtagtcccagctactcgagaggctgaggcaggagaatggcgtgaacctgggaggtggagcttgcagtgagccgaggttgcgccactgcactccagcctgggtgacagagcgagactccgtctcaaaaaaaaaaaatgtatactatgaatgtgtgagctatagtactaatttgaaatgagttattttagcattaaaaggtgactcagtagtcagttggtatttactagctgtttgtgaggttattgtttagcatagtagaatacatactatgttcttgtctatttctagtcacagataatgaactatcataactcaaaagtacacaatttaaataacaaaagtgtgattcttgctttaatcaaatgacttagtcacagtaatgattatctgttgcaacaggggaattttaggaagggccaccaaaactggccagcggtcccagttggaacgctggtttaagaaatagttgggggaggggccaggcgcggtggctcacgcgtgtaatcccagcactttgggaggccaaggtgggtggatcacaaggtcagaacttcgagaccagcctggccaacatggtgaaaccccgtctctactaaaaatacaaaaattaccgtgcgtggtggcgggcacctgtaatcccagctactgaggatgctgaggcaggaaaattgcttgaaactggaaggcggaggttgcagtgagctgagatcgtggcactgcactccagcctcagaaatgagtgaaactccatctcaaaaaaaaaggaaaaaggaaaaaaaaaagtagggggtatcgggggctcatgcctgtaattacagcactatgggaagccgaggtgggtggatcccttgaggctaggggttcgagaccagcctggccaacatggtgaaacaccatctgtactaaaaaaaaatacaaaaattagccaggtgtggtggtgcacgcctgtaatcccagctacctggaggctgaggcacaagaattgcttgaacctggaaggcagaagttgcagtgtgcggagtttgcgccactgcactccagcctgggtcacagagtgagactctgtctcgggaaaaaaaaaaaaaaaagtgggggccaggcgcggtggctaacacctgtaatgccagcactttgggaggcagaggcaggtggatcacctgaggtcaggattttgagaccagcctggccaacatggtgaaactccatctctactattaataaaaatacaaaaattagctgggcatggtggtgcacgcctgtaatcctagctaccggggaggctgaggcacaagaattgcctgaacctgggaggcagaggttgcagtgagccaagattgcgccactgcactccagccttagcgacagagcaccctgcctcaaaaaaaaaaaaaaaaaaaaaaaaaaagtaggggatttctccttttgttttattgtgtaacattgatgtgtgttacagcctaggtagtctcaaaataggaaattatcttgctggtttttccagctgggcaatttatatttatttagtcttccatttattccatttaaatgttaatttattttgccatttactgttcaaaggaaaaggagagctctattcagaagaccatatcagggatcctgtagcatttctcatatttctgtattttttgccactgtggttctttcttgtttctgtgccatgacccctttgaggaactgaagaatgctcattgtatatatgtttagaataggacaagtaataacaaacttccaaatctcaatggcttaacaaaacagaggtttatttcttgttgacatcacagactactgtgaatcaggtgatcttcctcaatcttacagctgtgcctatcgaatatgaggttccaagattgtgatacaaagatacggcaggatgtctcaggggatgatttttaggatctaagcttagaagtagcttacatcacttctgctcaaattctgttagctaaaactcactgtcatcttcccaaatattatctgtgtgctctttgctatttcccagacccctgttcatggagtttctgctacattccatctttctagtcaccaaacagctcttggcttctttctttacccatgcataacacacttagtctctctccttagggagaaatcccaaagtcccattccatcattgcaccccggccccaaatccatgatctccagatgatgtaaaatagtatgtcaggtttatatatgacttctgttgatctgaggatcagtgaactaagaagacaagttaactgtatccttgtcccccaaccacacccattgttcagtggtagaatttggatagcatagtagtcactggttcttggcaatcctgaaatctcactcctaacccgtgtgtgagaaattacttgaatgggcactgattttgttttcttgaaagaacacctttatccatcgttcttcctggttcctggctctgtccagggggtttgttcttttcattatctacctagaccacatctaaatggtattgggaagcatgccctccttagggggctgtatgggcttcagaatctgccacctgcttgcaggaggttgaatgccagaggttgttttaatttcaaacattctggcaggattctgtaaactatatgtttggtttgtccatccatttcccttaacatttagaagcatgaaaagaaaaatatttggtagacatctaatgtgtttacttctagtcagtttctcatgccagtatctgtttttcctatacacagttaccagcttgtctcatttctttgtccttatgcatctgcctctctcacctctgtggcagctatgtggaggccatctgaggcagactggttcaaaggctaccttcattttaaactgatctttgccatagggctgtgtccctctgtttgagttttattgggcttctgttgctcagatttcttgtgttaacttattgtttaggaattctgaagtagtgtgatttttcaataccacaaggtcctgattttttatttattttttagatacagggtcctactcttgctcaggctggttttgaactctgggcctcaagcaatcctcctgccttggactcccaaagtgctgggattacaggcatgagccaccatgactggcccaaatttttagattctattaactttttttttttttggtcaggaacagaaagtctctagcgtgcaccaaagtgttctctcgtcctctccatttttatgtcgcctctcaaatcagccactttttgcctgagctcatgcttcttaaagtacattcccaaggcatccaaggatcccaaggatccaaacacatactataactttttttcccagctacttcttctagaacctcaagttcattaggcagtcagcttccaagttataggagatattttgctaaatagtttgccactgccttttgtttccatctttatctttgctaccagactgctaagccagtgccctatagcttgatttttattacagcagcattagtgccacttcaaggcaatgatttctattgggataatgctagctgtactaacaaattgttgcccaaatgtataatggcataaacatatttattttttcattggactataatcctgagcagtaccaggtcagggaatggcagggattggggtgggtatggggacaattctactcttcccagtcattcagggactggcaggctaacagaatctatcttaaacacatggctgaaactgaaattgaataatctgtcttaaaactatacagcttgtcagtggaggttccaagattcttaccacttggttctggcttcaatgcccatgcctttttgcccacatctatatcaagaattgaaaagacatctggaccagctgcctagccaaagtttgtattctgtattcagtatgtaagccaatcagaaaactggtgattgcgtaacacattcagttgctgggggtacattacctccttatctggaactgcagatgtttccttgcaacttctttctggggcctccatttattggggtcatacaaaataaaagattatccctttatcacttagagaacacaattttcgtgccctttttgattattttgtttctgagtgaaaatttccctattatttcactataccttaaaattttgaatactgattgttcagatttagtcagcttctactttgtctagggtccttttaaagggaatgccagaactcaagtacattttccatgtgagatctgatgaacatagaacagaatagaactatcacctctgtagacttaagatttttgtactaactgtatctttgttttcctagggtgatacaattctggagactggagaagtaattccaccaatgaaagaatttcctgatcaacatcattaaagattatgtaaaaagttaaaaggcttatgagcctaagtttgttcctatattaccatatttactgaattttctggaaaagtaactttaataaagtttaatctcagaaattgtcatatctgttttcaagcattgtacaatttgagactgagtaatttaacaataagtaaaaagtggacatgctaaacaaatatgagagactacctactttttctggtcattcttgacttggaaaacggtatggaaaagtatttagttacatgtttgtttgtttttttcttacacagtacttacactaatttggtatcagggtatgcaacagtgaaatatcacaataaacaaatgtaagaacagcaattccatgcacttttgttttaaggaaatctttccggccaggcgcagtggctcatgcctgtaatcccagcactttgggaggccgaggcgggcagatcacgaagtcaggagatcgagaccatcatggctaacacagtgaaaccccgtccctactaaaaatacaaaaaaattagccgggcgtggtggcgggctcctgtagtcccagctactgcggaggctgaggcacgagattggtgtgaacccagaaggcggagcttgcagtaagccgagatagtgccactgagcctgggcgacagagcaagactccgtctcaaaaaaaaaaaaagctttccgaatcatttttgaagaatttagaaacttgattgaaaagcttattccaactatgatctgacactcaagactgtcagatttaggttgctgttaattttgtcatgagaatgtaaaatactaaaatctctaagtgaaaaatttgcatactagtgcttgttataaaggataatgcaaaaataaacttgggaactttgcattatgaattttatttttatatctacataagcatgagggaaagaactgtattttcagataattaaatccagaagagttacaaattttcattcgtcccaaagattttgtctgggtatttcttccttagctgtcgtcttgcagacaccatcgaagcatagatgatgcagccccaggagattaaaacgatggcaagcagcaactaaaccaaaaatcgcaaaggaggtgtgaaatctacctgatatttcccctcgcccccgtcaggttaccgttgccattgctaaggtgggaattaaagtaacaaagtcgaataaatggggttccagtggcgggtacacccagcagcccttacgtaagaagcggaagatcgtatcctccaggaagaggcggagtcgaggtgagggagtgaaatgcttaattcaggaatggattttggagtttctgggtgctgaagaaatagggcctttccgcctgcgggcccagtgagtcgacacggtggggrcccgcgatccccgggacttaccactgaataaatccastccagcgtgcgacgacttactggcttcatggtaaggaggcggcagcagtccgcgggagctggcgggagctgcgggccttacagtaacctcccaggcggtggctgccaggcgccagcagccatcttttagccgggcacgagcgcccgcccactcgcttcgtgcagcgctgtcgctggcctcttccgcccggagttggggggcggtatcacgtgatcgggggccttgcccgccttttagagaggggaataaacgagaaaatgttaaaaattgcttttttttttttttttttgccaactarggagataggcgtacctccactggttttctttctagttgcaatgcaatattaatgcaggataaggtgctgtcgtgtccatttaaaagttaatttgaaaaacaatccacgttttaaatattacgtctggctctaaagctggaagaattaacgctttctcccccgctccctcccccacgcctccccgcatctgataccacacgatttagatggacgttcgcctgttcatctttgacgtaaaaataccacccactcttttatatgtgacaaatcgttgtgggaacccctgtaaatcgagccattcttcagaaacgtatagcgtaatgtatatctctaagaagaaatacgtgggacgcgttacccgccataatgtatcagtcaagcaacaagtgtttgttgagcgtgtctgatgttcttgaactgccgcgcgtgagatactaagccccgagcacggcagtttggtgggcgagcgtaccaggttcagctctagaatgtttggggcgctcacatttgaggcctgaggagtagaatctggcaacgggccgcttaggctctagacgttctttatacctcgcagttatcttaaaagagttttagtctagatttcagggagtgggaaggggaagagcggagaaaaacgtggtctgtttagggaggagtccaggccctgttttgttaggttgtcctgtttctccccagcctggaggggatccctctctgaagactttataggatactggttgggctctggtttgggatcccgttggactcctggtgttgcttccgggaggcgtacaacaggaggtgagagacttcaagtccatctaacaattcccctatctagacactaaagataatttcctaagtttccgcagagtttggtaaggttgaaacgacatcgaactagttctcgtgttttccgggtaagttaggggcgaacattcagtcagtgtccccagtggctgagtaccagtaacaagatggggagggtcgcgctgccctcctccggggtctggagcggcgggggaggggccgcatttgggccggtgcgctgagccccgcccccgaggccggcgtccatctgctgcgcatgcgtgaggaagscgggtgttgtgttttgatgcgcgggagctggggggtgggtctcgctctctgccctgcttccgagctgccattggtgatgagccctttgcgtcacaggggtcgcagccgccgctggggtctccgctgtctcgcgaggagggtgaagcgcccccgcctgctcccgcttcggagggtaggcggagaagtcgccgggtacgccttcgcggatcctgccgacaccgacctagctttctgggctgccgggagctcgcggcgagcgccccagccaggcctgcgccggcatcctccgaggtgagtgagattcggaacaatgggacgcgggggtcggaagggccgtgggagttggcgctcccgcctggakcggcgcctcgggacccgagggttgcggtcatggcctgcggggctgtccgggcctcggcgggccagggccagggcccccgagcggctcctgcgcgcacctgtggattggtgcgggcaggcgagggttgcgcttcccacaagcgctcccgaggggcgcgagcctggccgtgtactggaaagagcttggtctcagggaaaagcaaaaaagcaatgagactgaatcgtggcgtcaccacttacaggatatgtgaccttgcctaggtcccttaaatccctgagcctgtctgtaaaatgggaataacaatatttaagttcgttgtggttatgtaatgctcatggtgcttatcttagtctagtggcagttctgaaccaaagtaaacgactatcaccgtggctttgggagttgggacttgtctgtgttgtgttaaacattctgagcagaaattgcccgtgacttgttcatccatccatttactgcagctttcctcatgggttgctgattgtaggctggaagggggcagtgctgagatgagccacatagtgatttaagaggaaaacggagtagaccttttgataggtaattttcaagattatttaagakwattaagaaacagctgcccaagatttaagttaatagtggtgagagctttctgggttttgtccatgaaatgcaaagaaagctatacaatcagctaaaatcaatcatacttgtctggaatgagtggttttagaggcgaacggttcccagccaattctttttgctggaattggattaaatttgataggatctggataaatttgataggatctactgagatcctgtgacttttgtatcttcttttggagttgattaaatgcagttcagagaggtacagtgatttctttaaggtggcaagaggtaggaaccagtttatttttaatacttgggtgatctttctatttcatctattcgtgaaccctttttagtcactttgcctagaaatattaagtataataattatattaagtatgatgattattttgttgttataaactatcctctgtctggacccatataatcagttatgggtgatgagctaccgaaattcacttcgtgttcrcgtaacatagagaacattgttgagttcttactgtgcatcaagcactgtgctaagggtttttatgaaatatgtcccgtcacacaaccaccttttcaattccattttagaattgagaaaacgtgagattttgagaaaaaacttcctccaggttacacacctactaagtggtggcgattctcagccttggctctgcagcaaaattaacatcactcccgcaaatgtaatcagcagatgattaaattttatatacagtgtatgccatagatgacttttgatttttattgatttattttttttgagacggagtcttgctctttcgcccaggctggagtgcagtggcgcagtctcggctcactgcaagctccgcctgccaggttcacgccattcccctgcctcagtctcccgactagctgggactacaggcgcccgtcgctacgcccagctaattttttgtatttttagtagagacggtttcaccgtgttagccaggatggtctcgatctcctgaccttgtgatccgctcacctcggcctcccaaagtgctgggattacaggcatgagccaccacgcccggccatagatgacttttgtagtaagtctaactttaattctacagagcagttatacttcgtttatatcattgtgcagtttttcaaatatccagtctcctgaaatgtagattcgagcttcctgattctttatctcccccatccattttccctagacgtgtgtccatattaattagctgaaatttccccgaattgttattatccttgttaaagccagatttgaggatttttcgggaaagggaagttttggcttaatcagtttatactaaagatggtgaacttcatttaggatttgggagacagtttaggaagtgtgactggaagaactgattgtctcctgtgaggaaatgtcctaattcctagagtgctaggatggaaaacccgtaacacaggcttcttacagaacctgaagcactgtgtttttcatcgggtctacctttgctacttaaattcagaacgtctcttgcagatcagccactcttttgtgtgtgtgtgtgtgtttgtgtgtgaggcagagtttcgctcttgttgcccaggttggagtgcagtggcgtaatctcggctcactgcaacctccgcctcccgggggttcaagtgattctcctgcttcagcctcccgagtagctgggattccaggcatgcgccaccacgcccggcgaatttttgtgtttttagtagagaccgggtttctccatgttggtcaggctggtctcgaactcccgacctcaggtgatctgcccgcctcagcctcccaaagtgttgagattacaggcgtgagccaccgcgcccggccagcaaatcaaccactcttaatctgtatctagtcatcccagtttttatgccttaatttgtatttttaaacagctttgttaagattacattccgggctgggcgcggtggcttacgcctgtaatcccagcactttgggaggccgagacgggcggatctcaaggtcaggagatcgagaccatcctggctaacacggtgaaaccccgtctctactaaaaatacaaaaaaaaaaaaaaaaaaaaaaaatgccgagcgtggtggcgggcgcctgtaatcccagctactactgggaaggctgaggcaggagaatggtgtgaacccgggaggcggagcttgcagtgagccacgatcgcgccactgcattccagcctgggcgacacagcaagactctgtctcaaaaaaataaaataaaagattacattccatccataaagttcacccktttaaagtttgtaggtcaatgattttttagtatatttacagagttgtacaaccatcacaataattaattgtagaacgttttcatcaccccagaaataaacctctttactgccccagcagcagccaccagcctcatttcatctctctagatttgcctattctggacatttcatataaaaggtatcatacaatatgtgggttcttgtgaattttttttttcattcatttagcataataaaaagtttcatccatgttacaacatggtaccagtactttgttcctttttattgccaaataaaattccatagtgtggatagaccacattttattagtctgttaatcaattgatgggtatttgagtttctccttttgaggtattatgactaaagttgctgtgaatattcatatacagtttttttgtgtggacaagttttcgtttcccttgggtatatctaggtgtgtaattgccgggtcatatgttcgacttcatttgcgttttaaaaaacattttaatttagtatttagtgatgattttgaagagctaataacttatttdatctacatgcattccaattgtttgatgtttctttttcttttttaaaatagagactggatctygctttgttgcctaggctgtttcaaattcctggcctcaagggtctcctgccttggcttcccaaagtgatgggattacaggcgtgagccaccgtgccccgcctctttgatgtttctgatgaagactgtttgtttgtttgtttgtttgttttgaaacagggtctcattctgtcacccaggctggagtgaggtggtgcaattatggctcactgcagcctggacctcccaggctcagttaatcctcctgcctcagcctcctgagtagctgggactacaggtgtgcccatcatgcccggctaagattattcttttcagctaatgattcctgtgtagaaatacaagaatgaattctaatttattattattttttaacctgttatggaggacattaccagtcattcattcaccttttactgtcaaagtggttaacaggcttataaaactagagaagggaagggtaaggtttcatttttttaaaaaaatcatactttgttgagattttattttatttgaacttcaagtttactacctaataattccctttaataaattcattttcagctgtaatttttatgtgaactggaagtgttcagaaaacactaaaattctatttcagagaactaagtgaagataaaatgtattaacttggaattcacgggtcttttttccaagtccagtaatcccttcattatatagaggagaaaactaaagtctagagtaatgtggttttcttcacattaactagagctagttctaggtgaagcctggtcttcagtccagatcttttgataacctctttgattccctcccaacttttctctgttccttccctctaccacacacacagtctctgaactgaaaggtttttatttttatgtgtgtgtttctttaaatttcttgagtaggcagattaaaaaatgttaaaagtagagggaaatgctgagaaggttgtgcagtattagggttttagactgtttatgaacaaaaaagcagtattatgtatttataatcctgcttttccagaccttccaggacagtgatgatgtttttgcattttcagtccagtaaatagaagactagacatacctggacccctgaagaaacgcttatttagcattaattgattctctattaagttatggttctgagaaagccaagatgccctaaagtgagcaggtttaatatgaaagctatggtggaatacttgtatttcagtcatgagtttttgttgtgggttttgtttattggtttttcttatagtttgttaaggccaatgagtctatttagaaaattacaattctgttatttgattaacttgaccccagttgactagtgatggaacctcctgtgataaaggaggtggaggaagatgaatattaggccctgggaaaccaagggcctagtagttttttgttgttgtttgtttatttgttttgagacagagtttcactcttgtcacccactgcaatggtgcagtctcagctcactgcaacctctgcctcctgggttcaagcgattctcctgtctcagcctcccaagtagctgggattacaggtgcctgccaccatgcccggctaatttttgtattcttagtagagacaaggtttcacaacgttggccaggctggtcttgaactcctgacctcaggtgatctgcctgccttggcctcccaaagtgctggattacaggcatgagccaccgcgcctgactccccaatagtcaatatactcaaaatgattagtataaaatgcagctttggagtttatgagataaagtcaaaacgcatactagatttcaagctctagcaaagttttgagccaatgtaaactgataaaacaaactaatctttaatattctagtcatccttatgggaaaggataatagggaaggggaccaaaaacatgatttcaagatattctgtggcctgacttttggattaaagaaaaaagctaaaggaaggcttattaggaatgctgaatggaatgagtgattaactgaatataatagtgtagtaataataacagctgacatttactcagcacctactgtgagccaggcactgcctcttggctgctttttcatttattatttaatcttcactaaaagtttcctctccctttttaaaattagctttctaaggttgaaaaaagaatctttcactaaaaatcataggattggtttaaacaggtgaactttctggtatgtaagttatgtcaccaaagttgttttagaaaagtacatacaaaatatcacagataaatcagtagtctgtattgttagtggcatatgtatatgaaaggtataaagccatgcatagaaataacatcaactgaggagtgtggtgtttttgttttttgttttctagagagtgataggaggggaagataaggggcataacataagtggtggatacatgggtatttggtactttttttttttatatgtcagatatttctcaaattatttttaaaaagaataatagaatgttacataatatttgagagctttactatgtagcaggtgccttttctaagggctttttacatcttcacaaaccctgtaaggcagattctgttatcactgacctgcagatgaaattaaagcacagagatactaactggcacatagtcacgctggtagtgtggaaccaggattcagtcttaggaaatctgacttcagagcttatgctttaagcactatattactatgctacagtgcccctttataaaataaaacaaaagtaatgggtcacttaagtattttcaccaaaataagtttcaaggtctttatttgcatttttgttgagactatttagtcattcctctattatcaggttactgatatatttctttcccttttacagataatggcatcagctgctaaggaatttaaaatggacaacttttcacctaaagctggcactagcaaattgcaacagacagtaccagctgatgcatctcctgattctaagtgtcctatatgcttggatagatttgataatgtgtcttacttagatcgctgcttacataagttctgttttcgctgtgtacaggagtggtcaaaaaacaaagctgaatgcccactatgtaaacagccctttgattctattttccattctgtgagggcagaagatgacttcaaggagtatgtcctaaggccttcgtataatggttcttttgtcacccctgatcgacgatttcgctaccgtacaactctgacaagggaacgaaatgcttctgtgtattcacctagtggtcctgtgaacagaagaacaacaactccaccggatagtggagtactgtttgaagggttaggcatttcaacaagacctagagatgttgaaattcctcagtttatgagacagattgcagtaaggaggccaactacggcagatgaaagatctttgcggaaaattcaagaacaagatattattaattttagacgaactctttatcgtgctggtgctcgagttagaaatattgaagatggtggccgctacagggatatttcagctgaatttttccgtagaaatccagcttgccttcacagattagtcccctggttaaaacgtgaacttacagttctttttggagctcatggatctttagtgaatattgtccagcatattatcatgagtaatgttactcgctatgacttggagagtcaggcatttgtgtctgatttaagaccatttttacttaatcgaactgagcattttatacatgaatttatcagttttgcccgatctccttttaacatggcagcctttgaccagcatgccaattatgattgccctgctccttcatacgaagaaggcagccattctgattcttcagtcataacaatatctccagatgaggctgagacccaagagctggatattaatgtagccactgttagtcaggcaccatgggatgatgaaactccaggaccatcttactcaagctcagagcaggtacacgttactatgtcttctcttttaaatacttctgacagttcagatgaagaacttgtcacaggaggagccacgtctcagatacaaggagtacaaaccaatgacgacctaaataatgacagtgatgattcttcagataattgtgtcattgttgggtttgttaaaccactagctgagaggaccccagaacttgttgaactgtcctctgattctgaggacttaggttcttatgagaaaatggagacagtgaagacacaagaacaggagcaatcttacagttctggtgatagcgatgttagtagatgctcatctccacactctgtccttggaaaggatgaacaaataaataaaggtcattgtgattctagtacaagaatcaaatcaaagaaggaagagaaacgatctacatcattgtcatctcccagaaacctgaactcatctgtaagaggagacagagtatattctccatataaccatagacacagaaagaggggaagatcaagaagttcagattcacgttctcagagtagaagtgggcatgatcagaagaatcatagaaagcatcatgggaagaaaagaatgaaaagtaaacgatccagaagcagggaaagtagcagacctagagggagaagagacaaaaagagatcaagaactagagatagcagttggtccagaagaagccaaactctgtctctaagtagtgaaagcacaagcagatcaaggtctcgtagcagtgatcatggtaaaagaagatcacggagcagaaatagagatcgttattatttaagaaataattatggaagcagatacaaatgggagtatacttattacagtagaaacaaggacagggatgggtacgaatcatcttacaggaggaggactctgtccagagctcattattctagacagtcttcaagtccagaatttagagttcagtccttttctgaaagaacaaatgctaggaaaaaaaataatcacagtgagaggaagtattactactatgaaaggcacagatcaaggagcctgtctagtaacagatcaaggactgcatctaccgggactgaccgggtgagaaatgaaaagcctggagggaaacgaaaatacaaaacacggcatttggagggtactaacgaagtggctcagcsatctcgtgaatttgcttctaaagcaaaggacagtcattaccaaaaatcttcatcaaaattggatggaaactacaaaaatgagagtgataccttttcagacagccgatcatcagacagagagacaaaacacaaaaggagaaaaaggaagacccggagcctaagtgtagagatagtttatgaaggaaaagctactgatacaactaaacaccataaaaagaaaaagaagaaacataagaagaagcataagaaacaccatggagataatgcttcacgttccccagttgtaattaccattgacagtgacagtgataaggattctgaagtaaaggaggatacagaatgtgacaatagtggtcctcaagaccctctacaaaatgagtttttggctccttccttggaaccatttgaaactaaagatgtagttacaatagaagctgaatttggtgtgctggacaaggaatgtgatattgccacacttagtaacaacttgaataatgccaacaaaactgtagataatattccacctctggcagcttcagttgaacaaactctygaygtaagagaagagagcacctttgtttctgatttggagaaccagcccagtaacattgtgtctcttcaaactgagccatcaaggcaattgccatcgccacggacatcattaatgtcagtatgtcttggtagagactgtgatatgtcttaaaactgccaaagcatttcattgagaattatgatgttataaaaaggaaaaaggaagaatgtcgtctactgcagtctatttaaagatgacatttggtgaaaactctcttcctccttacaatattttaaatgattttttttttggtgttaatttgtaaaaatcattatttgttcaaaatgtatgtcccaccctcaaagatatgcacttttaagtgaagaaaatgatactgctagcagcttatttaaaacttggggtcctttttaaataagaaaaattatataaattttagaagttatttcataaagccatacggtattgacatattwttaaggtagtcaatgagtatttttgaattttttttttttgagagttattctggaaatgtgttataagctaggagaatccctttggacagtctttatttttcttcttaaaaatttatatgattcaaaaccatttcttcaggttaaattgaggcattttaatctgcacagtttatcttctgccaaaataaaaatttactatttcctttatatacttgtttatctggactgccagtaaaacaaatgtgtattcaacaaaagaaaaaaaataaaacagtaacactttaaaacaagaatcagacattttcctatgcagtatttttttttaaagtttattttagtaaagttaaaatcttgaaagtagctaagggcataattatgtcataaatactgaacttcaggtgaacaaatactttatagttttaattattttctttgattttgaggagtatcttatttgctttctatcatcagtaaaaacagcatttaacttgctaaataaacatgaaaaacccttgtcatacttcttttacattggtagttctttcatataaagtggttatgttttatcttgttttagggatgataaaattacatctatgctgatgtaggattgccactgaacagtggagcttgagttaaatcttaattcagccttcagtttgcctttgccttgctactgtattcattctttattcagtagaaattgcagtgcctactatgtggcaggttctgcactaagttttggggtttttttttttgttgttgttgttgtttttttttttgagttggagtctggctctgttgcctaggctggagttcagtggtgcaatctcacttcaccacaacctctgcctcccgggttcaagcgattctcctgcctcagcctccggagtagctgggactacaggcacgcgccaccatgtccggttaatttttgtgtttttagtagaggcggggtttcactatgttggccagactggtctcaaacccctgaccgtgatccgcccgcctcagcctcccaaagtgctgggattacaggcatgagccactgcacctggcggttctgttttatcaatagagcaaagcagttatgctccctgccttgatggtgcttatggactgttaagacaaatatttatgtaagtataacattataaactatcatacattctctgaggagaaagtataattcccttacaagtgaatggggatctaatcatgattggacgtaatagttgaatccagaaagcaagccagcattaacgggggaggaattgctgttggcaaaggatccaaaggcagatgaagagcctagcatattccaagaactaaaagcaggattagacaaaggacagggtgggaacagtcttggtaggccatgtttagaatccgttattctaaggacagtagaaaattgtctaagaagaatctaaaattgatgttggcaatttttaagtaagctcagacattgagaaattgtgggaagactatagttgatcaagaaatacacattaagtttgaaattactttgtagttaacaatgtaatttttcttaagtattaaaaacaacactattccacatagtaatttcacatcatgttttcccttaaacatttaatgaaaacaatacatggcacatcatccttttgggtgttcaagccaaaaattgccaagtcttgattcgtccctgtccttcagcccccctcattcagctgccaaatccttggcactaatgatttttatgatatttctattgtgtctgtagcattcacatccaatctgggtagccaagatctttcatctgtgctaccataatgggtcagcttgcattcattgttggtctgcacccgctcctttcccccatccatttgtgatgcagcactgaaaagatttttttttctcttgagacagtctcactctgtcgcccaggctggagtacagtggcacagtcttggctcactgcaacgcaagctccacctcctgggttcaagtgattatcctatcccagcttcccgagtagctgggattacaggtgcccaccaccacgcccggctagtttttgtatttttagtagagacggggtctcaccgtgttggccaggctggtctcggactcctgacctcaggtgatctgcacgcttttgcctcccaaagtgctgggattacaggcatgagccaccgtgccctgccgatctttttaaattttcatttcatctgcttcttaaaatccttcagtagcttcctattttcttaggatattaaaagcagacaaaaaaatccaacagcatgatatggtttatagatttctgcctaattaggctctggcccatcttcagcatttctgtcacttcatttgggctcatgccacgctaggctgctccagggctatggaggtgctgctccgtactacgtgagagctttcattcgtggcagtttctgctggaaactgaactccaccctggctaaactagatttctgttaaaagtgtgccctcttcccacctccccaaaactgcttcaaacaactccaggctccttcagaccactcatcacaattagcagttgattactaaatgccttatctcccactagtctgaaagttctgtgaaactatgtatcagtgtactgctagactctttcactacttgacaaccaacatgcttaaaacactgggtgaatgaatgggacctggagaatttgaaaatgggctaaggcctgctttcaagaagctccactatctataaacttttagaataatagtatattcttttaacatgttcatctgaattcagtgtccatgccattttattttacctcaggttctcagtgtagtgacttgtcatttaatctatgtaagaaatgtaactaaaccattcatgcttccttactcatgatcatgatcctgaggttcacaacacgaaaatttgttactactttttacctcctagtccaagtagtggagttcagtcttccccaatttctaggctagccaatctaaaaggcctcactaactcatccagtctgtagtaaagatgggcagtgtgtacaaaggggtttacaggaggcaagctgacaacccacactggctgggaattcttcccttgtgaagaataattgcagtcccctgccagtgcaggatgtagacatgctgagcaagccagtagcacatctctggatgcagaaaaaattttggaaggtgctttggggtgctggaacccaagtgtgatctggtttaggctgttggcactcccagtattcccaccaacaggggcaaggaatgggaagtggagagggaggagtttccctgtgtcaaaacccttgatttcctcagcattcagtgtggatgcacctttagaagagtatagagtttagaggggtataaaataaaaaggatatgctttgtttttgttttgaaacttaaaatgggagggagagaggaaccttttttggaagagagccccttgagaaggaaaggttgactaatgaaacaaagttcctgaatgagaaagatggtccagagcacagagaaatgaaattagcaatggacaagcaaaggcaagtcttactataaaatggcaggaggtaaaaatagacaaaaaagcatttgtgggtagatgcattaagatgaggtaatacatgccctaaagcctctccttgctctatgaagtaggaagaatgccatcttctgagaaggttggatcatgaggaggagtggaaaaaatgccccttgaaaggcacagagagagggttaagaattgctgattagtgttgaggcctcacctgagatgggatatttgaatttgtgggacactatgatttgtgacttctttttgtcccaccagcattcaacattggaagtagaagcagaaactaatgttggacctatagtattcatttagtatttgtactgagcaaatgaataaatgggtggatttatgattggatgttctggatgtgagcagtaaaaggacaaaggggcaagggaattgagggatagagtggcgagagtagcggaattgatgcattctgttacctaggctgagtagggagggaagtgaagctatgacatggccaatatacttggagaacagggagagtatcaagggattcattttccaatggggttccagtaggtacaagggcaggagtaagaagacaaaatatatatattagagagtgcctaattgtaggcattgttggaagtaggtgactgaaattgaaacaggtgaagctgaaggtgactggaattgagaataatgatctgcgaggctgtaggtatatcctcaacaagaaaggcattctgtgatggcaggagatacaggatggagaagaaaatagttgtattgtgattatatcttcctttaaactatatttgtcttcctccacagcagcaggcatgcagagaagatttaaaatgtgctgaataaatgattatttcctcattcttggtttttagtcaaaacctgaatcagttattagaaaactgtgggatatggccattttaaaaaaatacagtaggattagttgttacaatgtcatgaaaatcggtaagttgtttcctattttacctgcaaagatattgggcgatggtaaataacattggatctgtccttgaagaaagcaagaggcaaggaaatggagttcaaattaggctaagctctgaggccaaattcctacctgtagaatctgtaactgtggttgctctagaacattgggtaataagggggcaaagttaggcatcttctacaatttgcttggagtaggctggttccagcttatctgcatgactgcactgtaaataggtaaatagttctctcctggacaaggggatatccctttgcttttctatttgtaaaactcatttattcatcaggcattgagtacatagagtccaagagtattctaaatgctagggatataaggatgaataggatggaactaacaggaatcttaaaaaaggtaggaatggaacaattagatttgttcttaagaaacaactagtagtaatgtagaagaaggttttgagtagggaaagcctcagaaaaagactgtttaagaaggtcttgtcttgatgcagtggttcatgcctgcaatcccagcactttgggaggcctaggcaggaggatcgcttgaatccaggagtttgaagctgcagtagccatgatcacgccactgcactccagcctgggtgaaaacctgtctcacacacaaaaaaaagaaaaaaaaaaaaagctctgacaagtagctcaaaccagatatcagaagggcctgtacaagaacagggacaataaggatccagagaaggggctagattggagatttctgaggtacacaacacaatatttgggtacaatttaaatggagatgggctgtgaaggagagggaaaagtctgggatgaccagaccttttttttttttcaatatgagagttggatgcatggtgataccaatatccatggcgagaaataggaataggaataggaatagtctggggaggaaaattagttgtttgaaacgaagcagcctggagttgtgctatagtagctgctagccatatgttgatattaagcacttaaaatgcggctggtaaaacctaggagttgaactttaaattttatttggttttaattaatttaaatagccacatgaggctagtggctaccacattctttatttttaatttatttattctttttagttgggttatgtttctaatccactcttttttttttttttaatgttgtaaaggtatacaacattcccaccatcacagatgaaatagaagatactcatcaggaggaaaatttccagtgggcatctgaaaattggagtgtgaatcttggaggcaagattggggctagagaaatgatttaggagttgctgtgaaacagagtagtactgaggctgtgggaggatgagatactccagagaggaggtagagcaagagaagcagacgtaagtgagaattctagggaacataatatgaaaagttggctggcaacagaaaagaaactttcaaaagaggccaagaagtgtttcccatagtcccacatactttctttgcctcttcaattttatgttgtgtctcctgtatctaatacagtgccctcgtcactatggaacatagactttttgagaggttaatcttatttttaggttcttgggagcacctcactcttactttcatgtgatgattatgttagaaaccgttgctttggtggagcaggttaggctgcctccaaggaaatctaataggatttttagaatataggactgggaagtaccatctttagattctactctatcagtcactctcctttgctttccttcatgtccagttatgattttccagataatgttttaatcactctccttgcaataccctccaactcacttgcccttctttctttcatcatttacctactttaggagttgggaaacttttcctctagggccatacacaggctgtgtcacataatctttgtttttttctacactttttttcaaattgaggtggagctttgctttgttgcccagcatggtctcaaactcctgggttcaagcagtc

SEQ ID NO: 97941 - DNA, 44993 bp, Homo sapiens
agccaggcatcttggggtgtgcctgtagtccctgctactccagaggctgaagtgggaaggatcacttgagcccaggaggttgaggctgcagtgagctgtgattgtgccattgtactccagcctggtgatggagtgagatcctgtctcaaaaaaagaaaaagtgaataaaataaaaaataaaactgatacagaggcaagagattgtggtaagccgtgtgtgtgctctgagatactcagccgtcccactctaccccctctcactgcaaggccagctcttatcatccacagagagtccaggacccagctctctcctccaggccctcactaaccctcctgctacccctgcctccatgtccccagttacagcctgaattatccacacctaaattatttaggtgagcctctcaggtctgaaaatgggggtgggaaatggacagagaaggctgagaaagaataaggaggacaaaaaaatgtcaaaatcctctggtctagcaagtgcttggctgggccctgggaaccacacaatgaagaggctgctgtggccagaaagagaaaagatgggatagcaaaagagatgctggcaggaagccacgtgctggggagggatatacagaaggcacttgcctctcccctctgaaaactgagcctagtatatatacaacaagtgctcacacagaaaatgaacggcggtgccaggcgcggtggctcacgcctgtaatcccagcactttgggaggcagaggagggtggatcacttgaggccaggagtttgagaccagcctgaccaacaaggtgaaaccctgtctctactagaaataaaaaattagccgggcgtggtggtgggtgccgataatcacagctactggggaggctgaggcagaagaatctcttgaacctgagagacaaagaggtttcagtgagccaagatcatgccattgcacgccagcctgggcaacagagcaagactccatctcaaaaagaataaaaaaaaaaaaaaaaagaatgccaggttgctcacgcctataatcccagcactttgggaggctgaagcgggcggatcacctgaggtcaggagtttgagaccagcctggccaacaaggcgaaaccccttctctactaaaaatacaaaaattagccgagtgtggtggcacacgcctgtgatcccagctacttgggaggctgaggcaggagaatggcatgaagccgggagacggagtttgcagtgagccaagattgcgccactgcactccagcctgggcaactgagcgagactccgtctcaaaaaaaaaaaaaaaaaaaaagagaaaatgaaaatgaatagggactttgccacttgggggacattaatagtgtctgaaggagattgtgatctttgggggacaaggaatagagggggaggcttatacagactttgagagaggagagcacaaagcaaagggcaattaggcaagaaagaagtgaacagatcactgtggttccctttacataaggatgaggccctcgtggaaaagagtggaagggaggggaactctatgttgtttttcagcaagtcattccagctcattgaaatacctcctatgagcctcccttccttcccccaggctgaggatctggcaacagaggctgaggtgaagggaggtgtggctgcatgcccagccccaggggccacagggcctccacccatgtccctgggattcctggcttctaagtctcagtgtgaagagtctactggtgaatgaaagagaaagaagagaaagtgttccctggaaagcagtgctttagcccaaactttactgcatacgcacagggaatcacctgggaaccttgttaaaatgcagattttgattcagtagctctggcccggggcctgagagtctgcgtttttagccagttttcaagtgctgcctatgccgttgggcatggtccagggaccacaccttaatctgcaaggtgtctctgtccttagcagctaccgtgatgcccagcacaaagcatgcttctgaaaaattatagcaaatgaatgaatacatgaatgaaaaagtgagttgagaggtaggactctccactacttaaatcaccatatttgttaaaatatgaattcccataaaccaaaaataaaaaataaaaaataaattcccaaccccttggagtttctaaattagtaagtgtgagatgaggatgggatatttacattttagacacgccccttaggtgatttttccatcagaccagtttgaagaacactggtctaatgagtaggatggttggactctgaggtttgagtccaagctgcacaaagatgctcaaggggaaaaaaaatcagggactacagagtaggggtgggaaggcccttgagacagttgctgaaagagaccagggcttacacatgactcagggccctcgggggtggggaccaggatgccggagggcttctctgtctcaccacttgaagatgaggttgagccactcggtgatgaggctgatccagagcaccgcgatgcccacacggcgggaggcgtagtaggccgcggggaagtagaacagaaagaggatcttgggatcgcccagaaaggtgatccagagccacacgttctccagccaggctagctggttctgtagcgcctcggctatcacgatgcccgcgcccagcgtggactccatggcggcccagctgccgaccaggccccggcttgctccagggcggaaaccagagtccaggcaacgaagcagcgtcgaccctctgatctccaaagcccacccctctgagccccaggccccgccccgccagcggtcaccaccaagccccgcccccagcagtcccccgctcctgcaagaccggcctccagccggtactgtttcctcctgcgctctcctccggttttcctccctactgggcagcgcaggggacaaacctttgtaaaggcgtttcctcagggccccacgtggccactgttgcaggcacgtgggcagccggctagcggcggcaccagtgcggttccgggtcaggggactgactagccggcgggccgcgcgcgctcccagcgtccctgctccgctgatgcgaaggcggatatataatctccagggccgggattctttccccaccggacctctcttctccagcaccaatacccaccaaaaaaaaaaaaaaaaaaaacaaacagcaaaaaaataaataaatctgagatcctttggagaaaaggctgcagacagcccctcctcctgggagctgaagcgggatcctaaatttgcatacacccctaatcagttcactccttcctccccagcctcaagactccccctttctaattcgcctgctattaatctggaggctgacagataagtctcttgattttgaggggtcttccctaaaaaggcgaattctcacatatagcgcaaagtcacacttccttccagttcttcccttgcttcccccacccccatcctcctgccatccaaaaccctgcttaggcagatgaaaccaagagatagtaacagtgttggtatgggaagaggattggcacacacccgcgacagagtttgaaacagtcatctgggggaactcacatagaaaatagaaatctcagctattctaggcgaggtcctgcctagaatactgttgaacagtgtctccttagtttcttcctacctcaatcaactttgttcttgaaaagttttttttttttttttttttgccgggcgcggcgactcacacctgtaatcccagcactttgggaggccgaggcggtcggatcacaaggtcaggagttccagaccagcctggccaacatagttaaaccccatctctactaaaaatacaaaaattagctgggcgtgggggcacgcgcctgtagtctcagctactagggaggctgaagcaggagaatcgcttgaacccgggaggcggaggttgcggtgagccgagatgggaccactgcactccagcctgggcgacagggcgagactctatctcaaaaaataaaaaaaaataaaaaataaaaaaggtgctgggcacagtggctcacccctgtaatcccagcactttggaaggccagggtgggtggatcacctgaggtcaggagttggagactagtctgaccaacgtggagaaaccaaaccgtgtctctactaaaaacacaaaattagctgggtgtggtggcacatgcctgtaatcccagctactcaggaggctgagagaggtgaatcgcttgagcccaggacgtggaggctgtggtgagccaagattgtgccattgcattccagcttgggcaacaagacagaaattccgtctccaaaaaaaaaaaaaggtgtaaaggagggaagctggatataaatcttcgtttattgcctttgtagtgaacagaatttttattcctattacaatgattataccaatacctccaacaccaggaagtttttttttttttgagacggagtctcgctctgtcccccaggatggagtgcagtggcgcgatctcagctcactgcaacctctgcctcctgggttcacgccattctcctgcctcagcctcccaagtagctggcactacaggcacccaccaccacacctggctaatttttagtatttttagtagagacggggtttcaccatgttagccaggatggtcttgatctcatgacctcgtgatccgcccgcctcggtctcccaaagtgctgggattacaggcgtgagccactgtgcccggacaataccaggaagtttttaattgccgaagagaaagcctacattgtttaccgagtctttgaggtttgccctcaaccttaagcagcctactcccacactccgctttgtaatatttctgacctatacattccttgaaatcaccaagttctctcctcttaggggtcctggcccgtgcagttccctctgcctggaacatggccactctttttccttgccaatccttcaggtctcagtagagatttttcacttcctccaagaaggcctttcctaatggctcctagaagtcttatatgaaaacctataatcacgattccatataaaaagtggaaaactggaatggcaattatgtatgatttattatgggggccagaacaaggatgagaggcatgaaagttctctgaggccggccacatggctcacgcccgtaatcccagcactttgagaggccagccgaggcgggaagattgcttgagcccaggagtttgagaccagcctggccaacatggtgaaaccccatctgtactaaaagtacaaaaattagccgggcatggtggctcgtgcctgtaattccagctactccggaagctgaggcaggagaatcgcttgaacctgggaggtgcgggttgcagtgagccaagatggcgccactgcactccagtctgggtgacagagcgaggctctatctcaaaaaaaaaaaaaaaaagttctctgaaaaagcacactatgaaggagcagaatttttattcctattataatgagtgtatcaatacttccaacaccaggaagtttatgtttcttggagggcaaggaaatacttttgaactttgttcaggttaagccgcgccaagactggccctttgcttccctctggactagagaaaggtcaacctgtttcttatacatgaagcgaggatccaaaatttctatagtgagcggtgggtgggttagcgacagccattggtggtagtagggcttgaaaatgcacgctcatagtcctttgcataagattaagaaaacgactgttttgtacatcagacggacattcaagggcaggggcgcaaaacccctcctccaagcccctttttgtcactatccgctgctcctcattcctgccttttgcctggctttctgggagagagggcaaaaagggagaaggggaagtgtcttgacttctaagagtgatgggtgactaagggggaactaccatttattaaagacctagtacatgccatgcacttatacccgttaccgcatttaaacctcctaactatgaggtaggtattattatgtaacagagtatagcagtaaatagcaccgtccttggaaataggcagactgtttttgctagttgtggaaccgtggacaagtttagtctaaaacttagtttatgtaaaaggaggacattgattcctacctcaaagggctgttagatgctcaagaagtgacaatacaaatgcctatgaagaaacaggatcaggtaatttgcttgctcaaggtcaggtgatttagtaagaggctgacctcsgattctggttccagcttatctaactccacagccaatgttctttccactatcactcagtagttataatcatctttttttgtttgtttgtttgttttgagacagagtctcgctctgttgcccaggctagagtgcagtggcacaatcttggctcagtgcaacctcygccttccaggttcaagagatcctccagcctcagtccccctagtagctgggattacaggcacgcgccaccgtacccggctaatttttgtatttttagtagagacggggtttcaccatgttggccaggctggtctcgaacccctgacctcaggtgatccacccgcctcggcctcccaaagtgctgggattacaggcgtgagccaccgctcccagccttataatcatcttgtccaagtatcgttaagtcctctgaggctctgattcctcatatgcaaaatggggttaacatattttataaaattcattcattaaactcttgtgtggaaggtgtgcatataatggagactgcagctccctcctctttccccttttcattccacgtaggtcatttatccttaacttctaaaatggactctacaagcacttaaccgagcggacgcagctatacaaatacttttcagattcccctttatttcctcttctttcccactccacctaggatcccgccccaaccagcgccaggccacgccccggcgtgtgacgcaagcacgctccgtgcgcgccgtcgcgtcgcggcgctcactgggggcccggctttcgcccgctgctgccgccgccgccgccggccgcggctgcactcccaagatggcggctcctccgggcgagtacttcagcgttgggagccaggtgtcgtgccggacgtgccaggagcagcggctgcagggcgaggtggtagcctttgactaccaatccaaaatgctggctttaagtatccttccctgcgtgaagcccgagtccgggccggcgtgtaggtgcggtggtcggggggtgggggacgacggcggcggctggggctctctccgggcctaggggcgaccggctaccgcggcgcccggggcgcatgcgcacggccctgagctcccctccccctcccgcgggcccttcggtcagctttggggatcctgtctctctctctttgcgggagctggggctttaccgaggatcagtgggtggaggagggcttgacacggggatggctttttggggggaacgttatgagaggggacacagtaattaggagagggggtggtggtgggagggggctgatggattggagcccggatggaaaggaggggcgggtgaaatattatggggaggggtgtttagggtaaggaactgctggtagggcaaaggtatggaatttaggagggcatgtgcactgatgggatttcgtccaaggaagggcggtgggatggtgaccaaattggtccttgcctgttttgggggagagtaagttcagggcagagtttgtatctgagctagggatagtggcttgtttcgctgatgcgtgtgtatgtgtggtgggggggctgtgctgatttttaggcttctcggtcatttggaagttgctgtttaggggatgtttgcactggaaacctgttccagagagggcttgccaggggcttatgtggtttggggatgtgtgagttacaggtgaaagagtgaagttctcatgctgccttgatcagtccagcacatggagtccttttacgtagtagcagcctcccttttgaaagtagcaatgttaaactgattggaaaaggtggcctgcttctttggggtggaagtgacttctgaattactccaggaaactcagtcttggaaatgaaacacttccttgttgggataaatgtgccacggcttccctttttatgtgagccacaggtgggtttattggaatttttttttggaggagtaattttttatggcatcttttttttttttttttttttaagatggagtctcgctctgtcgctaggatggagtgcggtggcgcaatctcggctcactgcaacctccgactccctggttcgagcgattctcctgcctcagcctccggagtagctgggattacgggcacgcgccaccacgcccagctaatttttgtatatgtttttttttaacagagatggggtatcaccatgttggccaggatggtctcgaacttctgacctcgtgatccgctggcttcagcctcccaaagtgctgggattacaggcctgagccaccgcccggcttttttttttgttgtgttttttgagacggagtttcactcttattgcccaggctggagtgcaatggcgtgatttcggcttactgcaacttccgtctcccggattcaagcgattcttctgcctcagcctcccgagtagctgggattgcaggcatacgccaccgtgcccggctaattttttgtatttttagtagagacggggtttcaccgtgttagccaagatggtctcgatctcctgacctcgtgatccacccgcctcggcctcccagagtgctgggattaccagcgtgagccaccgcgcggcctaagaatagttgcttttttaaaaaaataagaggttacacctggaagaaataagaccttttacattagtggtttagttggaagggtcttgtaactaggaattacttttttttttttttttttgagacggagtctcgctctgtcacctaggctggagtgcagtggcaccatctcggctcactgcaacctccgcctcccgtgttcaagtgattctcctgcctcaggctccagagtagctgggattacaggcatgtgccaccacacccggctaatttttttttttttggtagtgacggggttttgccactttggccaggctggtcttgaactcctgacctcaagtaatctgcccgcctcagcctcccaaagtgttgagattacaggcgtgagccatcacgtgagcctggctgaattactcaacttttacttgacatacagtaggctcttaaatggttggagaatgagtttgtgaatgaatgaatggattaactggctgggtcaccttgggtgaatttcctttccagtgtgtagttttctcctctgcaaaatgggaaagctcacatctgaaagagtaaaaagaatactgtgcagacacagagagtattatacgaagaacagaaaggtctagctcttttgtctggctcataggttcaagacaaacgcattaaatctgcattatgcctctccataaagccagtagagagaaagtgacagaactcctttggaagcttccaaggatttgggcaggaggaaggtgacaggcagagatttcctgaggagaaccgtgattcttataaggccctcatgctcctggcctgccttttacaagccttgtgtgaatcgtgttttmtatgccccttttgggatgtgtcagtgcctctgcttgtcmtatttttccttaacttttttttttctcaccagaatgtccctcttccagtggaaagcccaaccatgcagacatcttgctcataaacttacagtatgtttcagaagtggaaataattaatgaccgaacagaaacccctcctcccctagcttcactcaatgttagtaaggtaaggactcaagggcagatctggctctctaaaatggtgggaaagatgagtctcattgagtcttagtgayacattkttgtctattttttattttttaaaattgacttaaaattgtttgttctgatatctttttaaaaaatgtaggtttagtttttctctttattcctggatgttatcagtagatcttaagaagtagcttaactcccaaataagttgagagcttgcttctgcctttatgaaagaggactttttaaatcttggagttcatgatgaactaatagtgctgctggggtttgggtggtggcgttacctatgaatgtcttcaaattgtgtatatgtggatgtgtgcatacgtgaatatatgcattttctgcttgaagatctaaagtgtttttcagattctcggagggtttcatgacttagaaaagtttgaaagccactgtcttaaaggttcttttttgtctttatgtttgaattttgagttctaacagttacatgcttagcatattttaatcttgcacataaaagttgatctctgggaacccccaagtcacttttgtgtgtgtatgtgtgagacagggtcttgctttgttgcccaggttgaacttgaacgcctgggctcaagtgaccctcctgcctcggccttctgagtagctgggattacatgcatgcgtcaccatgcctgcccaagtctttctttttattggagccactgcgcccggcgttttttttgagacagagtctctctgtgtcgcccaggctggagtgcagtgacgcgatctcggctcactgtaacctccgcctcccaggttaagtgattctcgtgcctcagcctctggagtagttgggactacaggtgtgtgccacgacgcctggccaaattttttttttttttggagacargcacacactgtcacacccggctaatttgttttattttagtagagacggggtttcattctgttgcccaggctggtcttgaactcctgagctcaggcagtctgcttgcctcggcctcccaaagtggtaagattataggtgtgagccactgctcctggctcaatttttgtattattagtagagatggggtttcaccatgctggccaggctgatcttgaacttctgacctcaagtgatctgcctgcctcagcctcccaaagtgctgggattacaggtgtcagccaccatgcccggccctaagtcacttttttgacaattccgtttatttagtcaaaattgaagttgatcataataatgcctcaagccctgtcatagcctgtgctgtcccctgtacttggaacatttttccttccagaatgactggagccttaccacccatcagcactcagttaaatggcacgtcttccaagaagtcttctctgatcacccaggctgaagtaatttgcctgcattattctctctcatagtaccttgtccttcacagttaaggtgaccatatcatttgtagtccaacctgggacatttttgagagtaaaggggaatgcttttattttacacagggacaacaggtatagattaggttaccctattcatagcttttttttttttttttttttttgagacggagtctcgctttgtcgcccaggctggagtgcagtggcgccatctcagctcactgcaagctccgcctcccgggttcatgccattctcctgcctcagccttcctagtagctgggactacaggcgcccgacaccacgcccggctaacttttttgtatttttagtagagacggggtttcactgtgttagccaggacggtctcgatctcctgactttgtgatccgcccgcctcggcctcccaaagtgctgggattacaggcgtgagccaccgctcctggccatagttgtttacttgtctagtgtctgtctcactaaactttattctgcagggatggggaccatacctattttatttactattgaatatacagagccttgcacagagtatttaataaatatttgttggatgaataagatgcctccaattttagtagcaggtgcttttcattaagtctcttgaattaatgtggtggaagtttttccctctagaggaatcttgcaataatgtgtattactttgcctctcttgggaatgtggtgtgttctgtacagttcagcaaagcaaggaaacacttaggcaactaaaataatagagggtaactgatgctgaggctagtgaatgtcgttacctcagatctggagttcctatcttgtcagattctagggaaatgccacacaktttttagtgatggccagggacagatttggaaggctattgagttcatatgggtgttgtcttgtatgggatgtcccattctttgaagcttataggtttttgaaaccttggcttagtaatataccttctaccagagtataggagctctttgagtgtcttctataagctcatgaaattttaagacttgttaaataatttattccttggtgtttttttttttttttttgagatggagtttcgctcttgttgcccaggctggagtgcaatggtgcaacctcggctcaccgcaacctccgcctcccgggttcaagtgattctcctgcctcagcctcctgagtagctgggattacaggcatgcacagccacacccagctaattttgtatttttagtagagacggggtttctccgtgttggtcaggctggtctcgaactcccgacctcaggtgatccgcccgcctcagcctcccaaagtsctggaattacaggcgtgagccactgtgcccagcattattcctagtrtattaaagaaccaaataggctctgagttattttttggtgtttatagggtatgataagtctgtcactagatctttagtgagtagtaaagatctgaaagagaggtgattttctgaagttagaaagttggctcttgtgaccaatgagtgccaccatttagagggggtggggtagtgtggatgggactgttaagcaggagctgttaagaagcagttctcttcttatgtttgacctcaggtagatatagctcttggttagtttgtggattatctttgcctttagggttttccttgtttactagcattgttgtaaactagctgattacccagtttttgaggaaagcagcaggaagtaatagcttggggaacaccagaaatctttacttttcttactctgtggcctgcttgccaaatcttgaaagaggtttgctgggaagaggagtcagaaactaaaaactaaaattaggttggagggttatctttggatttcgtttattcattcttccgtttgcagagatgtttatgagtaagctatattggctttcccttgaaatcaaccttttaggatgctttgcgattcctttttggagattgacttagaattagagagagccttttgggctactgctgaaaacagctatttcgggcagctattaacatgttgcatgaatgacgtgaaaagttagtctcatttttaagatcacggacttgagtttttcttaagatggaggatcatttaagcatatggaagggaactaatgtactctgggatgtctggaagaaaactgttgaagtttcagttgcttgcagtctggagaagcactagcctactctatttattttattttatttatttattttttgagacgaagtcttgctctgtcgcccaggctggagtgcagtggcgccatctcggctcactgcaagctccacctcccgggttcatgccattctcctgcctcagcctcccgagtagctgggactacaggcgcccgccaccatgtccggctaatttttttgtatttttagtagagacggggtttcaccatgttggccaggatggtctcgatctcctgaccttgtgatccgcccgcctcggcctcccaaagtgctgggattacaggcttgagccaccacacccggcctactctaactttagtcaaaggtatcatcacatattggcccatcttgctgacatagtaagtgatctgcttaattaaacctgttgataaaaaccggatatttgttgactctgacctagcaggaaatggaagagaagggcttatacaggaaatacttaataatagctcaactagggaaggtataaactagcaacttcttggaaattggcctgttttgctttcgaatgatagttcacttcaggctaagaagtcttatttctatctccagcagtagcatgtaagaggaagcttgagagaggacagtagggttgcagtagggggaattcttttttttgagacagggtctcagtccattgcccggtgtgatctcggttcaagcgattctcctgtctcagcctcctgagtagctgggattacaggcgcctgctgccaccatgcccggctaatttttctatttttagtagagatggggttttgccgtgttgaccaggctggccttgaactcctgacctcagataatccacctgcgtcggcctcctaaagtgttaggattataggcgtgagccactgcacctggccaagtcccctgtttttctattactttgtgtttagcccaaggaactcatagtttggcaacatgaagtaccctgaataatgtacaatgctaagttatgtttcgtgtgtgtgtgtatgtgtgtgtgtgtgttctgttttttagagatatagtctcattctgttgaccaggctagagtgcagtggcatgatcataactcactgcagcttcgaactcctggctcatagcctcaagtgatccgcccaagcttcctgagtagctgggactacaatctcccatcaccacacctgggtggttgttttgtttctttttagttagtctcgcactgtgcccaggctggagtgcaaatgatgcagtcacagctcaccgcagcctcgacctccagggttcgctcaagtgatctttccacctcgcctcccaagtagctgggactaccggcacaaaccaccacacctggctaatttttctttcttttttgagatggagtcttgccctgttgcccaggctggagtgcggtggtgccgtgatctcggctcactgcaacctctgcctcctaggttcaagcaattctcctgcctcagcctcctaagtagctgggattacaggcgtgcgccaccatgcctggctaattttttgtatctttagtagagatggggtttcaccatgttgaccaggctgatctcgaactcctgacctcatgatccacccgccttggcctcccaaagtgctgggtttacaggcgtgagccaccgcgcccagcctagtttttttttgtagagacagggtcttactgtgtggcccaggatggtctgtaactcctgggctcaagcaatcctccttcctcggcttcccaaagtattcgaattacaggtatgagccactggcccagcccctaggtaacgtttctaagtaaagaaaaacatctatgttctgtggtcaggggcagggtagtctagtagaaaagacttaggaatgaaccaagtagatcagtctttaaagtcattagacttggcagatgttagttaatgtctcccaaattattattattattattattatttattattttttttttgagacggagtcttgctcagtcgcccaggctggagtgcagtggcgcgatctcggctcactgcaagctccgcctcctgggttcacgccattctcctgcctcagcctcccgagtagctgggactacaggcgcccaccaccacgcccagctaatttttttgtatttttagtagagacagggtttccccgtgttagctaggatggtctcaatctcctgacctcatgatccccccatctcagcctcccaaagtgctgggattacaggcgtgagccactgtgcccggcccagatttttttattgtagctaactaatgctcattgaattatgggatgagataaggcaggggaaggagggcattgtgacaaagggcccatagaagatttatgccattacactaggctctcacttaacgtctttggtaggttcttggaaactttgactttatgtattattattattattattactttgttttttttttgagacagagtctccgtctgtctcccaggctrkaatgcagtagtgctgtctcagctcactgcaacctctgcctcccaggttcaagcagttctctacctcagcctccggagtagctgggattccaggcatctgccaccacagctggctaatttttgtatttttggtagagacagggtttcaccatcttggccagggtggtcttgaactcctgacctcatgatccgcccacctccgcctcccaaagtgctgggattacaggcctgagccactgtacctggcacattattatttatttttttaagatgaagtctcacccaggcacggtggctcacgcctgtagtcctagcactttgagaggccgaggcgggcggatcacgaggtcaggagatcaagaccatcctggctaacatggtgaaaccccgtctctactaaaaacgcaaaaattagctgggcgtggtggcatgtgcctgtagtcccagctacttgggaggctgaggcaggagaatggtgtgaacccaggaggcggagcttgcagtgagctgagatcgcgccactgcactccagcctgggagacagagcgagactccgtctcaaaaaaaaaagaaaaaaaaagtcttactctgttgcccaggctggagtgccatggctctatctcagctcactgcaacctccgcctcctgtgctaaagcagttctcctgtctcagcctcccgagtagctgggagtacaggtgcgccccaccacgtccgtcttatttttttatgtttttgagacagagtttcactcttgctgcccaagctggagtgcaatggcacgattacagcttaccacaacctctgcctcccgggttcaagtgattctcctgcctcagcctcccaagtagctgggattacaggcatgtgccaccccacctggctaattttgtattattagtagagagggtttctccatgttggtcagactgttcttgaactcccgacctcaggtgatttgcctcggcctcccaaagtgctgggattacaggtgtgagccactgtaccaggctgtattttttttttttctttttttggagaggagttttcctttgtcaccaaggctggagtgcagtggtgcaatctcagctcactgcaacctctgcctcctgggttcaagcagttcttctgcctcaccctcctgagtagctgggaccacaggcacacgccatcatgcctcccaatctcaagcagtccttctgccttaccctcctgagtagctgggactacaggtgtgtgccaccacgtccagctaattaaaaaaaaacaattttttgtcrgttggggagtagagacatggtcttactatactgccaacgctggtctcaaactcctggcctcaagtgatcctcccacctcagcctcccaaagtggtggatttacaggagtgagctactgtgcccagccagagttcactttttttttttttttttgagacagagttttactcttgttccccaggctggagtgcaatggcgcgatctcggctcaccacaacctccgcctcccggtttcaagcaattctcctacctcagcctcccaattytcctacctcagcctcccaagtagctgggattacaggcatgcaccagcatgcccggctaattttttttttgtatttttagcagagatggggtttctctgtgttggtcaggctggtcttgaactcccgacctcaggtgatccacccacctcggcytcccaaagtgctgggattacaggcatgagccaccacgccctacccagggtacctttaggtatcatgtcacattgagggaagaattcgtttttattctgaattctaccagtttcacggttaaaattcagtataaccctatggctttctggtgatttgagggttaaacccaagtatcagtaaattcctggagttgatatgataattattgcattgtggcctatgtttgtggacatagcctattagcagggctcttggttatatctttttatttatatatatacacatatattatatatataatatattttatatatattttatatattatatatatatattttatatatatatatttragacagggtctcactctcacccaggctagagtgcagtggtgtgatctctgctcactgcaacctctacctcctgtgctaaagtaattctcttgcctcagcctcctgagtagctgggactacaggcatgcgccacaatgcccggctaattttttttttttttttttttgtatttttggtagagacggggcttcaccatgttgcctaggctggtcttgaactcctgagctcagatgatccacccacctcagcctccgaaagtgctggtattacaggtgtgagccactgtgcctggccctttgtcatatcttgaccctaatatgttgaggtatggacgtgtccagtaaagtcagagatggcctggccagcctatgtttagctatgtatactttactaggaagtaagaaggtatgtgaatgtgggaaggaagaaccacttgtctaaggcaagcaagtttttactacagatagtttttctggcttctagaggctgtaacctcatgattaacttagttaaaaaatgtttctggctgggtgcagtggctcacacctgtaatcccagcactttgggaggccgaggcgggcagatcacaaagtcaggagtttgagaccagtctggccaatatggtgaaaatactaaaaatagaaaaatactctactaaaaatgaaaaattagccgggcgtggtggcacacgcctgtagtcccagctgcttgggaggctgagacaggagaatcacttgaacctgggaggcagaggttgcagtgagccgagattgcaccactgcactccagcctgggcgacagattgagactctgtctcaaaattaaaaaaaaaaaaagaaaaagaaaacgtcgccaaggccgcagtccctggtgagagtccatgggtaaaacttgcacctggctttgagcagatagctgtttcatcatagaagcatcaggaagatacaggtgggagatggagaggaagatcccatcactgctgagtggcaggggcatgtcaagtagtgagtggtgtcaaatgggtcagaaaggtggaataatttattgccattttaaaaatcaccgacttggtgggtgtggtgactcacacctgtagtcccagcactttgggaggttgaggtgggtagattgcttgaggccaggaggtcaagaccagcatgggcaacatagaccctgtctgtacaaaaaatacaaaattagccagatgtggtggtgtgcctgtggtcccagctactttggagactgagatgggaggatcacttgaacctgggaaggtcaaggctgcagtgagctgtagtcatgccactgtactccagcctgggtgacasagtgagaccctgtctaaaaacaacaacaacaaaacccattggctttttgaagtgagattcagtggcattcaatctttggggtcaacctgacagaatcatgatgggggtacagtgctgcaggctagaactcatgactcrgttcaggttatagtgcatggcagtctgctgacaaagtggggctctttttaagccaagagtttagttcccaaggggaccttcttggccttataggacatggaagtggggagtaggagaattgttgtcctcctgaaaagataaattgctgagcccaggtgagtctggcagagttgtgccataggtgtgttgttgcagccacctctgcaccctacccttgacgtggagacagttcaaaacaaggacattagggtgggtcagtggtggtaattcctccagtattaagagaacagtattctaactaaaactttttctggcagagaacaggcttggggtgggataggggaaccaaacaagtggtagagtcaaattctggcaatggaattttaagactagctcaggtaaatatcagaaactaccctggagattgaagcaaattctacctaagctggaaaattaaaggatctacacattatgctaaaagtactgtggagtaagatatagggagtttgaagaacagcagtgtttttccaactgtgctgttaatgaatgtgtgacctctgggaactgttttgtgattggtcctctgaatctctgatagtcattgtttctccttttttctgtcttccctcttgcactctctcccttcaaggtgctgggaaatgccaggatgattaaaacacccctcttgccctccagaatctcacatttgttgggagtggtgagggacagcagcatttaacttagtgataacaatatggtgagacccgctctgcactagtggtcatatgtccaaggtacgtgacagcatagagcagggaggagcaaactttttctataaagggccagatagtaaatcttttaggctgtattggccatatggtcttggtcacatctactcgaccttgctcttgtagcacagcagccctagacaatgtgtaaacaaatgggcatggctgttttccaatgaaacttatctaagacaagtggttggctgaatttggcccacaggaggctgtttgccaacccttggtatagagtagtgagcattttagggaagacacttcagatgtgacagtggaggaggggcttgaaaaataaatggcaattattcagagaaagggaaggaagagaaaagggatcaagctgatttgggagtgctcagtttgtccacctctgcaatttagaacttgatgcttttctgttgagctgaactggaggttgttagttctcaaaaaggagggaagatactattaaagaacagtatttatttttcagacagcatgtaacactttatttatttatttatatttttaagacagagttttgctcttgtcatccaggccagagtggtgatttatttatttattaattatgtaaatttatataaaaatatacgtttatataaaatataaatagattatttatttatataaatatatattttttttaagacagagtttcgctcttgttgcccagcctggagttcaatggcacggtctcagctcactgcaacctccacctcccgggttcaagcgattctcctgcctcagcctcccaagtagctgggattacaggtacccgccaccatgcccggctaatttttgtaattttagtagagatggggtttcaccatgttgggcaggctggtttygaactcctgacctcacatgatccgcctgcctcagccttccaaagttctgggattacaagtgtgagccaccgcacccggcctgtttgtttttgtaaagacaagttcttgctctgttgtcttgctctgcttgcagcagccttgacatcctgggctcaagcgatcctcccacttcagcctttcaggtagctgagactacaggtgcatgccaacacacctggctgattttttttaatttttttttttgtagaaacagggtctcactgtgttgcccaggctgggctcagggttttttttttgttgtttgtttttttttttaatttagagatagggacttgctttgttgcccagactgggatgcagtgacatgatcatagctcactgcagcctcgacctccttggctcaggcgtgcaccaccgtgcctggctaatttaaactttttaaattttttctaagatggagtcttgctgtcacccaggctggagtgcagtagcatgatcttggctcattgctacctccgcctccccggttcaaacaattctcctgcctcagcctcccargtagctgggattacaggcacatgctaccacacccagcggatgtttgtatttttagtagagatggggtttcaccatgttggccaggctggtcttgaactcgtgacctcaagtgatccacccgcctcggcctctcaaaatgctgggattataagcgtgaaccactgtgcctgccctaacattttttttggtagagtcaggggccttgctatgttgcccagtctggtcttgcacccctggactcaagccatcctcctgtcttggcctcctaaagtgttagggttacaggtatgagccactaatcctggcctgattcaatattttgattcattgttatttatttactcttaggtattctagaacagaacttcaagtagagtactgtatttttttagttcctaactgtccaatttgtagggaactatatatatatatatttccccctccccgagatagggtcttactttgtcacttaggttgaagtgcagtggtgcaatctcacctcactgccacctcctccccccaggcacaagctaggctcccgagaagctgggaccacaggagtgcgccaccacacccagctaatttttttttttttttttttgagacggagtctcgctctgtcgccaggctaaagagcagtggcacgatcttggttcactgcaacctctgcctcccaggttcaagcgattctcctgcctcagcagtagctgggactacaggtgcccgccatcacgcctggctaatttttagtagagacggggttttaccatattggccaggctggtctggaactcctgatcttgtgatctgccctcctctgcctcccaaagtgctgggattacaggtgtgagccaccactcccagccaatttttgtatttttagtagagagggggtttcactatgttggccaagatggtctcaatctcttgacctcgtgatccgcccacctcagcctcccaaagtgttgggattacaggcgtgagccactacgtccagccccccagctaatttgttaaaaaattttttgtagggttttgccatgttgcccasgctggtctcaaacccctgagctcaaagtatccacccgcctatctcccaaagtgctggagttacagttgtgagctaccatgcctgtccaggaacagtattttattagaaatgttcaggcacactgggcgcggtggctcatgcctgtaattccagcactttgggaggctgaagcgggcagatcacttgcggtcaggggttcgagaccagcttggccaacagggtgaaaccccatctcttctcaaaatacaaaaattagctgggtgtggtggcacgtgcctgtaataccagctactctggaggctgaggcagtgaggcaggagaatcacttgaacccaggaggtggaggttatagtgagcctacatcatgccactgcactccagcctgggcaacagagcgagactccatctcaaaaaaaaaaaaaatgttcaggcacaagctttcagctagggaacagttgccctggggatgctgatattcagaagatatatttttgagagcctatttgttgctagctaaraataaaggctttgtctgggtgcggtggcgcatgcctgtaaccccaacactttgggaggctgaggcaggtggattacctgaggtcaggagttcgagaccagcctggtcaacatggcaaaaccccgtctctactaaaaaaaaaaaaaatacaaaaattagccgggcatggtgtccacatgtctgtaaccccagctacttgggaggctgaggcaggagaatcrcttgaacccaggaggtggaggttgcattgagctgagatcgtgccattgcactccagcctgggcaacaagagagaaactccatctcaaaaaaataaaaataaaaagaatgaaggctttccaagagcctaccccagattcaaaacatagggaacatgcaagggcccttacgatgacagttctttgccactctggtctgccatcccttgacacccaccaggcttgcaggcgtcataagcagttccgggcagcagctgcagtgtttcctaagccctctgtgagggcagctggttggaagacccaaatacacagagaaggcaaactgagagtggctcattggagtcagtaggtcacacccagcaggctcctctctggcttctctgtttcccttgttgtatcagctgtctcagcctgttaaatacttgtagtaggaatccctctggattccccacggcacctgtgccttcctggtctgggcatgtggaaataagatggcccagctggtgactgaataacaagatgaagtgcatattgcttggattttgttcttttggctcctcccttttccttccatgtcactgcgtgcagacaagatatgtgtccttggtgttcattaaatcactcacttgtgggacgcagtggctcatgcatttaatcccagcactttgggaggctgaggcgggaggattgctggaggccagaagttcaaggccagcctgggcaatatagcaagaccccatctctacaaaaataaaaaaaagtagctgggtgtggtggcgcacacctatagtctcagctactctgtaggctgaggtgggaagatcgcttgagcccaggagtttgtgactgcattgtgtaggatcatggcactgcactccagcctgggcagaagagtgagaccctgtctcttaaaaacaaaaacaaacaaacaaaaataagggttacccagcatcaggcatgattagaagccggttttttttgttcgttttgtttttgttgttgttgttgttgttktttaaagacagagtctctgtcacacaggctggagtgcagtggcacaagctcagctcactgcagcctccgtctcccgggttcaagtgattgtcctgcctcagcctcccaagtagctgggactacaggtgcacaccaccatgcccggtgctaatttttgtattttcagtagagacagggtttcacaatgttggccaggctagtctgaactcctggcctcaagtgatcttcctgccttggcctcccaaagtgctgggattataggaatgagccactgtgcctggcctagaagccttttaatattgatgtgctttgatatcgaatgcatatacttttctcctttgcccacatcaaggtgctatatataaaacgggcacaggaggaaacactggttagtatacaaggactgtgttttcactgggaatcatgcagaatgaaaggagagccaggtaagcacagattgtcatgtgcagtgatttcaagtaagccatatgcacattaataacaaatatttgtaagtttatgcttcttggtttgcctgaacccagtgtgttcttaaacttggtgctttttattctttgagatgctaaccagttagtgcttctaactgattggtagtgaggccagcagctagcatgtttgcattgaaaatgggtgtagtatgggtgatagtcattgaatttttatggttactttttttttttttttttttgagatggagtctctctctgtcacccaggctagagtgcagtggtgcaagctcggctaactgaaacctccgcctcccgggttcaagcaattcctctgcctcagcctcccaagtagatgggactacaggtgcatgttactgtgcccggctaatttttgtaatttttgtagagatggggtttcgctatgttgaccaggctggtttcgaactcctgggctcaagtgatctgcctgccttggcctcccaaagtgctgggattacaagcatgagccactgctcttggcctggaaaaaatttttctatgttttgctgcataaagaaaatgaaaagacaagccatagactgggagaaataatttgcaaaacatacatcttacagagcacttgtgtccagaatgtataaagaactctttttatttgcgtgtgtgtgtgtgtgtgtgtgtgtgtgtgtgtgtgtgtgtgtgtttaatacggacactgtctatgttgtccacactggtcttgaacccctggctcaagtgatcggccttcctcagcctcccaaagtgctaggattacaggtgtgagtgaccacgcccagccaagaactcttaataaggcagcccgggcttggtggtttatgcytgtaattccagcactttgggaggctgaggtgggaggatgatttgagatcaggagtttgagactagcctagggaacacagggagaccccatcgctacataaaattaaaaaaaaaaaaacagaacaaacaaacctgccaggcatagtggtccttgcttgtggttccagatgcttgggaggctgaggtgggaggattgctttagccaaggaggtcaaggctgcagtgagccatgattatgccagtacactccagcctgggcaacagagcaagacctatctcaaaaaagaaaataataatgataataagacaatccaggctgggcatggtggctcatgcctgtaatcccagcactttgggaggccgaggcaggtgaatcacctgaggtcaggagtttgagaccagcctggccaacgtggtgaaaccctgtctttactaaaaatacaaaaattagctgggcgtggtggtgtgggcctgtagtcctagctactctggaggctgaggcaggagaattgcttgaacctgggaggcagaggttgtggtgagctgagatggtgccactgcactccagtctgggtgacagagcaagactccatctcaaaaaaaagacagtccaattaaaaatgggcaaaagctttgaatactgtatcagagaagatacagtaattacaaataagcacataagatgcttgatatcattagacataaagggaagtacaagtgaaaaccacagtgtgaaactgctatacttctgctaaaatggctgagatcagaaaggctaacagtacccagtgttggtgagwaggtggcagatttagaactatcaaacattagggccgggcgctgtggcttacgcctgtaatcccagcactttggaggtcgaggcgggtggatcacgaggtcaggagttcgagaccagcctggccaacatagtgaaaccccatctctactaaaaatacaaaaaattagccaggcgtggtggcgggcgcctgtaatcccagctactcgggagactgaggcaggagaatcacttgaaccccagaggcggaggttgcagtgagccaagatcgcgccattgcactccagcaaaaaaaaaaaaaaagaaaaaaaaaaagaaaacagtttgacagttccttttttttttttttttttgagacggagtctggctctgttgcccaggctggagtgcagtggcgcattaatctcagctcactgcaagctccgcctcctgagttcacgcctttctcctgcctcagcctcccgagtagctaggactacaggcgcccgccaccatccccggctgattttttgcatttttagtagagacggggtttcaccgtgttagccaggatggtctcgatctcctgaccccgtgatccatccgcctcggcctcccaaagtgctgggattgcaggcgtgagccactgcacccggccattttgttttgtttttaaggaaacttcactagcaggaaaacaattactttaaaaattaaacatacacttaccatatgacccagaaattctactcttagttatctacctaacaaaagtaaaaacatgtccacacacagagactttttacttttaaaaagcaaaatctttttacttttaaaaagtaaaacgttggctgggcatggtgactcacacctgtaatcccagcactttgggaggccgaggcgggcggatcatgaggtcaggagatcaagaccatcctggctaacagggtgaaaccctgtctctactaaaaatacaaaaattatccgggcgtggtggcgggcgcctgtagtcccagctactcgggaggctgaggcaggagaatggcgtgaacccaggaggcggagcttgcagtgagccaagatcgcgccactgcactccaacctgggagacagagcgagactccgtctcaaaaaaaaaaaaaaaaaaagtaaaatatttttacttttacatacacaaagacttgtgtgtgactgctgccaaaaactggaaacagccgggtagggtggctcatgcctgtaatcccagcaccttaggaggccaaggtgggtggatcgtttgagctcaggagttcaagactatcctgggcaatacggtgaaaccctgtctctacaaaaaaatacaacaccttagctgggcgtggtggtgtgcttctgtggtcccagctacttgggaagctgaagtgggaggattgcttgagcccagtgggtggaggttgcagtgggctgagattgtgccattacattccagcctgggtgatagagtgagactctgtttcagaaaacacaaaaaacaaaactggaaacaattcagattttgatcaactgtccatcaactagtgaatgaatatataaaaggtagaactgtatcctcatagtggaatgcttcctagcaatttaaaaaactattggtacatgaaacaaaatggatgaacctcagaaatgtgctaagtggaagaagccagagacgtaagtcaacacattgtatcattccatttatatgaaatatctagtaaaggaaaaactatagaaatagatttaaggccaggcatggtggcttacgcttgtaatcccagcactttgggaggctgaggcgggcagatcacgaggtcaggagttcgagaccagcctgaccaacatggtgaacccctgtctctactaaaaatacaaaaattagccaggcgtggtggtgggcacctgtaatcccagctacttgggaggctgaggcaggagaatcccttgaacctgggaggcggaggttgcagtgagctgagatcgcaccactgcactccagcctgggcgacagagcaagactttgtctcaaaaaaaaagaaatagattttaaaaagtaatcttggtggccctcccaagcctaaaaggcacattctacactttctctactgagggcagcttttattggttctctccagtggtttggcaaaaaccataaacttactaacttggaataattgggccatttataggtatatagtcatttgcaaaaatatgtgggaaaatttagatttgtacagcagctaaattgagggtagagtgataatcgtttgctttacaaaagaaggcatattcatgttctgcatgagttttcatgacaaaaaagggcaaggtaatctccttctccccaccctcaattttgaraaaaggaaacacttctagtttcttttattgagagcggtctcccccattgatggggacccctaattgatggggtcctctctaggagattttatcccatttgtacagcttcctggtaaaagcagatctgtgtagctgagtccggatccctaaagcattactgtaggttgagtatattgggggcaaactgaaaatatatacagtcagcttacagtcatttctgctgacttttctaagtgctcccttacatcatttagcatttgggatgtttgcattagaattgaaatagagaattgtctagtccattctcctttgcttttggagactttaggggagattgcacttgcacaactggtattttggcgggggtggggggtgtattttgaaatcattgttctataaccagtgtgtcattgttactcagcctgtctaaagaatcacttctggctgagatttatatccattttattttctctctggcaaaaattcaagtggctcttcttccagcttttttttctccccttctctagcttaatttgtcagttccattcttaaacattctgcatagatgcctggtttcctgagccaactcttgtctcttactaaatggggtgatgttatgtttttaagctgctatgtaggtgacaacgacattttactctttgaacgttcagactatctagtcaacacaagctttatagaagcagctttctctgacccagcattcggagatgatttggattttcaggaataaacgtttttaaaggggattgaggtttcaaagtgagatcttccagcctgcttataaggtaaatgcccgcctgtccactagatgcttcccaggagctctgccaccctccagtttttccttctttccttaaagacttcagatttttttttttttttttaatagaggcagggtcccactatgttgcccaggctggtctgtaactactgggctcaagtgatcttcctccctcagcctcccaaaatgctgggattacaggcgtgagccacagcgctggccgacttcagattttcttaaggcattgtttggaaagcaagattcaaggaaactcctccttaggttgcagtgagctgagattgcaccactgcaccagcctgggccacagagcaagactccatctcaaaaaaaaaaaaaaaaaggaaactcctccttgttaccggggtttttttggtgcttgagtaagcgttgcttgttgctgcttaaaatacatcatcagcagctctttccatagaaactacaaggctttcttgttacagttgggattgccactgcttggaatgctgtcagcctgtgtgtttatttgtctgtaaagttatagcctggtagggccagaatggcagccagtcttgaaagattatatatatattgctgctgtatttgtctctctccatgtcctagagatcctgtgaaaaaggagctctggcttcagatcactgcagggttttgccattcttccctctcttacccggggaggctgaaatgacagcgtgagctggccttctgtgctcacgcctgctcctccttcctaagacagtctttgaaacttgcaaggacaagaatacccatggcaattgaaggcctccttttttttcatagtcaaacctaagccttgagaaagtgcttaattttataaacaaagaattagacacttggtttacttcctctgctataaaactatgcttggagccaggcgtggtggctcacgcctgtaataccagcactttgggaggctgaggtgggtggatcacctgagctcaggagttcaagaccggcctggccaacatggtgaaatcctgtctctactaaaaatacaaaaaaatggccaggtgtggtagctcacgcctgtaatcctagcactttgggaggcccaggtgggtggatcacgaggtcaggagatcgagaccatcctggctaacacagtgaaaccccatctctactaaaaaactacaaaaaaattagctgggcgtggtggcaggygcctgtagtcccagctactcgggaggctgaggcaggagaatgacgtgaacctgggaggtggagcttgcagtgagcagagcttgcgccactgcactccagcctgggctctgtcagcctgggcgacagagcgagactccgtctcaaaaaaaaaaaaaaattagctgggggtggtggcgggcacctgtaatcccagctactctggaggctgagacaggagaatcgcttgaacccaggaggcggaggttgcagtgagctgagatcgtgccattgtactccagcctgggcaacaagagtgaaactcaatcccaagaaaaaaagctatgcttagtttatggtttgatggatcactgtaaaagcagaatataaatgtttgaagattccaagcattaaggtacttttggaatatgctgtaggtatggctcccccattttttttttgagacggagtcttgctctgtcgcccaggctggagtgtagtggtacaatctcggctcactgcagtctctgcctcccgtgttcaagcgattctcctgtctcagcctcctgagtaggcgggattacaggtgcacaccaccacacccatctaatttttgtatttttagtagagacggggtttcaccatgttggccaggttggtctcaaactcctgacctcaggtgatccgcccacctcggcctcacaaagtgctgggattataggcgtgagccactgggcccagccagtgcctctttttatttaaggaactgatgtttggggacaaattgtgtgttctcgcgcgtgtttgcacatgtgctgcagcattgttagactcagctgttcatgttcatgggtctgaagagtctccagattatttgttggacttttaagatgcattgtttgcctttaatttgttttaactaccttgtctagcacatttgttttgtcttacactcaaacaaatttgtacctctggaatctctagcaaccagtagtgtggggtagggatcagaaatgtgctggagaggtgatagggattgacagggtagaagttacgagattgtagtagmctaccagattttactagattttcttttgatcagtttgtggatggttccaccagagggcagtgaaggaacagacatgacgtagaattcagactcttcgtttttctcaaaagcaggacagggttgcctttagctaaagttaaaggtggacagcgtttatggttagatttacttgagtcctggctccctatgtgagcacagataatgttctgtaagagtttttagagtctcagattgtggtctgtgaaggtgtggtatgtattaatttttaaactggaggctctagcacaacagctgataaatcttaattttcgccttgaatggaaattctgtgtgtgtgtgtgtktktgtktgtgtgtgtgtgtgtgtgtgtgtgtgtgtgtgtgtgtttgttttttttttttttaaagagacagagtctcacttctttgcccaggctggagtacagtagcatgatctcggcacactgcaacatctgcctgctgtgttcaagtgattctgctgcctcagccttctgagtagctgggattacaggcacgcaccaccatgcccggctaatttttgtaattttagtagagacggggtttcaccatgttggccaggctggtctcgaactccctacctcagtgatgcacccagttagaagtgtgtgtgtgtgtatgtgtatgtatttttttttgtttggttttgttttgttttgagacggagtcttgctctgtcacccaggctagagtgcagtggcgcgatctcagctccctgcagccttctcctgggttcaagcaattctctgcctcagcctcccaagtagctgggattacaggagcccgccaccacgcctggctaattttttttttttttttgtatttttagtagaaacagggttttaaccatcttggccaggctggtcttgacctcctgacctcgtgatccacctgcctcggcctcccaaagtgctgggattacaggcatgagccacctcccctggccggaaatgtatatatttttaaatctctgaccatcatttgccatcacatagtcccccagccacactctataatgttaaaagtgctttattttcttcctagtgcttatcactgtctgaaatcaccttgatttcagttacttgtttatagtctgtctcccccacccacttcaggctatatttagcctagcatagtgaatgtctggcacatggtaggtatgcagtaagtattagaaggaaggaaggaacgttttcttggaataccagtaactgttcaggtatgtcgtggatttttaaaatttgtttcacttttcatttctgagaaaacagaatctgtccaaacaagtctttcctggcctcctttcttcagcttaggtcctgactgttggcaagaatgaagatgaatcctattctgagtctctttcctctcttccaccctagcttgccagcaaagcacggacagagaaggaggagaagctgagccaggcctatgcaatcagtgctggtgtctctctagagggccagcagctcttccagaccattcacaagacgtgagttgggatcggagaggtcctttgtyctggggtaatgctacctggttgtgctrtctggtggcaggcttttgggtggttgtcttcctaaaagtctactggggaagctgggtagggtattggcaatatgccagcatccagaggtgcaggtgctgtagccccctttccacacagaagaatagtgtaatcacggacaagttgtcttctctggtctttagttgcttgtctgtaaaacttagttttggattagattatccctaaggatcccttctagacctagtagtccataacttagaactagtgatttcttctctttgattttgttgttttgtgcctttctttaaaagctgatgcagtttttattaagggaaagttatatctatatcacttttcccattgtagattgggatgaacacagggagttagagcaggccaccttcttaccacctcttaaaagacattttggggccgggcgcggtggctcacgcctgtaatcccagcactttgggaggccgaggcaggtggatcatgaggtcaggagatcgagaccatcctggctaacaaggtgaaaccccgtctctactaaaaatacaaaaaattagccgggcgcggtggcgggcgcctgtagtcccagctactcgggaggctgaggcaggagaatggcgtgaacccgggaggcggagcttgcagtgagccgagattgcgccactgcagtccgcagtccggcctgggcgacagagcgagactccgtctcaaaaaaaaaaaaaaaaaaaaaaaaaaagacattttgttggtcgggcacggtggctcacgcctgtaatcccagcactttgggaggccgaggtgggcggttcacctgaggtcgggagttccagaccagcctgaccaacatgttgaaacccccatctctactaaaaatacaaaattagccaggcgtggtggtgcatacctgtaatcccagccacttaggaggctgaggcaggagattcgcttgaaccctggaggtggaggttgtggtgagccaagattgtgcattgcattccagcctgggcaacaagagcaaaactccgtctcaaaaaaaaacattttgtcacagcagaagtcatttgactctccactagcttccctagctgctgaaaaactggaacatttgacacccctctccaccccgcctccccccaccccacactgccrtctgttactctgtttaaccaccctggatctggtgcacagatggcagctggcatcagagctgtttgaggctgtggtgtgagtatctgaacatttacaggtatgtgaaggaactcccagtcgcatcagctgccctggggcttcccaagtgtgaactggaatgggttttcccagtctggcaagtgcccaactgtctgataattgagaagagccagtctgaagagcagctcccattatgggtgataagggtcagagtacagatcatagkaagatggggagtttgttctctctctcttttttttgagtcggagtctcactctgtcaccaggctggagtccaatggtgcaatcttggctcactgcaatctctgcctcccaggttcaagcgattctcctgcttcaccctcctgagtaactgggactacaggcgcgcagtcccacgcccagctaatttttgtatttttagtagagacagtttcatcatgttgaccaggatggtctcgatctcctgacctcatgatccgcccacttcggcctccaaagtgctgggattacaggcgtgagccactgtgcmtggcctttcttttttttttttttttttgagacagggtctcacttttattgcctaggttgggagtgcagtggtgcgattttagcttactatagcctcaatctccccggctctggtgattctcccacctcagcccccggagtaactgggactacagacgcatgccaccactaccggctaattttttgtatgtatttttagtagagacgagtttttgccctgttgcccagtctggtctcgaactcctggactcaagcaatctacccacctcggcctcccaaagcgcggggattacaggtgtgagccaccgcgcccgacctgttctcctgtctttctaaaggtggtatttctccctaggccaatggttgacaaactatgccagcaggccacatctgctcatctgttttacctattgtccatgctacttttgtacaactatggcagaactcagtgctagttgtaacagatgatatggactgcaaagcctaaaatgtttgttacaagacccttaagagaaaaagtttgccagcctctgccctaggctgctatcttaatttggattcttgaggccactatcacatttttatggctctccagatctctgatgcttcagagtaacaatttctgggctctcccaagaataaatgtgcatgagtttcattgcttttctagccagtggcacccaaggaatgtttcttggctactatatgggctgctggcatctagttgttggctgagtggtgagctgggaacttgggatcagccttctggagttatttattcatcagacaggagatgtgggatgcccccaagaggttacatttcgcctgctgtcttctccttccagcattaaagactgtaartggcaaraaaaaaacatcgtagtcatggaagaagttgttattacacccccatatcaagtggaaaactgtaaaggcaaagaggggagtgcactgagccatgtacgcaaaatagtaagtaaaggagccttcagactttaggggagagaggatggttcctcaggccttcagtctttagcaccagaccaggacattgtgctacagtctctgcctcctctagcrgcagaggccctgtctggcctccctgccttccctgtactgtggggttctgcagtcctgtgggaatggaaccactgggtgkygtggaaagaagtgagtgggtgaccctatgtcctttgctggctttttggaattaggaagactgttccatggtattgggcctgagcagtttctctcatcccatattgagtttttcttttttagagacagagtctcgctctgtcgcccacgctggagtgcagtggcgcgatctcagctcactgcaacctccgcctcccgggttcaagcgattctcctgcctcagcctcccgagtacctgggactacaggcgtatgccaccacacccggctagagatggggtttcaccatgttggccaggctggtctcgaactcctgacctgaagtgatctgcccaccttggcctcccaaagtgctgggattgcaggtatgagccaccacgcctggccccatattgggtttttcttagctgcaggtaccattctagaaagatctggttggtataaatcagttgccgtcggtgtctctgaccctacatatgtcactggacttagcatttgttaaaacaaacttaaaaaacactcctgctttttttttttcctctgaggaacattgagagaccaacattgtagatgtaggaggtttgataagactgtaattcccccagcagcttttcattttgtacttgggtatagaagagaggaggagtttaggtcatgataatctccccttattatattttatagtttagtttgtagattcaccttcttctagccaatcttagtggaaactgcaaaaaaatgtggctgaagcaggaggccctggcctaccttgtggttgggaaggccaatagacagcaagggcaaaggtgcctggacaccaatgggctggacagccaggatggggctgtggaaacctgggttggattgtttgggagacctttcttccgcatctcctttgttgacctgggttgcctggtctttttcaggttgaaaaacattttagagacgtggaaagccaaaagatactgcaacgttcacaagcccagcaaccacagaaggaggctgccctgtcatcctgagtccgtacacatggaggactcttccagcatccagccaaggaggcgctggtggtggcttcagcggagscaggccgggggagggaagggatcctatatgtcctgttggctcttaacaaagggtcagcatttccaaatcttagacttgaacaaacaaaacacccaacaaaaaagaacaagagaataatttaaaagttgaatcattacttgactaacagacttcggtccaccatgtccttttcacagccctcttctggaacagtcaccttgttaattttatttttgaaaattattttcccactctgccctttacttctgactttcctttcctagtttgttcctgccattctgtttttataagtggctacacttgccttctgaatgattgaaagaaacttttacatcttttcttccaaaataaaagtaacaagctgactgtgattcttaagttgagaccagagcagcaaacgtctcactttaaatttttgttttcttttcctttttttttcttttttctttttttttttttttttttttgcacagggcatggcttgaattagttttatttttcttaactttaaatatatatatgaaaatatatattaaaatgttctctaaatattttctgcttcttgcaggtctctttttactagatcatggctgttcttcccacctcatccctctgaaaataaaaatgtattgccctctccaccatccatcatagccaggccactaacttgacttggtgcaagagattcttgctgcgaactttgtagagccagtgtgcagatagaatttggctttgagggttcctgatggctttttagtctttaactgtgtgtgtaccagtctcacatttggcccaaacctcaggattctccctctgcctgtcttacttcatggtactagaagaccttcctcgccactctctccacatgagagagtcagctgccctttctcctgtgcctctgcaggaagaactctcttgcatggcacatctcagctcctcattgagggatagttttctttgataagaaacctggagtccatttactctgacctctctttaaatctatatccagagccactagcccaggaaaaacttgggtgacccgtaatttctcttctcctgctgtccttttgctcttacgccccaccccaactccccttaaattttacaggcttatgacagtttgtatgtgctcagccaatgagcagaaaacctggaaagaatttctggactttagcccaccagtttgtctggttgactaacctgctgagagctaaaattggcacccattgccccgtgccttcaggcagtctcctggggcagagtatgccaccatccgaatatcaggcactgagtgggatgtgggtgatgctcacatgactggctagagctttgggggtggggtgggggttaactactatttttttggccatgatctctttccccttccttttttttttaattaaataaatggatcaaattaaataattcaagccctgccttcaaaatgaaattttttttttagtattatttagcaaaaacaataaaacccaaatttttttaaccatcactcatgtctcaggtttgtgcgtccttcagaggccccaggggagaggatccaaggtatgtctgtctggtttgacctttctctttagagtctcttcttcctactatttaccctctcttttcacccccgaggactcatccagaaatataatgcagggtataatttaagatgggggtccagggtttggagtggtgtgtaggtggagtgtggggaaaaggctgtagtcacatacatagaaccatttgttacaggactgtttggaggcacaaatggtcggcgagctgagaagtaaactttcagatccacctgccactggtctgaacttgatttaaagaactgagcctttgatttagcctacatgggaatgtagacttagagaaggtgagagagggagaagggaagagaccttgtaagatctataaaacctaagagatacgatgagtggaggtgattaattaatgggaaacagcaagcctgggaggaagctcttcatcatgtgtcccacatcttcctgtccccccccattggtcttaattctgtaaatggggggaagtgagtaccaactgggtttggcaggaagcacttttgactccttagttttagttgttaaatgatgtggaactttaaacagttcaggaggtggagttagtgtggttggaaaggcaggcagtgaggtgtggaataaagaacaagggctttgataacttcattcctcatgttgttcctggataagtcatttcatctttcttagccttaaatttcccaactgtaaatgtggaaataatgtccatctcctagggttgatatgaagggttaataagatattttaaaagcctaatacttagaaagtgctctgtaaatgttagtataaatgttagcttgatccttggacagttaaatctggaggtgagattggagtagatgatttctagaagttccatgtttgctttagaagccttagtttagaccaggtgcagtggcttatgcctgtagtcccagcactttgcgaggccaaggcaggagctcaagaccattctgggtggcatagtgagaccccccatctctacagaaaatacgtttaaaaaaaattaggcagatgcgatggtacatgcctgtagtcccaactacttgggagactgaggtgggaggatcacttgagccagggaggttgaggctgcagtgagttgtgatcgtaccactgcactccaggatgcactccaacctggtgacagcaagatactgtctctttaaaaaaaaaaaaaaaaaaaaaaatttgtttagatggtatttgaagggaggctaatatgtaaagcacctgggcagatctggttcaggcaggggtaggggtctcagagccctgccctgggtctcacagatctcaccccttaacccttccttggagtgcctaagaatgcttttgattataatttttttttgagatgaagttttactcttgtcgcccaggctggagtgcgatggcacgatcccggctcactgcaacctccgcctcccgggttcaactgattctcctgcctcagccccgcgagtagctgggattacaggcacgtgccaccatgcctggctaattttgtatttttagtggagactgggtttctccatgttggtcaggctggtctcaaactcccaacctcaggtgatccacccgtctcggcctgccataatgctgggattacaggcgcgagccacggcacctggccttgataattttcaaaactatttttcagagtagagagtgagttccactgaggccaagtgacttgtctagagtgccccacctgcctgtggtagcggagctggaagaaggcccgaggcttaacactcacgggttcctaatgcagtgggactttccaaagtgatggcatgtgtactgctcacttttgtttgccagaatgaggctggaacacgggagactagtgagaatggcagaaattgccacctagattgaaagcatattgaaccatggaagagcgtggtgcagagagcttacatctatgatgcagtatgggcagtagttttgcagtgtctcctcggctttgttttggggtgttctcctttctccccaaatatacacacacacacacacctctatacccagcacctgattatctcgccaccaccacgcacacgcctttggagttaatgctatttagagcatccaattattgtataaacagccttaccacagtgagttgatactgaatctgtgccgttcaagtctcagcagctcattactgatttctgtttggtgttttgaaaatttgaaaattgctcaagcacttcagtatgagttcagtagctgcagcctgtgaactactgattgaggagggtaaaggctccctgacatatttgaagctaagaatgtgtgtctcaaaatctgttgtgttgaaacatactggtaaaggaaatagaggcatttcattcatacacagatcgagtgtgctatcccgcgtggtgtggcggctacagcatggagggtactgtggtgagaatgtgtagtgctggaagctgaaatgtacaggatgagtggtaaggacagtggtagaagtgggagtgtgggagggagctggttgcctggttggaagatgttagatttacatggtaggtttgctttcctatcactgctggaggccatcagtgccagagaattcctctttaagaaacttggaattggccgggcgtggtggctcacgcctgtaatcccagcactttgggaggctgaggcgggcgatcacgaggtcaggagatcgagaccatcctggccaacatggtgaaaccctgtctctactgaaaatacaaaaatattagccgggcgtggtggcatatgcttgtagtcccagctactcgggaggctgaggcaggagaatcacttgaacccaggaggtggagcttgcagtgagccgagatcgcgccactgcactccagcctgggcgacagagtgcgactccgcctcaaaaaaaaaaaaaaaaaaaagaaacttggaatcatctgcatatattgcctaaattttaggggtttaacataatcagataaacagtatgaagtatctgaaaaagatgctctttggctgccatccactggtgatacattgtgtggctgtaatagtttcaaaacaaatttgtttttttatgttataaaaaccttacacagccaggcgctgtggctcacgcctgtaatctcaacactttgggaggcggaggcaagtggatcacttgaggtcaggagttcaagaccagcctggccaatgtggtgaaactccatctgtactaaaaatacaaaaattagctgggcgtggcggtgtgcacctgtggtcccagctacttgggaggctgaggcaggagaattgcttgaacccgggaggtggaggttgcagtgagctgagatcgcaccactgcactccggcctcgtgacagagcgaggctctgtctcaaaaacaaacgaaaaacaaccttacgtggctcattacagaaaaactagaaaacaaggcagacattttcatctaccaccccctaaaacattgttaacttctttttttatcctttcacattcgttcctatacaaatgttgttttctagattttgagacacctttccttgcccgttgtgtttctgaaagtgcagttcatgatgtcaaaagaaacttgccaactggttccagtccacaaagttaagtcaacggtatactccaatttattagcatcttagaattgatatatatataaggtaaggggctagatgatctctaagattacttgcaacctcagtaatctctatcttgctctacaatgccctgcttcagggctacccgtgaagccattcttgacaattggaatggaaactgataccttcagtaatttgtttctgtcactcatgtcatttggcatgtgtgagttgccttttcggtatttgtttagatttatctttagtggtctattggggtgtcttgaggctccaaggcagggaaagttactcactcattgtgtatttgctagcacccagctgttgagacagaacggaaaatagagtttttaaagtcatcagcatgataactggatatgttgcctgagtcaatatgaaaagtgatccaggagtaggttttgaggaaagcttagagttcaagtttggaaagaggacaaccagtaaaggatacaggggaagaaagagagatgcacctggttccagaccggaaagcagcaggaatctacctcaggtttctctagagcagactctggcagctgggaccaagtctggtcagattgtagtcccccttcctatctggcctctcccatttttctataatttccagttttgttgaaaagtctaaattggagctaagtttcttaattggctgggtaaggtgaggctaaggcatatttccagtgactaatcaactaacctctcctttttctttggtcctctggtgcggacttctgcagtgttagacaagaacttcttataggtctttcgtggagggaccagcaagtggtggattcttttactaatctggcctcttttattctggtctgtctcgtagcttaaagttgttgcttatgcttactggagggaggggcgtgtatgtctctagagagaatatttatagatggccactgagatgtgatttcagctgaaatctgaagaacaaagtgctagccaagagtgttcggatagagggaacagcaggtgctaaagtcaggttgacaagagcttgggatgttcaggaactgacagaagacaggcagctgaagcctgctgagcagcacgatagagaagtaggtggagccaggtggtgcaggaccttacagttatcctagagactgggttctttggcaccatgggcagccatgggacttggtccagtatcagacagtggcagcggaagcaaggaggctgctgggttaggggtcggtgcagcagtctgggtgggagacagtggtggcagagaattggtttcagagctgacaggacttgatgcactgaatgtgagggcaaggtggtgagggacagagaggaacgatggatgccttctaggtaggtggcaaacaataggagaggaagaagtttgtggaagaatctggaatttttgaattgccattttatcttgcccaggaaacactgaagagcagatggcaaatgggcagctggataacaagcctgggcttagagaagcgtgggatggagttagacatccagtgactgtcacgtcacctgtgaactctgagaagacgaggttgggatctctggccacagtgggtagatttgcctcagataggaggggcccttcttccctgacagggcagtgctaggagctgagtctagatttgtcagggaggtgagggtaagtgacttcctatctggtggcccagttaacctgaaaggggaatagggtaagactattgagtgtccgtttagagatgcatgctcatgaattttgggggtaaacaggcacccattgtgtgcctctgccaatcatatcgagtgtccttagtgcagacacagagaaggtgaatagttgggtacagccaggttgagagacgtgtccagtctgcactgtggagggagaggggttgagctgaggatatttatgaaagggagtgagtataatatgggatccttcactcttgtaaatgtgtgctgtcatcatgtacgcttcagtttgttcagatgagacttttctgaaagtgtcctgctgttgcccttatgtactggctccaggcaggacatgtagccatgtaactcagcattcagtgtcgacggtgcaaacaggatgtgtcccatgctggagctggtatcagaagtttagaacagattttctagcacttaatgatgccaggctcttagagtttatacagtatagtcccgcctcccactttacatatcccctctatagcatcctcagcagactgcctctacttgaactttcattgatggggcacccattactcaaggaggcaacatgtggcagctgtccgtgcccttcttgacctcc

SEQ ID NO: 97942 - DNA, 203910 bp, Homo sapiens
  misc_feature (1)...(203910): n = A,T,C or G
agcctgggcgacagagcaagactccgtctcaaaaaaaaaaaaaaaaaaaactaccaaactcttttccaaagtggttgcaccatgttgcattcccaccagcagcatatgggagttccagttcctccacatccttgtcaacacttgagattttttgttttaaattacagccatcctagtgggcgtgaaatattatctcactgaggttctattttgcatttccataatgactgaagatgtggagcatctattcgtgtgcctgtttgctgacaaaatatcttctttggtgaaccatgtgttcacttattttgtccaatttgtgaatagggttttttttttattattgagttttgagatttctttgcgtatttaggatatgagtgttttaccagatatatgatttgcgaatagtgtctcctagtttgttgtttgtgtattttcttggaagcgtccttcagaggctgggcatggtggctcgcgcctgtaatcccagcactttcggaggccgaggtgggcagatcacttgaggtcaggagttcgagaccagcctggccaacatggtgaaaccccatctctactaaaaataccaaaacattagccaggcatggtggcgggcacctgtaattccagctactcgaaaggctgaggcaggagaattgcttgaacccgggaggcagggaggttgcagtgagctgagatcgtgccattgcactccacctgggcaacaagaacaaaacttggtctcaaaaaaaaaatttccttattatcctttttattgttgttgagatggagtttcactctgttgagcaggctagagtgcagtggtaagatcttggctcactgcaacccctgcctcctgggttcaaacgattctcctgtctcagtctcccaagcagctgggactacaggcacctgccaccacgcctggctaatttttgtatttttagtagagatagagtttcaccatcttggccaggatggtctcgaactcctgatcttgtgatctgcctgcctcggcctcccaaagtgctgggattacaggtgtgagccaccgcgcctggcctcttgcttactttaggtttaatgtgctctttttctggttggttaatgtagcagctgaggtcattactgtgagatctttgctaacacagatgtttagtgctacacattttccccaagtactgctttagtggcatctcacaaattataagttgtgtttttgctttcattcaattgaaaacactttctaatttccctttagacatctttcttacacagattttagaactgtgtttagttttaaaatatttgaggatttcccagaatttttcctattgattttgttttgttttgcttttctgagacggagtcttgctctgtcaccaggctggagtgcaatggcacaatctcagctcactgcaacctctgcctcttggtttcaagagattctcctgcctcagcctcccgagtagctgggactacaggcatgcaccatcacgcccagctactttttgtatttttagtagaaatggggtttcaccatgttggtcaggatggttttgatctcttgacctcgtgatccacccacctcggcctcccaaagtgttgggattatgggcgtgagccaccaggcctggccttcctattgatttctaattgaatttgattatactttgcatgcttaaattcttctcaatttattgagatctgtttgcatggagagagaaatcctactctattcctcttcttataggccactaatcctattggattaataattcacccttacgattttatttaaccctaattacctcctagaggcccttcctccaaatacaggtatattaggggttagggcttcaacgtaggaacgggggtgggcaccattgagtcaatagcaggatatgggatttatctatttttcctgcagttcttttacgtattttgaagctgtgttattagaggtgtaggcatttaggattattatgttcattagtcgactccctttgtgaaatgactatatttgattttctttgctttgaaatctactttgtcttgtattaatgtagccactctagctttctttttttttttctttttttttttgagatagagtttcactcttgttgcccaggctggagtgcaatggcgcgatctcggctcactgcaccctttgcctctgggttcaagcgattctcctacgtcagcctcccaagtagctgggactacaggcccacgccaccatgcccggctaattttgtatttttagtagagatggagtttccttatgttgcctagactggtctttaactcctgggctcaagggatctgcccacctcagcctcccaaagtgctgggaattgcaggcgtgagccactgtgcctggcctccagctttcttttgactagtgttagcatggtatatcttttctatcctttcaagctttttttttttttagtagataatgtctttttgcacataacttattgttggatttgctttatttttccaacctgccaatctgtcatttaccaagagtatttatttttgacattcgtatttaatgtgcttagtcatatagttttgagtctgtcatcttgcaatttgttttttgtttcatctgccctttgttctctctttacctgccttcctctgggttgagtattttatgtttctgtcttacctcctttgttggcttactaggtatctttgctgggttttgaatggtccctctagggtttaggcagcacttggctccgaattgcaacagtggcctcttttcccttgttgtccaggtgaatgagtggcaggatgactggccgacctttttcgcccggcaccggctccaggcgcagctggacctcattgagaaggactatgctgaccgagaggcacgagaactctggtcccggctacaggtgggcacggcagtgacttctctgggaaagagctggtcctctcatgatcccgccgcatttgtgcgggttcatctgtaaaacggagctggagcagggaacactgagtcctggagcacacatcagggaggaaggggggcaggggcgggggttcccccaaaagggagtccgaaaggagtgaggagtgaagacacacttggctcctcgtgcccctctccactgctaggtcaccaggtatttagcctcagactttcctcatgtgaaacacaggtgcttgtaaatggtggtgtttaccatgattactgttcttactatcagtaacacttgtccactccatcgtgttcctctcccatgggaagatgtgggtaccagatgatccagaatgactgatttcaaaacataactctcggccgggcacagtggttcacgcctgtaatcgcagcatttgggaggcctaggtgggcagatcacttgaggtcaggagtttgagaccagcctggccaacatggtgaaaccctgtctgtactaaaaatgcaaaaattaaccgtgcatggtggtgcatgcctgtaatcccagctactcgggaggctgaagcaggagaatcacttgaacccgggaggcggaggctgcagtgaggggagattgcaccattgcactccagcctggacgacagagtgagatcctgtatcaaaaagaaaaaaaatcaaaatataactctcaaaatgttaaaaaagaatgtgcatgtcaatccagagtgagtatacatcaaagagacttgaactcattaatgaagaaactaggctgggcacggtggctcaagcctgtaatcctagcactttgggaggccgaggtggatagattttacctgaggtcaggatttcaagaccagactggccaatatggtgaaaccccatctctactaaaaatacaaaaattagccgggtgtagtggcgggtgcctgtaatcccagctactcagtaggctgaggcaggagaatcacttgaatccgggaggcggaggttgcagtgagccgagatggcgccactgcactccagcctgggtgacagagcaagattccctctcaaagaaaaaaacaacaaaaccaaacaaaacctgcagacatatatgtgtagcgaaataaaagtggccagagtttgctaaggtagcgcaacactggttcctattctgtgggtcgattaaaactataacctcagaggttctccactgtgtggggattctagacctaaattaggaggaaatcctaagttagacaaagctagactcccctgaagtcaggtggcccctatttctgggcttggcaggcagtgctggggctggacaccgaagcagatcgcgagtgggctttgccttatttccaagaacgaggtgatgagaccggggctcccagaggccagcgataactgcagccgttgctctcgtaggtgaagatcccggatctgttttgtggcctagagattgtccccgcgttgctccacggggatctctggtcgggaaacgtggctgaggacgacgtggggcccattatttacgacccggcttccttctatggccattccgagtttgaactggcaatcgccttgatgtttggggggttccccagatccttcttcaccgcctaccaccggaagatccccaaggctccgggcttcgaccagcggctgctgctctaccagctgtttaactacctgaaccactggaaccacttcgggcgggagtacaggagcccttccttgggcaccatgcgaaggctgctcaagtagcggcccctgccctcccttcccctgtccccgtccccgtctccgtctccccgtccctgtccccccgtcccccgtccctgtgcccccgtccctgtccccctgttcccgtctccccgtccctccgtctccatccccccgtccccccatcctcctgtccccgtccccccgtccccgtccctccatccctgtcccccgtccccctgtccccctgtccacataccaatccccctgtccccgacccccatccccgtcccccatctccgtccccgtcccccctgccccgtccccgtctccgttcccccgtccccatcctccatccccgtctcccatcgccgtccccccgtccccgtcccccgtccccgtcccccctgtccctgtcccccttcccccgacccctcccagatcctggggaccaataaagcccgcagcgggtctcggctggcgtcctgcgcctcgttcctccgctcgtggggctgctttcagggccagacgcacggcgagctgtgcacggacgtttttgcggcgattcaggggaaacgcacgcggacccggtagccaaggccaaagtcggcgcagcgcccaccgcggcctccgggccccgctcccgctcccgctctggggcgcgccaccactcggcgcggggcccgtgtgatccgcgcgggtcccagcgtggcgcgaataagtgtcagggcggttggctctgaggggtgggtcccggggctcgcctcgcgcccccgactgcgtgctcaggccccgcccctccccgtccacgcatgctgaggctccgccccgctccgcggtcccccggtcccacccgcccccgccccgcccccgccccgccccccggcgtgttgtggctccgccccgctgtctccggccccaccgcaagccctgcccctcccacccacgcgtgcccgggccccgcccccgttgcgcgcagccccgccccctatcgcgtgctcaagccccgccctggcggcccccggccccatcccgaagccccgcccccccgcacaccgcctgctcaggctccgccccgctgtcctccggcggcggcctcaccccgcagcccggcccaccgcgtctcaggccccacctcctgtcctgccccgcccaccgcgtgctcaggccccgctgagcggtcccggctccgctcgcgccctgtggggtccacggcgcgctcttccagagcctttgggacccgtgcccgctcgcgtcctcaagtgcacgcgccgtcccgcgcgcggtattttggcggccgacgcgttccgtagcgaggccggcgagtggggtcggaggtcgcggggcggggccagcgtcggttgccgccttagcgggcgcctccttttcatccctcatccttcatccctggctttcgcgctctagcggagtgggatctgcgaacacgtgaggcgggggcgcggtccccaggctgccgagatggccctgagcgacgaaccggccgcgggcggccccgaggaggaggcggaggacgagacactggcctttggcgcggcgctggaagcgttcggcgagagcgcggagacccgggcgctgctgggccgcctgcgggaggtgcacggcggcggcgcggagcgcgaggtggccctggagcggttccgcggtgcgtgggcggcgccgcgtgcccscttcctcccccggcccgggttcggcgcgctgagtgcactttaccgggcggggaccgcagcccggcggcgccggccgctctgcgagggctgccggtgcgcggtcccgcgggccgtggtggggcgcggccttcctaggcgggagagggccaccccggcgcggcgttaggtgcacggggcagacgcgcgcctcccttggggggaccgtggcccgcggagcgcctgctctcgcacggggtgaagcctctgcggcctccccgggaggcggggtgcagaagccctccgtcccccgtctccgtcactggaggaggtccctgggctggggagactcgggccagatccctccggacagctggtcagccctgcagtgtggactcccaggcttgcctccaccgagcgcggtttctgtgaatgttgtgtggacagggagatagggaatgagagagggggacgcagggaacaaacctgctgcaaacaaagcgcgcctcgggtggggagggcagcagcctgtccgttccgtggacgccgtggacagagcgggctggccgggtccgtgcctctgcaggcggggtggggtgtaggtacccctgtggaggccattcgatgagtctaaattctccgagttcagacccacctttaccgctgtctataatgggttatttccaaacaagtccttaggagctcatagctaagtagttacatggggttttgtaattcagtaaaatcatctttgtagaccctttgagtaagaagaacttttgcattatttggccttcctcattttagaatgacagcgctttgattttaggagtcaggcagggtggggggccttgtgggaggagtgcgggttcggcgtcagatcctcctgcctgtgaattctggccctgtcgcttggacctgatacttgattgcctgtttcttcgggtgtaagctggggcggataacgatgcctctcgtgcagaactgttctgagggtgagggaccctcatccagggaccagtgaagccagattttttgttcctgrtgtaacagcccaatggcttyttscttttttttttttttttttttttttgatacgaagtcttgctctgttgcccaggctggagtgcagtgcagtggtgcgatcttggctcactgcaacctcaacctctcaggttcaagctattctcctgtcttagcctcccgagtagctggggctacaggcgcgcgccaccacgcccggctaattttgtatttttagtagrgggggtttcaccatgttggtcaggctggtctcaaactcctgacctcaagtggtcgcccgactcagcctcccaaagtgttgagattacaggtgtgagccactgcgctcggccccagtgggttctttctgcgggctgcccagatagagttgatttgtcagggcaggggagttgccatggagaagrtttagttcacgcagagccggttgaaagggagactagactagaggtttttttttttttttttgaggcggagtctcactttgtcccccagggtggagtgcagtgatgagatctcagctcactgcaacctccacaacctccacctcccaggttcaagtgattctcctgcctcagcctcccgagtagctgggactacaggtgcgcgccaccacgcccacctaatttttcgtattattagtagtgacgggtttcatcgtgttagccaggatggtctcgatctcctgacctcgtgatccacccgcctcagcctcccaaagtgagccaccacgcccggctggagttttattattactcagatcagtctccctgagaatttgagggccagggttttttagaggtaatctgggggaaagggtgggggtggctgattggttaggggtatacaatcataggggagtcggaaatgatcctccgtgatgtgctgaatcgcgtctgcgtggggccccaggagcagtgggcgggtccaggtggagctatcatgggtccgtggatcctagtgtaggtgtcagacatggaaacaatctgaaaagatatctttaaaggccagtctcaggttctgcaatagtgacatggtctgcaggagtaactggggaactcgcatgtcttgtgatctcaagaataatggctggcaattaggttacgccttagcggaattcaggctcctctcctcctcctagcctggtggcctctcattaactttacaaaggcagttgagttttggggaagggctcttagcatttaaactataaattaaatgtctcccagaggtagcttggcagcttgaagactaaaggcatgagggggttgcctggatcagatctgccccattgccataatttcctcacagatcacttttgcaaaggcagttttgctgggaagcagtgggtgtgttcagatgtggaggtgggagctgccggattggacagaagcagtttcagctgctgagaggaggagaaagcggtggttcagggtctgggaggttgtgaagagctggcagctgtgtggaagggagcagtgcctggatatgtcaaccaaaaagtatctgagacgagtctcaatcagtttagaaggttaagggtgtgcccgtgaggcagcctcaggaggtcacatgtccccaaggaagtcgggctacagcttagttttacacgttttagggagacgtgagacatcaatcaatacctgtaagatgtacattggtctcgtcagggaaggcgggacatcttgggtgggagggcgtccagggcattggtggattcaaatatttcacgattggtgattggttgaaagagtttatctgaagacctggaatccatagaagggattgtctaggttaagataaattgtggagaccaaggtttttcttatgcagatgaaggttccagttagctggtttcagagagaatagattgtaaatgcttttcatcagactaaaaaggtaccagacttagttaattttctcttggatcagggaaaagacctagaaaaggaagggattctctacagaatgtagcttttcccagcaagagacaacttagcagaaccatttcaaaatatgtcaaatatattttagggaaaaatattttgatttctttcagggcctgctgtctgtcatgtgatgctgtactagagtcaggctggaatttggtgtcttattgctacttaagatcggttttaatgctaatactgatcagctgtgcctgaattccaacgagaggagggtataatgaggcctatgtggaccactccccacaatcccttaatatcatgaggcctgaactagtttttcaggttaagtttggaatgcccttggccaagaggaggggtctgttagatggctagggggcttagaattttgtttttagtttacaggcatgtttggcaggggagtgtgagaggagtgccagggatgtgtgtctcacaaggacagagttgagcttggcccttaacggctggcagaggcaggagagagtgaaggaaggaagaggcgaggaggagactctgttaggaagagtatcgaggcagtgggaaaagaggaacagtgtgccaagcaagtaaactgcacgaggctgggccacagtggccctcaaaaggctagagggaggtggggcattccctccaggtggcctgtgtggcctcctttagtgagaggggaggtgtgctcttgagagctggggaagaggtggagctgccytgtggaagctagcaagggaaaatggggtttctgaggctcatgggtatgtttggcctagtgataattaattttcatgttatatttgtttttagtaataatggacaaataccaggagcagcctcatctgttggacccgcaccttggtaagaatagaagctgctgattttgatcattcagttacagatgaccacggaggccttggtgtgtggtgctggcacatgcatgtgctttgccaggatcaaatgccaagaagtgtccctgtcttgcttgcctggctggttggttttagccgacctgtgatagtggcttgagttccagatgtcactctaggctggggggagatgtgtctgagctacttaattcctttctgctaaggaaacaacatctgctcctcatgtgttttttttgtttttttttcttttttttgagacggagtctcgctctgtctccaggctagagtgctgtggcgcgatctcagctcactgcatcctccagctccctggttcaagggattctcctgcctctgcctcccgagtagctgggattacaggcatgcgccaccatgcccagctaatttttgtatttttagtagagayggggtttcactatgttggccaggatggtcttgatctcctgacctcgtgatccgcctgcctcggcctcccaaagtgctgggattacaggcgtgagccaccgcgcctggcctcctcaagtgtttttagtttacattagtttattattttagtttacatttgggcacatgatgtttttctggtaatagtcatacagggtcaggtgttttacatgggtcatcatttaatcctcacagcagctaaggagggcatctgttgtcatctccagtttacagatggggacactgaggctcggttttcttactttagtgtaaggggtgtggtttcttattgttttctttatttttgatgtatttcmcactgattaaaatttttctttttctacctacaaatgtgacacatgcttctggcagttcacctgggaaagaggaaggtggcaatagtcaccacgttgagagggagcaccctgggtgggggcaccctggcttcatagcccagtttcaccattcagtytttgagctgctctttgccggggtttcctcgccccccgtggtgttgagatctgtgtgagagacactaagggtcagcctttcatgtgcgcacacgtgcctcttaaagagtagtttgtgctgtgcatcttgttctgtttttttttcttcaaataacagattttggctgggggtggtggctcatgcctgtaatcccagcactttgggaggtggaggcgggtggatcacttgaggtcgggagttcgagaccagcatggctaacacgatgaaaccctgtctctactaataatacaaaacgttagctgggcatgctggcagttgcctgtagtcccagttacttgggaggctgaggcaggagaatggcgtgaacccgggaggcggagcttgcagtgagctgagatcacgtcactgcactccagcctgggtgacagagtgagacttcatctcaaaaaaaaaaaaaaaccaaaaaaaaccctctaaattcgggattcaagaattcattgggatcagacttgtccttctgtcctagaaaaatttataggccttgtgaaggagaccaaagatagaggtccttgggagagggtcagctgcagggaacatgactctgacatctggtggaggggctagccatgctggatggcgtggcaggcastgggctccccaggccatatcttataggaggtcttgggttcctggagttcctgtgtgtgagcgctggttcccaggaaacagatgtggtcactgctcacaaggtagcgggtggtgtttttatatctcttcaagtaacaacgttggacctgtagttaaatgcctttattcttgccagacctctttccagagtggatcatggaatattaacacttgttgtgagctgcttagagtactgcgaatgatttttagagttattttctttctttgcaaaaactgtttttcgccgggtgtggtggcttatgcctgtaatcccagcactttgggaggccggggcgggtggatcacctgaggtcaggagtttgagaccagcctgaccaacatagtgaaaccccgtatctactaaaaatgcaaaaattagccgcgtgtggtgcacgcctgtaatcccagctacttggggctgaagcaggagaattgcccgaacccaggaggcagaggttgcagtgagccaagatcgtgccattgtactccagcctgggcaacaagaacgaaaacgtttcggraaaaaaaaaaaaaaaaaaaawaaataaataaataaatttttttttttgtagagaaggggtcttgccgtgttgcccaggctggtctcatacctctgggttcaagcggttcacccaccttggcctcctaaagtgctgggatttcaggtgtgagccagcgtgcccagctgagttcattattttctggaattcctttttagaaaaaggaaaatgtagtcgtgggatgctggtcctttgtcatttgttgcacatttttccacccttttgcttttttttttttctttwttttttttttttttgagatgtagtctctctgttgcccaggctggagtatagtggcccaatcttggctcactgcaacttctgcctccagggttcaagcgattctcctgcctcagcctccagcgtagctgggattacaggcgtgtgctaccacgcctggctaattttttgcatttttagtagagacagggtttcaccatgttggccaggctggtctcaaactcctgacccccacgtgatctgcccaccttggtctcccaaagtgctgggattacaggtgtgagccattgtgcccggcctgcttttgccttttaatattgtgtctggtgtattttatctactgaagttttttcgtgtttgtttttttaaagagatgggatctcgctctgtcacccaggctggagtgtagtggcgcagtcatagctcactgcagccttgagctcctgggattaagtgatcttctcacttcagcctcctgcagagctgggacaacaggcacaagctgccatgcctagttaattaaaaaacttttttttttggccaggcgcagtagctcatgcctctgatcctagcactttgggaggccgaggcgggtggattacaaggtcaggagttcaagaccagcctgaccaacatggtgaaaccctgtctctactaaaaatacaaaaattagctgggcatggtgaagcatgcctgtaatcccagctacttgagaggccgaggcaggagaattgcttgaactgggacccaggacgcggaggtagcagtgaacgagatcgtgccactgcactccagcgtgggctacagagccagactgtctcaaaaaaaaaaaaattttgtttttgcagggtcagggtcacgctgtgttcctcaggctggtctcgaacttctggccccaagcaatcctgccttggcctcccacagtgctgggatgacaggtgtgagccactgcacccagtctctactgaagttttagaaatatttagcttgtcaaactatcagtttctttgtgtttggcctttggtagtacggttagaaagtttatttttcctaatcagttatgtaagcctcatttattggatgatttagtggcctctcccctacttgaaatgccattttaaatctatattaaatattcaaatatattagcctttgcttttagattttttatcctgttccattgacctatctgtatgctcttttttctgggtcatttcgtttgtttgttttttttttttttttgagatggagtctcgctctgtcacccaggctggagtgcagtggcgtgttcttggcttactgcaacctccgcctcccaggttcaagagattctcctgcctcagcctcccgagtagcatgtgccaccacgcctggctaatttttgtatttttagtagagaacggttttcatcatgttggccaggatagtctcgaactcctgacctcaagcagtctgcccgccttggcctcccaaagtgctggaattagaggcgtgagccaccacgcctggcctgggtcattttgtttgatgttagtttatattttgcctggcatcctttcctcttattttcttgatggttttgtagcccgttcattaatgcggatgaactccggaattattttatcactctccaccctttggaattctattaaattcacaaattcatgtaggggagaagtctttctaagatttaattttcatgtctaagatcatggtattatgtctctaattattcacatcttttgtgttcctcagtgaaggttggtgattttctttagatgattcctggagacttttttttaggtttatttctaggtatgttttgtcttttattgctcttgtgaaactmtttgttatgtgttctaactagttattgctgatgtctagtgaagatatgttttgtatactgtttttgtaaatggcaacactgtaatggaatatgtatgtgtaaacatacatttcttaacatctttatagggatataattacatactatagagttcactcttctaaatatacattttagtgttagtgtattagtgtattacagagttgtgtaactatcactaccacaatctaggcattttcatcatctgaagcaacccaactcccatcaacaattccttcccattctctgcttccgcagtaaccactcatctggctctgggtttgtgtgtattcagcattttgtgtgatggaatcatgcagtaggaggtcttttggcactggcttttttcacttagcatcatgtctatgaggttcactgtgtgatgaaatgtttacttcaatagtttttcagtctttttttttttttggagacaaagtcttgctctgtcacccaggctggagtgtaatggcgtgatcttggctcactgcaacctccttctcctgggttcaagcgattctcctgcctcagcctcctgagtagctgggattacaggcgccacctgtaaaattagcctggccaatttttgtattctgagtagagacagggtttcaccatgatggccaggcttgtcttgaactcctgacctcaggtgatccacctgcctcggcctcccaaagtgctgggattacaggcgtgagccaccgtgcccggccagttgtttcttctgggttttcttagcaggtaaatattatatggtttgtaaataatgctactctttatccacgattataaatttttattcttagaacattttattgagttttaattttattgagtttaaaatttacctactataaaatgcacccattttagtaagatgtttgagtttcggtaaatgtatacaccccgcgctatcaagatatggaacatttctgtcatcccaaggagttacttgatgtccttttgctgtcagtcccctcaccccagccctagggaaccactgttggttaatggtactgttcattagttttgcctgttctagaatcattcagtatgtgctctttttgtcttccgttgttaaaataacatctccgggacttaccattgttggtgtgtgtatcagtagtttgtacgttttctctcgtgctgataaatcacaatttgtttcttcttcttttttttttttgagatggagtcttggtctgttgcccaggctggagtgcggtggagtgcagtggtgcgatctcggctcactgcaagctctgccacccgggttcacgccattctcctgcctcagcctcccgagtagctgggactacgggtgcccgccaacacacccagctaattttttttttatttttagtagagacggggtttcaccttgttaaccaggatggtctcaatctcctgacctcgtgatccgcccgcctcagccttccaaagtgctggnnnnnnnnnnnnnnnnnnnngttgtttcttcttttatctgttgatggacatttgagttgtttccggtttttggctgttattaataatgctactttttgggaggctgaggtgggcagatcatgaggtcaggagattgagactatcctggctaacacggtgaaaccccatctctactaaaaatacaaaaaattagcccagtgtggcggtgtgcgcatgtagtcccagctacttgggaggctgaggcaggaaaattgcttgaacccgggaggtggaggttgcagtgagccgagatcttgccactgcactccagcctgggtgacagagcgagactccgtctcaaaaaaaaaaaaaaaaaaaagtaatgctactgtgaaaatgtttatgtacaagtttttaggtagacagaggttttattttctcttgggaaaatacgcatgtgtggaattgctgagtagcagaaagtgtcttacttgtagaaagtgtatgacttggccaggcgcggtggctcctacctgtaattctagcactttgggagactgaggcaggtggattgcctgagctcaggagctcaagaccagcctgggcaacatggtaaaaccccatctctactaaaatacaaaaaattagccgggtgtggtggcaggtgcctgtagtcccagctactcaggaggctgaggcacgagaattacttgaatgtgggaggcagaggttgcagtaagctgagatgacaccactgcactccagcctgggtcacagagtgagactctgtctccaaaaaaaaaaaaagtgtgtgactcatcacctgccatactgatgccatgaagattgtactgttgaccatttctaccaacaaggtatgaggattccagctgctctgggttctcttcagcactcagcgttgccagtctctctgatttcagggagtgtatctcgttgtgtccttctctgcgtttcccggatgccagttgcagttgttttccatgtatgaagacttgcagcccagcgtatggtctgttttgttgaacattccrcgtgcacttgagaaaaatgtctgttctgttgttgggtagattgttctctaaatgtcacgtaagtaaggtgggtgatagtgctgtttaggtttcagcgattttctcttacttgttctrtcagttcctgaaacaggagtgtcgaagttttcaaccgtgtctcctttcatttctctcagcttcttctgtgcttattttgaagctctgtaggttggtgtgtatacttacagaattgttaagtcttcatgatgaattgatccttttattatcatgaaacattctgtttatctctgatggtaatgcttgttctgacatttactttgtctgatattaacagagccactccagctcttttatgatttgtgattggttggaatatctttttccttttgcttacgtttaacctagctatgtctttttgtttgtttttgttttttaagagacagggttttgggccaggtgcggtgggctcacacctgtaatcccatcactttgggaggccgaggtgggtggatcacctgaggtcaggagttcgagaccagcctggccaacatggtgaaaccccgtctctactaaaaatacaaaaattagccaggcgtggtgacgcgtgcctgtaattccagctacttgggaatctgagggaggagaatagcctgaaccygggaggtggaggttgcagtgagctgagatcacgccactgcactccagcctgggggacagagcaagactctgtctcaaaaaaaaagaaaaaaaagagacgggttttgstctgttgcccaggctggagtgcaatagtaggatcatagctcattgccgccttgaaattctggcttcaaatgatcctcccaccttggtctcccaaagtgctgggaaaacaggcatgagccaccacacctggccggcctcaatgtcatgttgatgttcacttttacagtaaatgtttcctatgtttttccctagaatggatgatgaacttgttgttggacatagtgcaagatcagacatctccagcttcccttgtacatctggcttttaaatttctttacatcatcaccaaggtaacatttccatagcacttcagagttgacagatacttttgtaatatacttggtccagaggttaccctccaaaatgttatttctcaagaaagatagttcttagacacaagttgtgggtttaattctgtccctttttactgtatgttggggatcagaatttagtgatgtgggctctttggctgaaacagtgtcaggatattcagcatcttgcatttgaatagattgaagcactgtgtagctaggaagggaatggggtggagatgagactaaatcagaaaaacttcttacaaggagaaagcaggccgggtgcggtggctcatgcctgtaatcccagcactttgggaggctgaggcaggtggatcacctgtggtcaggagttcgagatgagcctggccaacatggtgaaaccccgtctctactaaaaatacaaaaattagctgggcttggtggcacatgactgtaatcccagctgcttgggaggctgaggcgggagaatggcttgaacctgagaggcagaggttgcagtgagccgagatcatgctgttgcactccagcctgagtgacagagcgagactctgtggaaatggaagtgcttctcacactttaatgtgcagatgaatttcctgggaattttgctgtgctatagattttgagcaagtaggtctaggcgggggtctcatagtctgcttttcttacaagcttgcgggtgtctgtgctcatagtctgcttttcttacaagcttgcgggtgtctgtgctcatagtctgcttttcttacaagcttgcgggtgtctgtgctcatagtctgcttttcttacaagcttgcgggtgtctgtgctcatagtctgcttttcttacaagcttgcgggtgtctgtgctcatagtctgcttttcttacaagcttgcgggtgtctgtgctcatagtctgcttttcttacaagcttgcgggtgtctgtgctcatagtctgcttttcttacaagcttgcgggtgtctgctcatagtctgcttttcttacaagcttgcgggtgtctgctcatagtctgcttttcttacaagcttgcgggtgtctgtgctcatagtctgcttttcttacaagcttgcgggtgtctgctcatagtctgcttttcttacaagcttgcgggtgtctgtgctcatagtctgcttttcttacaagcttgcgggtgtctgtgctcatagtctgcttttcttacaagcttgcgggtgtctgtgctcatagtctgcttttcttacaagcttgcgggtgtctgtgctcatagtctgcttttcttacaagcttgcgggtgtctgctcatagtctgcttttcttacaagcttgcgggtgtctgtgctcatagtctgcttttcttacaagcttgcgggtgtctgtgtgctggcccagaggctcactgttggcagttttgactrtggaagtactcacagccgtctcagggtggggcttggggttcgtagtggcgaggcgcatttctgttgtctggcgggaaagtccttggccrgcgagaggacactgcgggtgrgctgccaaggacacgcaggcctctgtagctcckctgtktgaggttaggatttctccggaaggcgtggtatcactgagcttcagggaagtgttaatgaatttgggcccttgcggtttgtaggcacttattcctcataaatgtcagaggacagtcatataaatgaacatatttaatgactgattccgtaaatatggtaatgaataacactaccaatttaggaaggaaatctttttttttgagagatggggtcttgctctgtcactcaggctagagtgcagtgatgcagtcagctcactgcagcctcgaactcttggtctcaaatgattctccctcctgcctcatcctctcagactacaggcatgtgccaccatcctgtctaatttttaattttttatgttgcccaggctagtctccaactcttggtctcaagctattcttttgcctcggcctcccaaagtgctgggattacgggtgtgagccatcgctcttggccatgggtagctttcttggggtgactacggtcttactaaattgtgtcactgtaatgtcacagaattctctttgatcagtgggtcgcgtagctggtgatttttgatgaaagggtagaaaggcaattttgctgctctctgtatttttaaatgttataattcagcatctctttatttgataggttcgaggctataaaacatttcttcgtttatttcctcatgaagttgccgatgtagagcctgttttagatttggtcacaattcagaatcccaaggaccatgaagtgagtgtctctgcctcccccctcgtctccagccctccgtgcctgtccttcctccctgcttgccccaccctgctgcaccttccccttcctgtttctttcattttatctccctttgttttgtgtcactcctcttttctttcttttcttttcacttttcctttacttcttgtacaagttgctttaaattattttcgtttaaaatagcccctttataaaaaaaattatgcctaggtgtagtttaacaataaatccgtcattgtttctatgtttttttaactgtgtaagtataactgtgttgggttcccaagaccacccccaggtttgatacttcctgagcgggactcacagcactcagcatagagtcctccttttggctgtcacttgttatggcaaaataatacacagcaaaatcagcaaagggaaaaggcacatgggtggggtctggggagaaccaggcgggagctcccggggtcctccagttgggtcccacagggcctgtgtcattcccccagcagtgagatgtgaccacacctgtgaggtgtctatcagagaagcacgtttgagacttggtgcccagagctttcactggggtctggccacatggacacctctgcctggcacgaaacgaaattccagacccccagcaggaaagcaggtgccagcgtaaagcacacggtttgtgcagattgagccagcgagggacctcatcaggcagggcttggtgggaaccctgctggtgtccaggtccctggataccagcccagggccggcctcgtcaggggccttgcctcagacggcagcggggcctgctatgctcgctgtcttctgcgtggtatgtatttggaggagcacacggtttataaccgtgcagtgcggtggcttgtctykgcgtggatgtgactgatgagcgctgtggggcatttccctgctgccctgcactccgtgcccttctttccctagtacttctagcgccccccagtggaatgattgcagggacaaattgggatgttttttactaattactgaaaataagggtactccttttttattagaagttgataattgttttctttattcttttttttttaaaaagacagagtttcactcttcttgcccaggttggagagcaatggcacaatcttggctcactgcaacctctgtctcccaggttcaagcgattctcctgtgtcagcctcctgagtagctgggattacaggcatgtgtcatcacgccagggtaattttgtatttttagtagaaacagggtttctccatgttggtcaggctggtttaggactcttgacctcggccaggcacggtggctcgtgcctgtaatcccagcagtttgggaggccaaggtgggcggatcacgaggtcaggagatcgagaccatcctggctaacacggtgcaaccctgtgtctacaaaaaatacaaaaattagcctagcatggtggcaaacgcctgtagtcccagctactcagaaggctgaggcaggagaatggcgtgaacccggaaggtggagcttgcagtgagcgaggttgcgccactgcactccagcctgggcaacagagcgagactccatctcaaaaaaaaaaaaaggaactcctgacctcaggtgatccgctcgtctcggcctcccaaagtgttgggattacaggtgtgaaccaccacacctggccttttttctttattcttaggtgtttttactttttatctgtttttcactttttcaaaaggccagtttgtatgtggagaggtgccagcgaagagaagctgctatactgatgtattatgatttttctttgttcattttgatgtctctcttgtctgctgagctaagttacggcggtaggtgtgtgtggtggggattccgggggggatgtggcgaggagttggtgaacggcttgcatttctggccctgagggtgatggcatttgaatggctttcataggcattgggtgggcatggagggcagtgactttgagtagattgtggccagtggcctgtgattttcargcaagactcattcttcccgtggtttaattttttaggcttgggaaacccgctacatgcttttgctctggctctccgtgacctgcctgatcccttttgatttttctcgccttgacgggaacctcctcacccagcctgggcaagcacgaatgtccataatggaccgtattctccaaatagcagaggtaaatatcatgcagataattagctgctaattagtactcactttcatgttcatgctgtcttgatgttagtggtttactcggtaagcttctgatatgtattcaactgctgtttttttcagtggggtaaaatcccataggataacttattttgaaattgtgataattcatgtaggggtcaggttgagttagcaaatctcatttctttgtagatgatgcaaatactctgttgagggtaatcatggcagataaggaagggtttagtggcatggtgagagagaataaggacccattttacatttagttcttaacgttatataaataatagatgctcatttgtaggagaactagaaaataaagataagcaagaaaaatactaaatttaaatttatgaaattctagtgccaagagataagttgtttattttctccgaacttttcctgatgtaaatattatgcatataaacacagcttattgtattagttatctattggatcataactaattaccccaaacttgagtgtttgacacacatttatcctcttgtagtttctgtgggtcgggagtctggcatggctgagctgggtcctttgtgtcaagcttgcccacagctgcagttaaaactcgacatgggcaggctttgccccaaggccrttggattgaggccaccctcagttctttgccacctgggcccctccaacttagtgacttattccatcaaagcctgcaagggagaaactctgctaatgagatggaagtcatgataatatgttacctgatcatggaagtgacgtcccattcctctgccagatcctgtggttagcagcaagtcaccgagtccagcctacgcaagcgagcactaggaggctgtcaggctctgagccatctcagttgtctcggtcttcctgccacgctgactgcgacagccctggtcagcattcactgagtgcctgctgtgtgcctggcaccgttcaaacactcatagattaatctttaatcacttatggattaataatttaacctatacattgggctgggcatggtgggtcactcctgtaatcccagcactttgggaggccggggcgggcagatcacgtgaggttaggacttcgagaccagcctggccaacatggtgaaaccctgtgtctactaaaaatacaaaaattagctgggcctggtgacacatacctgtaatcccagctactcaagaggctgaggcagaagaatcccttgaacctgggaggtggagattgtagtgaactgagattacgccactgcactccagcctgggtgacagagcgagagtccatctcaaaaaaaaaaaaaaaaaatttaacctatacgttgatgattgatagatcatcagtgattaattaactgtgattaataatcattgaattctccttcatgaggctgttgacaattcttaccctcgtttaaccgagaaggcaacaggcataaaaattaataacttagtttactttgctcataaatggtggatccatgtttgaatccaggcggtttatctggagtctgtgctcttcatcagggctcagcattgccccatgacctgctgttctgagtcctttttaccctcagcaacacgttcttagtgtcttacgatgtcagaargtgtccccctcataatcgttaagggaaaaggtactccattgtaatctaatttaaaattctctctgatagatggatgttttgtttgttcttgttttgttacgttagaggtagtgtggtgatgggctgggtgcggtggctcacgcctgtaatcccagcactctgggaggccaaggtgggcatatcacctgaggtcaggaattcgagaccagcctgaccaacatggagaaaccttgtctctactaaaaatacaacattagctgggcgtggtggcacgtgcctgtagtcccagctactcaggaggctgaggcagaagaatcgcttgaacctgggaggcggaggttgtggtgagccgatatcacgccattgcactccaccctgggcaacaagagtgaaactccgtctcaaaaaaaaaaaaaaaaagtagtatggtttacccacccttgtttacttgtctgtggagagggactgccaggtcaagggagcatggtttgtcaagacttggcactctgtgattgccgttagaaagcctgccccggaggccgggcacggtggctcacacctgtaatcccagcactttgggaggccgaggcaggtggatcacgaggtcaggagtttaagaccagcctggacaagatggtgaaaccccatctctactaaaaatacaaaaattagccgggaatggtggctagtgcctgtgatcctttcatatttattcaactgttctcttacaaatgaacagctacttgggaggctgaggcagagaattgcttgaacccgggaagcagaggttgcagtgagccaagattgcaccactgcactctagcctgggcagcagagcaagactccgtctcaaaaaaaaaaaaaaaaaaaaagcctgccccagaaaaaaagatcttctaagtgtatcgttatgggaaaaaacaaacaaacaaacaaaaaaaaccgagacaagcattggaaacattttaaggcagccctccgaaaaataaatctagctgggcgtggaggtttcatgcctgtaattccagcactttgggaggccagggtgggaggatagcttgagcccaggagtttgagagcagcctagacaatataatgtgactcagtctctaccaaaaaataaaagaaaattagccaggtgtggtggtacacacctttggtcccagctattctggaggctgaggtgggagggtcatctgagactggggaggttggtgctgcagtgagtttttttttttttgannnnnnnnnnnnnnnnnnnnnnnnnnnnnnnnnnnnnnnnnnnnnnnnnnnnnnnnnnnntgagtagctgggattacaggcatgtgccatcatgcctggccaatttttgtgtcattagtagagatggggttttaccatattgaccaggctggtctcaaactcctgacctcaggtgatccgcctgccccygcctctcaaagtgctgggattacaggcgtgagcygcagtgcccagcctacagtgagctttgctcacaccactgtactccagcctgggtgacagagcgagacccggtctcaaaacaacagcaaaaaaaccctaagaccagctactggggaggctgaggcaggagaatggcgtgaacctgggaggcggagcttgcagtgagccgagatcgcgccacggccctccagcctgggcgacagagcaagactccgtctcaaaaaaaaaaacaaaaacaaaaacaaaaaatatatacacctactatgtaccccaaaaattaaacactaaaaattaaaaataactaggtatttgtagtaaatctaggtgctcttcagtttgaacagggcctcttatctagtctgaatactccaatactgatggttcccttgtgctggaaggcatattaggtgctcaatgaatactcttgattctttgttacaattgggtaactcctttgtttacattctcctgctctgttcttgcaaatgtgtgtttcaagggggtgtgaccaaatgctctgtgtagctcaggcacttcctgggtgagtgtagcagttggcagctgtagcccttggctcagattgaagagaggtttttttttgcagctttggacttaggcctgtgctggtaaggtttgtgaacctgggccctcggggagctggtgagggtgggactggtgactgtgtggtgtccccaaggctggcgtgtgcaggagtgaccgtgtctgtgcttcaccctttcttgcagtcctacttgattgtcagtgacaaggcccgagatgcagctgctgtccttgtgtccaggtaagtttccatggcacatttcttggtgtgtggctggtgggttctgagaggggtttgtttgggtacgtgtttcatgtgcrtcttcagtcctcagacgaaggaccccgggaagtctttggactctgtggctttctctgagggagygtgcagcagtgtttgggcacagaagacctctgaccctgaaatgaccaccctcagtggtggtttggggtgctggtgggggtcacctgacaggcccatcgacaggagtgcaggtctggaagaggcgtggctgtcatccctggggtgcagcccctgcacagggatggggtggcagttatgagaaacatctcgggccgtctcccatggagatgatgggtggtgttgggcctctgtgactggggatgaaaatcccccaacgtcctgtattaactgcaccccccgtgtgccccagacaggggaaggtggttttctctgctgagcgcagcaggcctgyggtgttggaaagataccaaggatgtgtgtatagactgagcgaacctgtttcatgagatgcaagaaggaagaaagcaatatttctaatcagtattttacatgacatgtgattttaagtatgtatgtagtttactaagtcagaacagttgacattttccccctctgcaatagtgaaagtcgaaagctggtcctaaaacctttcggtggttgtggttgggaatacggtcagtgcctcatgcarcgtcaccttcactcgggtgtgtagctgcaacttgcacagcttctttcccagagaagtgggaggagagaagcttcctttgtggggcagttggaggcattggatgaggggtttgtgacagcctggagctgaggaaggaacgcctgagtcccctggagcaggtgaggcccctcccgagagggcagaggctgcttcctgtcttgtcaaggacataaaaagatgatcgtctaattattaaagtaatctgtatatatttagataatagagcatgaagtacaaaataaaacctttgaatgctttcatcccatgggggtgtgatggcccctgtctccctaccgggtggcgccaactctgtccatggtctccccgcggggcggcaccaactctgtccatggctcagttgctgcactcaattctttgcaccacggaccaggagatgggcctggtgcgccattgtcttcttccaaaacgagatgacctggtgcgagagtgtcttttctttttctttcttttttttttttaattgagatggagtctcactttgtctcccaggctggagtgcagtggcacgatctcggctcactgcaagctctgcctcccggtttcacaccattctcctgcctcagcctcccgagtagctgggactacaggtgcccgccaccatgctcagctaatttttttttgtattttcagtagagatggggtttcactgtgttagccaggatggtctccatctcctgacctcatgatccgcccacctcggcctcccaaagtgctgagattacaggtgtgagccaccgcgcctggcccgagtgtgtctttttttttttttttttaatttttttagtatttattgatcattcttgggtgtttctcagagagggggatttggcagggtcataggacaatagtggagggaaggtcgcagataaacatgtgaacaaaggtctctggttttcctaggcagaggaccctgcggccttccgcagtgtttttgtccctgggtacttgagatcagggagtggtgatgactcttaaggagcatgctgccttcaagcatctgtttaacaaagcacatcttgcaccgcccttaatccatttacccctgagtggacacagcacatgtttcagagagcacggagttgggggtaaggttatagattaacagcatcccaaggcagaagaatttttcttagtacagaacaaaatcgagtctcctatgtctacttctttctacacagacacagtaacaaactgatgtctctttcttttccccacatttcccccttttctattcgacaaaaccgccatcgtcatcatggcccgttctcaatgagctgttgggtacacctcccagacggggtggcagccgggcagaggggctcctcacttcccagacttggcggccgggcagaggcgccccccacctcccagacggagcggcggccgggcgggggctgccccccacccgagtgtgtctacctgtcgtttgtggtgggacatttagactgctgccctcccaatttggtattaaaactcaatattgcaaacagtccacgtaaaattgtgtaccgttctgactgatttctagggatgagtttctacaagtggaacgcacgttttcagggtctgaatgcaattactggagaggctgaacaagttggaagttctttccccgtcttttccagttgggtcaaaccttaagaatgtttgccaacttcgttcaatgggaaatagtatctgcttttattcttacttttcttagcagcagtactgagggttgcgtagatttttgccgagcttggctctgtggagtgcggtgcctgtgggccaggaggcaccatctgagtacttctccctccgtggggtcctccgggaaaagagcgcgctggctcgggatcccgggcggactcccggcgagacaccgcagcgccacctagtgccgggatgagcaggtgcttttcggccgagccagtttccgtgcagaacacctgagcctgggatccaggagaggtggtgcctgggggcgtcggtgccgtggagcctttctcccccttggtctcgcacactctcgcacactgattctcaagagtgtttgagaatggcggatgccgtcagtggaagagctcttacaggtgcttggccggttccctcgacacctcccagactcaccgcaggttctgagtttcctgtacttctcagacccctttttggtgaggattgttcaggtaaggccagggctgcgaggggtcctgtgccagcatttgtctgcagtacaggttcgttttctgctctccagggaggagcagcctgctctagcccactttgctctcaggattgaatgcttctccctgtatcactggcggctctacagctgcacccgtctcccttgattaactgagcttgccaacatccacagygctgtaggtggtgcttggtgttacagtgttgctagaacatgcagattgagtgctgccttagaaacccacaggaaggggaacatcacactctggggactgttgtggggtggggggaggggggagggatagcattgggagatatacctaatgctagatgacgagttagtgggtgcagcacaccagcatggcacatgtatacgtatgtaactaacttgcacaatgtgcacatgtaccctaaaacttaaagtataataataaaaaaattaaaaaaaaacccctttaatagatatgcctttcgccaggcacggtggctcatgcctgtaatcccagcactttgggaggctgaggcgggtggatcacctgaggtcaggagttcaagaccagcctggccaacatggtgaaaccctgtctccactaaaaatacaaaaaaattagctgggcatggtggtgcgtgcctctaattccagatacttgggaagctgaggcaggacaatcgcttgagcccaggaggcagaggttgcagtgagcagagatcgcaccattgcactccagcctgggcaacagagcaagactccatctcaaaaaaaaaagaggtacgctgtatgcagaaaagttggaaatcttggcgtggcgtggtggcacgcacctgtggtcccagctattccgaaggctgggtgggaggattgcttgagcccagaaggttgaggtttcagtgagctgtgattgcgccactgcattccagcctgcacaacagagcaagaccctgtctcaaaaaaaagttgaaaatcttgaaacatagaagttggaaaaagatatataggtaattcttatacacagtgcgtgtaccgtgtttatcttctttgcaccgttatgacttttaatgtgcacagcatgatcttaacaagtcagagtcagcactgtgctttttcacctgatttcatgtaactgctgatgaatggctccgtcgtgttctgctgtgtttcgatactgcactcagctctgtcacttcctgcctcttgtgagcagtcacggaygcctgggtttggttacagacccgttctcgtgtcaggattgtttcgtgaggatgggcccttagagatggacttctgggttccaggacacgagagtggtgttggggtctgcacacctggtggctctcagctgctctctgagcagtgctttggtggccgaggcagccccaggaacaccccacccccaaattggattaaacatggtgtcgctgattgcaggtatttaattggcatcacgctgattgccctcaccttaggtgttacatactccgcttcgtgacctgactctgcgtgtctgtgggctccttggggccttttcttccccacgagtgtgagtttcctccggtgaagggcgatgggkattgccccaggtggttgttggccttttcctttttttttggaccaaagttttaattttaatgtcaaaccgtttttttctcctttatttagttatttttacttttaagcctgcagtcttattaagagatttaacaagtagtcatttatatttttctctaccgtttattaagacagaattattgattcatttggggtttcttttggtctacagtagaaccccgcccttcccagtaggtaaccagttgctttagtgccattttgtgtctgtagggaccagcaccacaaggtcggtgggtttctccctgtgtgtggagatgagagagtgtagaaataaagacacaagacaaagagataaaagacagctgggcccgggggacaactaccaccaagttgcagagaccggtagcggccccgaatgccaggctgcactgatattattggatacaagacaaaggggcagtgtaaggaatgtgagccatctccaacggtaggtaaggtcacgtgggtcacgtgtccactggacggggggcccttccctgcctggcagccgaggcagagagagagagaggagaaggagataaacagcttacattattatttctgcttatcagagacttttcactaatttgctactgctaactaaacggcagagccaggtgtacaggatggaacgtgaaggcagactaggagcgtgaccactgaagcacagcatcacagggagacggttaggcctccggataactgcgggcgagcctgactgatgtcaggccctccacaggaggtggaggagtagagtcttctctaaactcccccggggaaagggagactctttcccggtccgctaagtagcgggtgtttttccttgacactaacgctaccgctagaccacggtccgcttgtcaacaggcgtcttcccagacgctggcgttaccgctagaccaaggagccctctggtggccctgtctgggcataacagaaggctcgcactcttgtcttctggtcacacctcactatgtcccctcagctcctatctctgtatggcctggcttttcctaggttatgattatagagcgaggattattataatattggaataaagaataattgctaccaactaatgattaatgatatatataatcatatctaagatctgtatctggtataactattcttgttttatattttattatattggaacagctcgtgtccttggtctcttgcctcggcacctgggtggcttgccgcccacagtattccgcttttccattcatttctaatgctctgtgggaactctgtgcgttttaaagggaacacggtttgtcaccaccttaatgctgcttccttctgcgatgaagttaactgccctgggccccttttgcagatccgctaaagttaactctcctggggaggacacatgagtttcttttttctttccttttcttttcgagacagggtctcactctgttgcccaggcgcgagtgcagtggcgtgatcacagtttactgcaacctccatctcctaggctcaagcaatcctcccaccttagcctccccagtagctgggactgcaggcgcatgccacgacacccagccaatttctttttcttttttttttttttgagacggagctttgctcttgttgcccaggctggagtgcagtggcgtgattttggctctactggagtgcaatggcgtgatctcagctccactgcaacctctgcctccctggttcaagtgattatcctgcctcagcctcctgagtagctaggattacaggtgtgcgccaccacccctggctaatttttgtatttttagtagagacggggtttcaccatagtggccagggtggtctcaaactcctgacctcaggtgatccacccgtcttgacctcccaaagtgttgggattacaggcatgagccactgcgcccggccatgcctggctaatttttgtattattttctagagatggggtttatttatttatttatttatttatttttacggggtcttgctctgttgctaggctggagtgcaatggtgagatctcggctcactgcaacctccgcctcctgagttcaagtgattctcatgcctcagcctcccgagtagctgggattacaggaatgcgccaccatgcccagctaattttttaatatttttagtagagatggggtgcaagacaggctgttctcgaacttctgacgtcgtgattcacctgccttggcctcccaaagtgctgggattacgggcttgagccactgcgcctggccaagatgggggtcttaccatgtttaccaggctggtcttgaactcctgaactcaagctattcacccacctccgcctcccaaattgctgggattacaggggtgagccactgtgcccagccaaatgattctttactttctggaaatagggacttctttccccattgttcatgctgagcccctccctaagcatgctccacagggacagtggcggaggggagaggtccttgctgttacgagcagttggcaggtgccagccgtcctgtcagctgggcagcgcttctgttttgtgagggccatgaccgagtaggatggcacgtgcgtggctgtctcctgtgtgttaagtgccctgagagggcttgtccccacggaagcatggagccggctctcgcgcaggccaactagatggatgtgctggaacaagggccgggaaggtgggatggccggagttgaagttgcagtggagatgacgtgggggccggagggaggktgggcgtcatagcctggcagctccagcttccacgtctcaccttgcctggggtctccacgtagctgtctcgtgggcgtcgcgtggggcactcccccacgtggactcttccgcctcctggccctcccaagtgtcccttccgggaggtggccttgtggctgttgagggagcgcctggtgcctccctcctggcatcactgccgtctccttccccccaccccataaaggtgtggctaggatgccagtcagacctgccggcatggcctaaagaggaggtgggcaggcttggccagtactggtcctgtccccagcacctctcccactcggctgctctgcttcgaccatgttgcctttgcagttcgcgagttcccttggctcccttctgccctgggccctggctctcctgcttccctgggcagcagcactttcctcccaggttttgcagcccccctcgttgagctccgtggcttccgtcctctctctaacgaggccatgccctcccgtttccttcgtaacttttctttgcactgtggaagtccccagctgtttgtcgtttctctccagagtgtcagctgtgggagggaagggccttgtctgttctccrtgtggcagtgccagtctcgatcatggaggcaagctgggggcctggcctatgaactcctggtggagaaatcaggaggatctgggctaattagctgggcatggtggcgtgcgcttgtagtcccagctactcgagaggctgaggcaggagaattgcttgaacctgggaggcagaggttgcagtgagtcaagatcacaccactgcattccagcctgggtgacagcacaagactccatctcaaaaaaaaggaagacttgggcttttttttttttttttttttgagacagagtcttgttctgtctctcaggctggagtgcagtggcacaatcttggctcactgcaacctccgcctcccgggttcacgcgattctctggccttagcctcctgagtagctgggattacaggcgcacagcaccacacccggctaattttttgtgtatttttaatagcgacagggtttcactatgttggccagactggtctcgaactcctgacctcgtgatccgccctcctcgtcctccaaagtgctgggattacaggcatgagccactgcgcccggccagatttgggcttttggtttgggagctctgtgtgctcaaggtgtcctgcgctgaggccgggctgcaagaggggtggggagtgtgagcactgcctggaacacgaggccgagtccaacagggaagactttcatggggctacacgagcagctggctgtggaaacaggcctgtgcacaagacgcatggcaggtgtgggggagggaggtcccaggggctggggmccagctgccggggccaggccttgcacgtgggcacggtgtcctgaggtcaagggatgcagagttgggtccagggaggagggaggggctgagaagtgggcaggggctccctggcggtgatggggacaggtaaaactgggggggtggagggggcaggcggggggggatgggcagtaggcctgcgacctgagaggttgtggtggggaaccggctgctgagggccctggtcagggcagcgacttggtttctagggttggagagaggaggaactagctggaggaggacaggactcagtacagagctggcatcttggtgtaagggtgcgtgaggtgggagggcctggggaggtgggtgtgtgtggggtgggctggtgaggcgtgggcgaggtctcagtgctgaggccttggttgagctgtatccttttggcagatttatcacacgtcctgatgtcaagcaaagcaagatggctgagttcctggactggagcctgtgcaatctggcccgttcctccttccagaccatgcagggggtcatcaccatggatgggacgctgcaggccctggtaagtgctgcccgcaggggctgtggagatcgcagggaaatggcgccttacatggggaccacggaatgatgttacctgtgattccatcttgacgtaattggaaccccgtgggattgatttaaccgggccagggtcttgggcagtttccttttccctctgctttgggtcctgcctcaggcagggctggtttctgcgctggtgctggtggatgggcttggagccccacctgttgccagcagagggcagtggtgccacgcagccsgggctccccagggtaggtttctctgcatctgggctgcttagttcctgtttaagtgcagagactgaacgagctctaataaaacaaggtgggtgwgttgaaatttgattctgttcctttgcactgggctcgggttggatgttcctgactgcttcgttgggacacagaccctggcctctgcctgcaggtgcctggttagtgccctggctgcagccctttgccagccctttccctgccctttcgctctgattgtctcttgtgttaccttttcttgtgctaacgagraggaaaggtcaagtctcagaagagggcaaagcctcttttgggtcagcgtcctggaggctgcagctccctggtcagccttctggagggggagccggcagccggctgtggcctttggcgtggtgggttcagcgccttcttctctctttaattacagcgggtgaggctttgagagcacttctcatccttgtctcacgctgtggagcctgtggtccctctgaggagcggggcactttgttcttgtttaaaaaatatattttatagagacagggtcttgctatgtaggtcagggtggtcttaaactcctggcctcaagtgatcctcctgcctttgtgatgatcccaaagtgctgggattacaggcttgagccgccgcgcctggaaggacactttggagcgcgttttaggggagatgatgagtgccacctcgccacggcgtcctcctgtccgtggcgtcgtcctcctgtccgcagcatcgtcttcctatccgcggcattgtcttcctatccgcggcgttgtcttcctgtctgtggcgtcgtcctgtctgcggtggcgtcgtcctgtctgcggtggcgtcctcmtgtcckcagaggcgtcctcmtgtcctcagtgttgtcttcctgtccatggcgtygtcttcctgtctgcggtgtcgtcttcctgtccatggcggcctcctgtccgcggtgccctcctgtccatggtggcctcctgtccgctgtgccctcctgtccgcggcgtcgtcttcctgtctgtggtatcatcttcctgcccgcggttttgtcctggccgtggcaggttctgccagggagcgggaggctgtcagctgggtggaggggggctgtgggagtgatagcctggggtgggggcatacgtttcttgagggggaattgggaagtgtcctcctcaatgtctgctgcttcccggtcatgctgccgtggtcttcaggagggcagcctttgaaatgaggaaaaggtttcagacgtgtgagagaaaactgcagacgtgtttcctggagcctgtgctctgcccaggtgatgtctgttttcttcaggcgtcccctcaacctccacataaatgtgacagattcagcagttttcaaaaatcaagatataattcacataccacaagtaatttatccttctaaggtaaacaattctgtagttttctgtgcggtcatcaccattatctaacttcaggacactgtcatcatcgtgagagaaaccttgattgcaccgagcagtccgtccctcaccttccccagcccctgcagccgtggatccatgtgctgtccctgtggacttgctggttgcggacatctcacctcaccagagtcgtacacgacacagccttttgcgtctggccttcactgagcccgatgtgtccaaggttcatctgcgctgtggtgttgtcagtgcctcgttccctttatggccgaatcataagccaacgtgtgggtattttccatatgccarcgtgtgggtattttccatatgccagtgtgtgggtattttctgctcttacaaattacgctgtgaagaactttcatgtgcaagtttttgtttaaacttaatgctttcaggccgggcgcggtggctcatgcctataatcccagcactttgggaggccgaggcaggcagattacttgaggtcgggagttcgagaccagcctggtcaacgtggtgaaaccccatctctactaaaaatgcaaaaaatagccaggcatagtggcgtgggcctgtaatcccagctactccggaggctgaggcaggagaatkgcttgaacctgggaggcggaggttgagtgagccgagatcatgccactgcaccccagcctaggtgacagagcaagactctgccagaaaaaaaaaacagaaaaaacaaacccaacttaatactttcagtacccttgggtacacaacactagtttttaataaaattttaaacaaaatttggaatgttttcatctttctggagtctttctaaaaagatttttctggtggcatacctgtcgtactgatgaaatagaggacctcctcatgccaggcatttttgggcattgcaggtacagatgtgctgtctgtgtccccaggtgcccctcgttccggccgtgctggggcagcatcctcaatgcctaaagaggattcattgctatcgtggaggtcagggcaggctgaggctggccttgaagggtacgggggtggaggggtagggcagggaggactcaggtctcggacgtacccactgtgccattggtccatggatcctcagggaatgtgcgttttatgttttaggcaattctggtaaaggtggtggatttagttgcaattggattcttcattttttgccttgggtctcactgaggaaacatgaagaaggggtagatggcagtggccagggtgggggtcctgggaattctggtagcttcaccttaatgtttgtgatgctgggtgtacagacagcctcccacatgaccaaggacacgctcttaggtccctaagaccccagaagaatgggccgctactgccaagaagtatgacatgcgtgtggaagaccatgagccttacccggctggtggcatggggtgtggcaactgccgcagctccccgaaccattgcagtgggaaaggggtacgtgctgtgactaagaccactggacccgacccatcgcagcgacagggggtccatgctgtgtgactgagaccactggaccccacccatcgcagcgggaggggggtccatgctgtgtgactgggaccactggatcccacccatcgcagcgacagggggtccatgctgtgtgactgagaccactggaycccacccatcgcagcgggaggggggtccatgctgtgtgactgggaccactggaccccacccatcgcagcgggaggggggtccatgctgtgtgactgggaccactggatcccryccatcgcagcgacagggggtccatgmtgtgtgactgagaccactggatcccacccatcgcagcgggaggggggtccatgctgtgtgactgggaccactggacccgacccatcgcagcgggaggggggtccatgctgtgtgactgggaccactggatcccacccatcgcagcgggaggggggtccatgctgtgtgactgggaccactgggacccgacccatcgcagtgggaggggggtccatgctgtgactgggaccacctggcctgaggttggactggtgaaatgacaatgttggcacctacatgtgtgtcaggatccatgtggatatgtcccgcacacctgcttcttggaatattgtgtaagcagctcttcagcttcacggccttcatgatcgtgttctgggtggggaagaattaaccagcctaccagcccgtggggccaaagcagtgtccttataatcatctgcacctggaaccaggtggcgatcccaccgtagaacctgtggctcacaggatctgaggtggcttcgagggcttctctgccctctaggattccctcatccttagaaatttaaccttaatgaaatccctaataaaactcagtgctgtgggggaaaaacatctcaggtcaggggagcaaatgggaggtctaacaggatgtgaccagagctggttgtctccaatggctctgccccgagtgtggtgcctctgcaggggaggccgttagccctgccccgagtgtgggtgctgctttgggaggggaggcaaatttgatctctgtccggtctcttaacgggcttctaggggtctcctgcagctctcgtcagcctggcctgggagcctcccctcctctgccgtccccaccccatgctgttgggtcagcaggatatcccagccttggggctggagccagctgtggctgcccagggacttgcaggcaggtgaggcgtgccaccttctggccaggctggctgtgggagaggcagcctcctggtgaggggctgtgggccactgcgttcaggctgccttggagggctccacggtgtcccctgggtgcagggctccgagtccttctcggcttgggagggtcttgtggccacatgtgtctagttctgcagtttctttgttgtgggttcggttctttacttttttttttttttttttgatgatcttgttggttttctctagattgttcccaagttttctgttcttccatcccaagtgggagacacgtgttgcacagcctgcatttggaatacccagagggtgggtgggcgggacggctcgctgccccattcccctcctagctgctgggacaggtgggaattcctgtagcaaagtcaaaccagccaggagtggggaagtgctttttattttgacatctccaagttccacgttgaggtggagagacattcgtttttccccttcctcccgaggtgtaaaacggtcttctcaaaggcttaggagagccgagccctgtgccaccccccggcatatgctggcaaagagtgaggcgtgctgtcctgccgtttagggcagagcacccaggcggtttggcagcagcacctcagaactattcagagatttgccctcagcaagagtgagcaattgtctgacgcagccggctgaaatccctgggaagggaatgaatgaaactgccgtgaagcaacgcctggcggggccgggcttctggcagctcctggggccagcacgtcccttccagagcgtctgaagccctgggcggctgctggagcatctcgagtctttccagagtcatgtgtgttgtttccttctgtctcttggaagggtccgtttggtctgatccaggttgcctcagcaggaggaagtcgtgctgggtgctgagcgggtgggaggtttcaccttgggcttggcagagctgcaggcagaggccgggcgcctgctgtacatgatgaaacttgcaggtggattctgcttagggtttcatctgtttcctttgatgcacttggcttcattgtcatccacctgttcattactgtgggcgaaacaggtgaactctcaacaagtaccatcgaaaccaggatttgatcttcatttccctcgaagcgtagttcccttgcagtgagggtttttaactcctgtgggagggaagcaagtgtttggcaatgtaatttccctggaaggcccctgtacttcagctttaaaaacacgctttggtttagtcccaatttaagcattaagattaatgcaaattgaggaaattcaaggaaggagaaaaacacattaaaaatggaaaatgggctgggcacagtggctcatgccggtaatcccagcgctttgggaggccgaggcaggtggatcacttgaggccaggagtttgataccagcctggccaacatggtgaaaccctgtctctactaaaaatacaaaaaattagttgggcatggtggtgcgcgcctgtaatcccagctacttgggaggctgaggcaggaaaatcgcttgaacccgggaggtggaggttgcagtgagccgacatggcgccactgcattccagcctgggcaacagagcaagactccatctaaaaaaaaatttacaaaaaggaaaatggctgtcatttcatgtgtgactctgcttgctgattgatagttgtgctctcttggtttctagtgctctgattggaagattgtcgactgtgtggagtgggtttctccctgtgtgttctcacaatggctgggaggcggcggcggggctgggggactcggactgcgagacggggctgttgactatgaaagtggtaataggatgctcttccccttatcggctgttaggctcgagtctcccctttgcagtgcggtttctttttatttttatcattgacaaaagcacaactcttgttaaaggataaaatagtcacacacaacagcattaaaaaccaagaaagccaaagaacgctggcactgtcagcctcactcccagctcccgctcggyccttgtgaagagaggtgctgaagccactctgcttttttatagttaataaaagcagccaggtccccaagtaggagtggttgtggccaagagtgtgtgggccgggaaccagggcttgagctgctgtgagctgtgcccaggccctttgctgactccgtctctcctgtgacctgaggccagggtgagcaccagcgcccgccccacctgggagggaagcagcagacctctcaccgcagaggctggtgtgaggctaattagcacagtcagtctttgaagatgaaagaagacagctgattatctaaaacatttcacatttaggctttgatttctcttcagatttggggaacagcaccctactgtttcatttagggttcagtgtggccagaggaagatgacccacgtggtcctttttagttgtagtgctctcttggggcaaggttttggatggagaaaataggacaagagcagtttgaatgtgggtactttccagagatcatgctcctgtagcatttgggtgaaacgaggtaccccaggccacgctggttcggtctcctcgtggcgttaaggaaagacctggagcagccagctcctaacactcatttcccatcactcagcattttatgtggggcgggcacagtgccgtgagtcttacagaaacctgcatggtgagccgcacgcctttgagtccccatcagccctggcccatccctgctgaggtggcgcgacctgctcacagacgtgtgctcacaggcagcccgtcgcggggtcatgtgctagacggggagggggcttggcgggtcaccagcctcaccccgctcagttcttagatgaggaagagacaggcagagagctgggctgggctgctgctgagtgggctagagctgggtctcagtggcccctgccccagtcgtcctgacctgtggcccctgtgcaggttggggtgcccctgccctctcccctgccccgccctcacctggctcacagacccgtgatgcctcactgcccacgcagtcaccttagaggcaccttccctctaaggcagatgtccctcaggctttggtcctggctgttgatatctcagctctgattcacccttgacctttattacctgatttctgtccttggttctcgagccctccttctgtggacccgttgggtacacgtgtgacacttcagaacccgcaagtcccaggtcacacctgttgtaccatcactttcccctcctggcctgtttacccgggagcccagcaacaaatgggagcttctgtgctgctgtccgtgcatacggcccaggagccgggctcatccccgagacgccgtgttccctcccrctgtccgctcacacctgcctgtgtggacgtggctctgacatgtctccttcctggttcattgctcatctgttctcatgtggctgcgccgccaccctgtcctgggggtccttgtcccagcacgtggctctgtgcttcacgtcatcctgagtctgtcccgctctgcygcctggtccaggtgggagccatttccttctgtgaagtgttccctctggaggccctgggctccccgactaccctcccgcctctcctgtggctgtcggctgcagtaaaggtgctggtggagggtgtgagccatccattcatagagtgccagactctgtcccatgctgcctctgtgcccttgatcctggcagcacacctgctgtcctgtggcctgcgtaaagggtggcctcggaagcctgtggcctgggtaaagcgtggcctcggaagcttgtggcctgggtagtgggtggcctcatcttggcctcggaagcaggagggctcaggctgtggcccacgcctggggttccccatccccccgtgtgtcctggtgtctttgcttggctcgccggcctccatgggctccccaggtggcaggtggctctcagccatgctctccgtcctcaygcttgtttctgccctggcagagctgctcagtggccagcccgtgggacccctgtgcaccctgccgcccccagcatatgtcagcagcgccgtccgggggagatgtggcatcagcacagccttgtccttgtctctgcccgttcttccttccttgcctctatgtgtctgcttttttctcttccacatggtgtccacagtggataaccacatccactggcctcctggttggtggatcctcctcctgctgggctcagagctgtgccacccccacctgcactgcagagaagctcagacccctctctgacctcagacgctggagcctgagccccctgcttcccaggccaatgccccttcaggtccctgcaaagccactgctctttgtggtctccctgccgccgttgccctccctttgccgctgagcccgtgggctgcttggtggcttgggagctgcatacaattctattttgtctggtttgttttcaggctttctgtggcaggaattgtgtctcttgcatctttttttttttttttttttagacggagtctcgctctgttgccctggctggagtgcagtggcgcgatctcggctcactgcaagctccgcctcccgggttcacgccattctcctggctcagcctcctgagtagctgggactacaggcaccctccaccacgcctggctaatttttttgtattttagtagagatggggtttcaccgtgttagccaggatggtctcgatctcctgacctcgtgatctgcctgcctcggcctcccaaagtgctgggattacaggcgtgaaccactgtgcccggccatggatcattaacctcttttctagcatcttacctctgtggtggttcacttttgcgagcttttgctgggccttggaaggtgcgtgggctcgctgctcctctcttctgtgggaactgttgcctttgggcagggggcacaccccagaggtggtcacacacacctgaacgggagcacagtcataagtccctgtcatgcaaagatgggctgtgcagaatgagctcggaatagcagccagaaggctcagtgatgggggagttgtttaagctggaatactgtaatgctgctggmtgtttatggctgtgaggtcactacgtgggctgctgagaacattttaaaatgctgagtgagtcatgaaacagtcatgcgtcccctaacaatgagggtagtcctgagaactgcgtcgttgggcagtgtcgtcgtgtgaacaccgtagcgtgcacttaaacatagatggtgtggcctgctgctcccaggccaggtggtgcggcctgctgcactcccaggccaggtggtgtggcccgctgctcccaggctgcaaacctgtacagcacctgactgtgctgaatactgcagggaactgtaacacagtggtgtttgcacatctaagcatagaaaaggtacagtaaaaatatatcatcagctgggcacggtggatcacgcctgtaatcccagcactttgggaggccgaggcgggtggatcacgaggtcaagagatcgagaccatcctggctaaaatggtgaaaccccatctctactaaaaatacaaaaattagccgggcgtggtggcgggcgcctgtagtcccagcgactcgggaagccgaggcaggagaatcgctcgaacccaggaggcagaggttgcagtgagccgagattgtgtcactgcattccagcctgggtgacagagcgagactccgtctccaaaaaaaaaaaaaaaattatatgtatatacacacgtgtatacatgtgtgcacacacacacacacatatatgtgtatatatatgtatatataaaatccttttatgggctcactatcaatatgtggttcctcattgaccagaatgttctatgatgtaggactctagtgcgatacactgtcatgaacagattgataaattaggtgaaggatgatgcctgtgaatgacagacgtaggaagccacaatcattttgtgttttccacactctctttgagagctgtgttgccttggtttatggatgaggacatggacccaggtcaggggctgccaggtcggtgctggggtgtggagctgggccttgcatggcccccacctgtgaaggtaattagtgtttaccttacagtccaaagtttggtgaaaaataacacttcgttctggaaagataaaagctagatgtgattatttcgatcattgaagcatttttgtgtgaaattacctttttttttggtgtcagtggcatgatctcagctcactgcaacctccacctcccgggctgaagtcatcctcccccctcagcctcctgagtagctgggattacaggtggacgccaccacacctggctaatttttgtacttttagtagagatgaggtcttgccatgttgtccgggctggtctgggactcttaggctcaagtaaccctcctgccttggcctcccaaagcgctcggattctaggtgtgagccactacacccagcctgaaattagttttcattttgatatttgttttcttaaaattctttataatttgtcagaaatttattttgtcagaaacagtatattttttcactctggggctctgattctaatcagtcatttaccaatccagcaatgaaagttttcacttccgtcaatggcttttttcctctgaatgtgtggtggtcctgaggggagtgcattttgctcgctcctgggggaggcagtggtctggcctgtccccaccagtgccccctaggccccgccttgaggacaagctctcttctgtttctgagcgctctcccgtcctgtctagggcaactgctgctctttctaggggtggtagtggggctcttgaagatgtccctcgctttgrtttttgcaggccagcaaatgcactggacgttgtggtttttctggcctccagtagtggtgtggtgggaaggttcttttcctgccctgctgctgaggggagcctcgagcgtaccagagttcctcagtgaagcctttgcacgtcctgcagggtgcagcccagcatgggtttcactgccctccaggaaaggcctggccctggtgggctcgctgcagcacaggcacggacctggggctgtgctctcaaggcattccagcctggaaagggttgttttggtgttaaagatcctcttccgtgcctgtcctgtggcccctctgtgtggcatgccyaagagtggctttgaacatggctgccctccgtgtgctgagcctgcgggggcacggctaccctccgtgtgctgagcctgcgggggcacggatgcgattggttgcttcccaagataccatttcttggtgtcggagcaggactcgggatggcagaaaggggaacagactcgctctcctcatctgcagagtcggcatggttatgtggggccacagggtgacccgctggcctggagctagcgtggtctcagccatctgcctcagtgccggccggcactcacagcttctcagaagcctgtgttaccagccagagccaagcctgaactggtgtggtgtgggggcccttctcccagggcctcgggtggagttgcttttcttggcctagatttggcagtgcctgaagggagcctcaaaccagcatctcctgcttggcagcgggtgagcttgctcccgagtagctcgacagcctgtgatttactgggcttggagaacatgccccaggggggggaagctggctcgcacgttgcagagaagccagcttgggtgggtagccatcgaaaggtggggcgggttaggatgattgctgagaaactccttttgtttgcagcttgtgctgtgctggtttctagaacaacaaaaacagacctgcagtcattcctcatttaccatgcagggctgttttcctctaatccctggtgtcatcacctctgtctagtgtatgcttttcagcaggtggttttaatttggttcccattatgcttccatgaaagtgggctgtgccccccattttatggcctagcttatgagcactcaagaccattgatgactagagtgcgctctctctggccgcgtcctcctgctgacaggtaccccatcccaccgccacgctgagcactggccactgcacactgcacactttctcwggtgaagatggccttacttttcagtgaaataaatggaaacaaagccctgtcttcattgactcgttccttccctgtcgtctcttttgccctcctgcacccatgcctgggaaagtggataacttttggggcttttctctgtgtgtgctgaatgcccaggaggctgcctgtgtaattcagctggaaactgtccccagggtagagagaagtgtgaggagaaaaagacccttcgcccggtaaatgtgtggggttctggtttctcccttactgcagatggtggcgggccctggccttggtgctgtctcctgtgtgtagctggggacggtggaagctgggctgggcctttccaggtgtggggcatccaggccagttacaagagatgatgcttgctttcccgagaactcatcaccacttgtatcttagtctgctgtagagaatgttgtactacacttcataggaattgagtaactaaacaacgttcatgtgtgagggcactctaggaatttcacagtgtcttggattctttttatttagtgagagaaaccagacgacgtgttagcccgttgccaagtaaractgggggacacgtcagcctgttgccgagagagaccaggggacatgttagcccgttgctgagagagaccgggggacacgatagcctgttgctgagagagaccggggaacacggtagcctgttgctgagagaggtcatttcccggatctttgtcctgcgtccgcccacagctgcacagctgctcttctggtttaggttctggcctttcccactggggttttccagcagcctctgtagcggtcttcgttgttgagcacttcactgttcatccccaggttctccatccagctgctgttggaatctggtcatgtggccatggctgcaggtgatacggtggtgctctttgcctgtaggatgagatttcagccgctcgcaggttcatttgttgtggaacaacgtactccacagctggtggcatcagtgacagccgcactcttgcgtggatcgattctgtggcctcgcagggtggggtgcagggggccgtttgttactgccctttgatgcctgggcctctgccgagaagaccacgtggcaggtgccttgaagggctgggtgcggcaggggcccttgactgaagctggctcttcctgcatggcagccggcttcccggagggagtgtctcaaggggaggtgtctggagaggccctgaaagaggccgccaggcttctgacctgggattgggggtcactggcatcactcctgcctgcctctgttggttgtggcagttggaagcctaccaaggtggtgggtgagggacccttgattgtccgtctggcaaactctgttccccactgagctggccagccggctgcagtgacagcttctctgtgaagtgtcttgtcttcttatcccccaggcgcggtccggcttctcgttgcacactggtgggcttcaggccgtcagcccacctcccagggaatttgagtgtgtgcttggccctgcgactgcccccgaaccccgcgtcccgttgcggggagctcgcctgtgccccacggtttctgctcagcaagtgttggctctgtaaaccgatgacttagggttaaaacacatattaaattagatacatctggactggtgtgaaataatttaactttcgattttatatttcacacaaactaaagatggggaagagttcttaaagttaaatgagaacttgttttgggcaaacaaggatcatctccattcacttggtagggaacgtgttactatccatttcgctaaagagaaaggggctaagtctctgatcaccttggtgaatgtgttattctgagtggctcagggaggtgggtgctgccactgccccattttacagacagaggaacaggagcgcagagaccctgctctgctccacaggcgtgactggtggtctgtctggctgtctccttccygttttgatcgtaggtgtgggatctgcaccacaggtgtgactggtggtctgtgtgccttygctgcttctccactcagcgcttaggagagccccccagcgggctccatggagagagtctaagttccctctccttttaagaagatgtttctattctacacttaagtaagagatcaggcagtttacagggttcataatgcaaataaaagacaccagtatttagtgaaagcctcttcaccttgtctgagcatctcctgatgggcggcacctgcttcttcatttttccgtgtggtgggcgacagcaggacaggggtggcgtggtgtgcggtgcagatagtctgagacagatgcagttctcaccttgactgtgaaattctgttttctgaaggaaaggaaattcattcgcgttttcttagaagggctcagttctaggattcttcgattatgaggcttggatatttatgtgaatcatcgcatttgtcctccagactttaaagcagaaggtaaaacctcaggttgagaattcaggagggctagaaccagtgtttgagagaaaatctgatattcctgtttggtctgatggactccaggtgatgacgtccgtgtgtgcgcatcgtggggaccgggctgccaggtgtgtgtgtgagacacgggctgagctggtcacccttckcatttgttggtgaagcatgaatgcagatggaggcctttgtgtgaggtggtttggcctgtaacttttatcctttgtaactttatttatacgcagataatttttaaaaacctactgagatatcttctttttccaggctagtagtgccctgaacttaaacctgggcacgttttgtgatgccattgatgagggaggggtggagaggctgcagtctccatgaggggactggacttatcattgcatccctattttcagatgaatttttgggagatgatttcactagtctcttataattactttatcatgtacagaaactgttttctttattattaggtggtgagtgtttagaataaaaattytgaaagatgtgatgaattgttttcacaatttgtgtgtatgttttaaacttctatttgtatttgtaacattaaaaatcttttttttttttttttaggcacaaatatttaaacatggaaaacgtgaagactgtttgccctatggtaaggtttatttttaagagacgatatctttgtgatgtgagtttgctcatatacaatcaagtgtctttccttaacattttattcatagatataggaactgtacattggtatgtttggacactatcgttcttttttttgttgtgggttttagtaactgaactttttttttttttttttttttgagactgagtctccctctgttgcccaggctggattgcagtggcacaatcttggctcactgcagcctccgcgtcctgggttcaagcaattcttctgcctcagcctcccgagtagctgggactacaggtgcctgccaccatgcccagctaatttttgtattttttttttttgagatggattttctctctgtcgcccaggctggagtgcagtggcactatctcagctcactgcaaactccgcctcctggattcacgccattctcctgcatcaacctcccgagtagctgggactacaggtgcctgccacaatgcccagctaattttttgtatttttagtagagatggggtttcaccgtgttagccaggatggtctcgatctcctgaccttgagatccacctgcctcggcttcccaaagtgctgggattacaggtgtgagccaccgtgcccggcctaatttttgtatttttaatagagatggggtttcaccatgttggccaggctagtcttgaactgctgacctagtgatctgcctgcctcggcctcccaaagtgctgggattacaggcgtaataactggactttttgtcactttcctagtcctttgataaagagggattgctgccaggggtctcgtgagggaggtctgggcaaagcccgtgtcatgatctgaggttggacctggcttcttggggcccaggagcagccatgttcctctgatagccacagccaccacctcttttgccttcttcctaattctcttaatttattctttttgagactgcatcttactgtgtcgcccaggctggaatacatgacacagctcactgcagcttcgacctcctgggctcaagccatcctcccacctcagccccctgagtggctgggactacaggcgagctctaccacgcccggctaatttttttagcagtggggtcttgctgtgctgtccaggctggtcttgaactcctgggctcaagtgatctgccctgccttggcctcccaaagtgctgggcttaaaggtatgagccaccacgcctggctcaattctcttaattttagattgagcctcaatttctgaaaataagggcagtgtttttctccacgcagaggtttaccatctggaaaaagagaaacttcttagagcctttgtgtgttttagaagctatccggactgggcgttgtggctcacgcctgtaatcccagcgctttgggaggctgaggcgggtggatcacgaggtcaggagatcgagaccagcctggccaacatagtgaaaccccatctctactaaaaatacaaaaattagctgggcatggtggcacatgcctgtaatcccagctactcgggaggcggaggcaggagaatcccttgagccagggagttggagrttgcagtgagctgagatcgcgccacagcactctagcctggcgacagagcaagactctgtctcaaaaaaaaaaaaaaaaaaaaaagaaactatccgaatatcaaatttgaataactttctttttttgaaagtttttcattatggaaaatttgaaacatgtataaagaagagagaatggcgtgcacgccccgtgtctctctcaggagtgtgcgagttttcgtgtgcagcctgtttcatccctgcaccgcacaggagggacacacagtgccatctcacctgtgtgyacttccatacatgtctctggaaggtggggctctttatgtcctcaccacacccgagaacgcgagcagccgttgccaggccctgtcggcgggaggagcgtccttggtgacgtgaacacagacctccctcttgggctgtcgtgcttgtcacccacgctcattgtgcccactgtcagagccttctgagaagttactcagatgctctttcagctgacctggttttataggcaagcattatgagttaaacggcacctctgcccgaggtcacggcacccacataaaactggtgaacgttcactttctgtcatttcccagcctcaaggcagagcttcctgcagggcactgcagctccagcccccatccccctgctctgtccccgccccactgccccttcctccatctccttgtcttccatcacctcacctaactctcagctctgtcttcagcttctcttcttttctcctgtcccctgtcagttggttgcagtcttgtccatttcacttccagcccayctctgaagccgccatgcacttccaccccagcccttgtctgtcccgggaatgctgtcctcctggcctcagcttgccctcgtcgcagcaccygggcgtctcctgctcgcaggctctccctgtcgtgctgtgcccagtgctaccttgagcctcyccttggctcagcctcctgtcctgctattgtcatcactgcatgacaccgagtgattccccctgaaaaacagagcaagccacaggaaccccgtggcctgtgtgttctccccagccgcagtgtgctccatggcttctggggttgctgcagtgtgccctgtggcctgtgtgttctccccggccacagcatgcccgtggcctgcgtggtctctgtggccgcaggatgcccgtggcctgtggggtctccgtggctgcagtgtgcctgtggtcggttgggcctttgtgtgtgctgccccccttcagattggctccctgccctctgagtacttgctctcctgacctccactgatgttgcttcacagcaaggaagtcgagtaggttcaactccagcagctcttggttcatgatttgggatgatgggggtcttggtgatgtctcctgcctcaaggcccctgtggagccggctgttggtttcggggacacaggtggtgcagtcagaagatgcctgcagcccttcctgcgctgagtccagttcttgtttgcagctgccactgtcctcaggtgcctcgatggctgcagactccctgagagcaaccagaccctgctgcggaagctgggggtgaagcttgtgcagcgactggggctgacattcctgaagccgaaggtggcagcatggaggtaggcaccatgagggcggtgcctggggagggccacggggtggggaggggttgctgtggggggcaggcgccattgatgagggcggggcaggtgctgttggggcaggtgctgtggggaggcagtcgccctgttgcggggtgggggaggcaggcgccatggggtggggaggcaggcgccttggttctggacacagttgggggcactctctggagggcaggccgagccgtaggtgagcgtctggtgtggctggtgctrtggcttttgtgtccagtggtgatggcagagaagatgtgttagtaacaagtgttttctgctttcattcatttctttaatcctagaagtgtttctgattttgagaggaatggttttcttttggttattttctgactgcatctcccagttggaagaactgcagctggcgttggcaggaaggtggcgtgtgcgtcgtgtggcttggagtcagcgtggcaggatggcggcgtgtgtgtcgtgtggctcggagtcagcgtggcaggatggcggcatgtgtgtcgtcgtgtggctcagggtcagcgtggcaggaggctggcgtgtgcgtcgtgtggctcggtcagcgtggcaggagggtggcgtgtgcgtcgtgtggctcagagtcagcgtggcaggagggcggygtgtgcgttgtgtggctcrgagtcagcgtggcaggagggtgrcgtgtgcgtgatcgtgtggctcagggtcagcgtggcaggagggcggcgtgtgcatcgtcgtgtggctcggagtcagcgtggcaggagggcggcgtgtgcgtcgtgtggttcggagtcagcgtggcaggagggcgtcgtgtgcgtcgtgtggttcggagtcagcgtggcaggagggcggcgtgtgtgtcgttgtgtggctcggagtcagcgtggcagcagggtggcrtgtgtgtcgtgtggctcggggtcagctcagcctccctggcgtggcagcgtgtgtgcgtcgtgttgctcagaggcggtgyggcctccctggtgtggatgcgctgtgggggaaagctgcatcggatcagtgatgagtctgaatgacaggctccctttctttttttttttttttttcccaaggcagaagaatttttcttagtacagaacaaaatgaaaagtctcccatgtatacttctatccacacagacccggcaaccatccgatttctcaattttttccccacccttcccgcctttctattccacaaaaccgccattgtcatcatggcccatccccaatgagccgctgggcacacctcccagacggggtcgtggccgggcagaggggctcctcacttcccagtaggggcggcggggcagaagcgcccctcacctcccggatggggcggctggccgggcggggggctgatccccccaccaccctcccggacggggcggctggccgggcagaggggctcctcacttcccagtaggggcggctgggcagaggcgccgctcacctcccggacggggcggctggctgggcggggggctgacccccccacctccctcccggacagggcggctggccgaccccccccgcctccctcccggacggggcggctggccgggcagaggggctcctcacttcccagtaggggcggccgggcagaggcgcccctcacctcctggaatgggcggctggccgggcggggggctgacccccccacctccctcccggacggggcggctggccgggcagaggggtcctcacttcccagtaggggcggccgggcagaggcgcccctcacctcccggacggggcggctggccaggcggggggctgatccccccacctccctcccggacggggcggctggccgggcggggggctgaccccccacctccctcccggactgggcggctggccgggcgggggctgagacaggctccctttcaaagactgttggagaaagtgaaaccgcctttcttgctggcagaaatgatgtcttagcagtctgtagcggccggtgtgaacgggttggttctcaaggagacagacttttctagtgttcttagggtgctgtgtgttagcgaccttcagtttgtttcaagtgctataatacgtgtggtttgggaaggaattacttggttaaggtcagctcacactccgtcctggatgatggcamattccagagacgcgtgttgtgttgcagtgttgggtgtgcagctcactctgtaggaagttgctcattaggcacagtgttcgtggctagtttctcaaagctgctgtggggaatgttcagtgctgtaccaggcagggttctccagagaagcagagcccataggatgtgtgtgtgtcggcgaggctgtgagctggagaccaggagagctcatggtggttcttggccaaaggcctcagggtggagacccaggaagagctgattggttttagtctgaagacagaacaagtccagttgagagattgccaggcaggagggcttcccccctcctcagggagggccggcgttttgttctgctggggccttccgctggctgaacgaggccccctgcatttggcagggtcctctgcctgactttgtctacagattcacatgctttgctggtccagagcccctgacacaagcactggaagcaggtgtgatgaaatagcggggcgccccmcggcgcagtcaggttgccatgtaaagttaagcatcacaagcactgaaatgttggtacagaaaataatccagtatcctagttctctcgataatgatgtgcgtgttgccacatacacttcacgtaattctaacgtggttgggttttagtccccgtcttgtgtttttctcttccgtctttctctacgtttcctgtatttctaacttttttccatttttatctcctcggttggattttcgttgtctctgttagtaccgttctcttcttggttgtcttctgttgatgaggacggacttasgctctgacgggctgttagatttctggttcatcccactcctcctgccagccttggctcgaggctttgttagggtgggtctttctcagctcttttcctccagggattggtctttcctccacagcatggtccttgctttaagtatgtagcctttcagggacttaggtgaaagtcacggctttctctcccgtcctgctgggcccgggtctccggggccctctgagggttgcacagtctccaagttctctgcggcactyggcctcccagccattctctgacaggtgcgtctgagtctcgccttgtgcttccttatcttggagtgcccagggatccaagggaatttttgggcagagttttgggcctctgtctcagcagctctcttctccccaacatcctctcccccacatatgagccctccactcattgagattgctgcttcctgggctgtttccttggtacggtgtagaaagtacccctgcggggaggaggtggaggtggcccacctgcagcttcccctcgctggggattgttgccctgccttggttgccatcacctgctggccaacagtggctttaagtcttccgtccgagtctcaccattgttgaggtcgggagggcatgtgtagaagcagcctgaggtcattgtctttgtggtgcygtctggtctttgtgaggtggctgagctgcgcgcttgcgtgaggagaatggcggctggggtgcaccggtctgtggggcgttaggggagactgggggctggggtgtgccagccatgggccattaggggagactgggggctgaggtgcacctgcccgtgggacgttaggggagactgggggctggggtgtgcctgcctgtggggcgttaggggagagtgggggccggggtgcacctgcctgtggggcgttagcggggagtgggggccgggstgcacctgcctgtagagtttaggggagagtgggggctggggtgcacctgcctgtagagtttaggggagagtgggggctggggtgtgcctgcctgtggggtgttggggaagagtgggggctggggtgtgcctgctcgtggggcattaggcatcttgctgggtgtctgatggtctccgccacggtcctaagatggctgatgatactctcttcataccagttaccctacattacagtgtaccccgaaatttagcagcttaaacagtgcactttttcctcacagttttggtgggtctggaatcttgacgtggctcagctgggtcccyggtcagggtctctcctgaggcttcttaaacagtgcactttttcctcacagttttggtgggtctggaatcttgacgtggctcagctgggtccctggttagggtctctcctgaggcttcttgaaggcgccggcctggccactgccgtctcaaggcctgcattgctggggggtgtgcttccatgctcctcatgggttgctgtcgggacccggtgccttgtgggctgttggtggggacctgtttgaagtccttaccatgtgggcccctccgcagggcagtgcacagcatggtagctggcttcattggaggctgagaggcgggtggaaaccacggctgtttggaaggtggcagctctcaccagactctgcgtattctgttccttgggagggaatcattgggcccaggccacaccccgtgtgagaggaacgctaggcggtgggggtcgtgggctgtcttggaaactgcccccctccttgtttcctagacttggaaactgagtcccagagggctagagctaggatgagtcattcgaagcaggttgatggcatcagcaccagtgtgtgagttctggttctgccgccaaagccyaagctgtttgtcctctgggaggctgtctcaggctacagccgcagcagctgccctgaactctcactggacaccttttctgcatgagrccggggaagcagggcccacagccaggcggcccgccctgcactcacccttggcaggagcagctgtgtacgcgggggccttgctcagcgcagggctgggctgcacgccgagcgcagactctgacggctcctcacacagctctctgcgtaggactgcgttcccattttatagagggggaagtgggggcatggagcggctcaggagctgttcagaatcacacagcaagtaggcgtagagcaggcctgaccaggagccaggtcccagggtctgtgccaygggccccttcatggcgtgtccaggggatgacaatgcaggttccccatgtgggtgtgaagagggctacaygttgctgccttttgaggggcattcgggaggcaggatctgtaggaactggtgaccggtgagacgcagcacctggtgatgaaggggcggtgtgtggcctgggcggtggcagtggtggcygttcaggaaggggctgccaggaggcagagggtcccgaaggccgggtgcttccccagggaaggcgctggtcctgtcgtctgtgtacccatcatctgccttctctcctgactttccctaatcaaagctggacactagctgaggatgttctggactcggggcgtgttttgtggcccacaccaggatcttcctggcagtttgtgctgatggcactgcctccaggttctcccttcttatccggtctctgcaaagtgcatggaattttcacaggcacgctttaagattcaaagtgacactgaatgactggttccagtcatcaggatgctgtgagctacaaagctgatctgaggatgctttgctttgcacaggtaccagcgtggctgccgatctttggctgcaaatctgcagctcctcactcagggtcagagtgagcagaagccactcatcctgaccgaagatgacgacgaagatgacgacgtcccagagggggtggagcgtgtgataggtgcgtggggtctaagcggcggcctctgctcttgggcaccgtcgggccaattcccctctactccaggaccacacttccttcttccttgctggtgcyggcactgtctggccacccgtccccttcrctgagtgcacggtcactgcccgtcctctggctcctgaacccaggcctgtccctgaccatggacagtctcttcctgtgtgccgtagaagccctttttcccaccgcctcgcctccttcctgacctgggctgcctgttctgggcagctgggtgtgtcctcaggaaacagttctcccaggaaattgagttggggtccctggggctcaggtctctggctccttggcccctaaaccctgctcagttccttacctcaggagccatttcaaactcccttaaaccacattacaccttgcaggggtctccatccactgcsctgttctcctcctgtggggtctcctgctgcacagagacagagccatcagcggagcccctcatggcggccatcctgggctcctgtccacacactgtcctgccctcctgccgyggttggatgargtcttccctggacccaggcagggcctcttcatgtcccctccctgtgaggcccccatcctcccagtatctcccagcttcctgatgggcaggcggggccacgctgcctgtgctgtgctgcactctgctcacatccccgccgctccctccagggcaggtttctccccagtcatcygcaccccacctcgaccgtgaccatcagggcgcctgtggcacygttgccagccccgagccagcatccactcyggcccttcccttgacctttgcttctcagagccctccctggttgcgtggtaggcgcccgcatctgtgctgggcggctctgagtccygggcggggccctgggtctgccccttccccgtgtccgcagcctgccccaggttcattcccgtctcccacccgctgcaggcagtcccccctgcccgcattccagctgctgtgctggctccagactgtctctccaccctcccctgtggtcactcagcgagcttgtccatcagggtcttcccagggctgcttggtgcccacaggcgaaggcttcacccttgctggggcttgcagggccctcaccktgtgacctgacccctcyctgcatcctctaggcttctgtgtggttcttaaaagttcagcctgccgccaaggcctggtccctgggagagacgtcttcgtgcagccgctggctgggggttttctctggaagcttcccagcccactttggtcacccgtgagctgcgggctcttcccctggcctgggtggggcccttgatgttggccttcccctgggggcaggcagctgctccctgtagccggctttaatggggtagatctctttcttaggaacagagaacttgggaacatggctgtatgtgatgatttgagaamggagggaaggaaatgttcttttcctgtcattaaaattaatattgttaatgtaattcccttcggcgtgtgcactgagtagcgtacaggatgggtcaccttacagctgggaaactaggaactttgtgtggactctgtcacgcatcaccttcctcttcctacagagcagctgctggtcgggctgaaggacaaggacacggtcgtgcggtggtctgcagccaaggggtaggtgtctgtggccgcagaagcaccccggggggtgggccggcctctcctgtgcgattcagcagctacaaatacccaacagctttggagtggcagcgcggccccctcctcggccccctccaacttatgtgtgttgctttacgtgttggcgtgaagatggttcccgaggcggagcttcggtctcctccgtcctcctgcctctggctggccctgccgggtcacgagcaggccgggtttacctgtytatcttcaaaatgttcccttgcttttccacatcctcatcactgtgccccccacctatcgttccccacagatgggggtcacggctcctacaatgacggtgctcagggaagagccctcttttgtggggtgagcaggtgccagtccctcattcacccctcactagcacctgtcatacctgtgggagtcgacatgcaccctgcaccccaggcctcagtggaggtcgtggggcagatccagtggggcctggccttgaacacaacaggtggagccctggcctggaggagccggtggccctgtgggctcgggctgtgcagggacagcgatacacgtgaagaagatgctgaagtgtcggggaggcccctgctgtggaggagaggaggcaggtgcaggggccagcaggtgctgaggtgtcagggaggtaccttctgtggaggggatgaggcaggtgcaggggccagcagatgctggggttgggggaggcccctgctgtggagaggatgaggcaggtgcgggggcagtaggtgttgaggtggggggaggcccctgctgtggaggggacgaggcaggtggaggggctgacaggtgctggggggcggggaggcccctgctgtggaggggatgaggcaggtggaggggtggcaggtcctggggggcgggttggcccctgctgtggaggggatgaggcaggtccaagggctggcaggtgctggggggcagagagaaccctgctgtggaggggacaaggcaggtggaggggctggcaggtgctggggggcagagaggcccctgctgtggaggggatgaggcaggtgcaggggccggcaggtgctgaggtgtcagggaggtccctgctgtggaggggacgaggcaggtggaggggctggcaggtgctgaggtgtcagggaggtccctgctgtggaagggatgaagcaggtggaggggctggcaggtgctgaggtatcagggtggtccctgctatggaggggacaaggcaggtggaggggataaggcaggtgcaggggctggcaggtgctgggggatgaggcaggtagaggggccagcaggtgctgggggacggggaggctggtttttgccattgctctcccatgcgtctgtgctgggtccgtccataccatgatctctgggaggagctccacagggctgtgcaggggctcacataggcctttgtgttgctgtacgcaggggatggcttttcagcccagagcctcgtctggttgggtgtgatgggcccacgcagtgagaggctgggcaggccttcccagtgtccttcctggaggcccctggccaggaccttccccacggggccatctccagggacttggaccctgtgagccagcctcaggcggcctccatgtggggccgtgagcccrtcacctggcctgatgggtgcctgcacagtcagcgtttggggtggcacagaggaagcccggctctagtagggagggtcagggtgaagccctcagcgttcgcctgctgcctcggtaccctcagccgtcactggtggcctgcagcgtccgcgttacagtggtacatggtgacctrccctgtgccgcgtgtgytcactcgtcccctttgaatctggctgcaggctcctttaccctgcagcgtgttttagcgcgggggctccaagcagggtgcgggcttgcctggagttggcctcttctctcctggtctctggaggaaaggatgggtgttcaggccattcacacgtgtcacgcatgcccttggcgacaggctggtggtgcccctgacggattgctgcgtttctctttcagcatcggtaggatggctggcaggcttcccagagccctggcggatgatgtggtcgggtctgtgctggactgcttcaggtatgtgagaagagcaggggaggcgtgtgggcctgaccctgagttgagaagccctggctttccttatatcctttcacgcttgcttttcattgagctgtttgtcagaactccagaagctcttttttcccccttttgaagttaaacttgagaactcttgttatttctggtatgttgcttttatcaattccattctatttaaaaaccttaaggaaaaagagagtcagtttagacatatacccatgtagatgtttattctgaaaggaaaagctctactgagtgagttggggctgctccgagagctttctgtgggaggttcgggtctacccctcgcctacccattagccacgtgtatcactcagaccttgaagtgaggctggtgtgaccaaggcctgagtttgaattggatttcattttaacgaaatgtgaggctttgggaggccaaagtgggaggacggcttgagcctgtgaattcragaccagcctgggcaacgaagcgaaaccccatctctacagagagttaaaaaattagccagacgtggtcccagctactcgggaggctgagrtgggaggatcacttgaggccaggagtttgaggcttcatgagccatgatggtgccactgctgcactccagactgggcaacagagtgagacccggtctcagaacaaaactgagtgtagacagccacgtgtgctgtgccgcatttctcttgtcagccttcagggagttctgggtcttgggaccgtgtggcttgtgggtggtagagttgtgggctgggatgtgcgggtggcagggcctgggatttcagcctggggcctgcagwcctgccctggtgtgctcacaygtgtgaggcatcgatctgtgacctccccagggaattctcccttttgcttgtgtaaatgtctctcccagtttcagaagcggagggtcgagagcaggcgtccagcttgctcaggaccccgggcgtgctgttgctcttcattagcctggacaccgtggcgaaagctgtgctgtcagcactttggaggctccagttcgcgttgcctgtcagtcaccagggacagctccggagccgttcacaaagccttgttttccttctggagsagatttcttgtgcacttagcctccagcctgctcagtgacaatttcaggagcacaggaaacaatgtgtcagatacgggtcatgtttttcagagcagtgtgcatgcatgtgtgagaaatattcttccagtggaaacattgctagcagaaaacatgctctttaccacaactgcttgatgggaggcaggggttggagggtgctacgtgcttggcttctctgtaggcgacctccagccttgtttcaggcgtgtccctggagctcctttctggtggtcatggtgggcatatgtcctcctgtcgcctggtgccacctgcggccttcacaacagtgtggtgggctccaggccgggcctgcctgtgcctgtctggactttgcctctctcctccagccgctgggcggcctgctcatcaggcctagtgcgtctcctaaactcactgtgtgtctttccctccacaacgtgcagcctctctggactgtgtgttccttactctagctcaccttcttggtctagtttcatttttcctggctggtttaatcttcaggtgctttttaacctttatttttgttattttaatgtgctcattccatttttgtagctaggttctgggacggggtggcctttttactcttgatttcgcagggccttcatcccaaagtagctgcagggccatcatcccgagtcctcgcaggatgcagctctggtcagtgcctgccttcccttttcctgggtgctcagtgtgtgattgtcaaccgtggcataaaaaggcggctctggacagcgcctgctttccctttcgctgggtgctcagcatgtgattgtcaaccatggcataaaaaggtgcagcctcagagcaggatgtctgaagacaccaggaagccaggagttgctggggtgtggggcggcccacagccctgcatggtggctgctccaatcttgtccttccctgggacgtgtggtaagctgccagcctcttctgaaacgggtccgagaaagggcattaattatattaactgtaagaacacccagcacccaggagggttaacttactcccckctcctttcctgggctgggttatgcagtgagtggaactgcacccatccccagggggttcaggatctgtgtggctgatgtggctgtcccccaagcgtgcacgactccctcaggacctggggccccctcctgactcccatcaccagccctgcagcattaccctggacctaggaagtagcgccagaccccaggctgtggcagaagcagggtgccttggagaggagtgtgtctgtgtctgtgccaaccccattggtttctcctgtgagcaaaccaactgaacctgtgcccgggcccagctgtgggtcctgctgacttgcccgagggcatcttctgagacactcggtgtggagcgtctggaagccacggcactacgctgtgcctccccctcgcccgccgccccgtgtcagcaggagcctcaccacgtgggttcctttctgttgagctttacggtttcatcgaggttttggactgggtgatgtgttcattcaaaagtcaaaccaaagggaagaagacagcctccccagaccccagagcccccccgcaggtgacctggggcacccgtttcgcatccctccggggactgatgcaggtgtgagcagatggatacagaggttttcttgttttgtttttgagatggagtctcgctctgtcgccaggctggagtgcagtggcgcggtcttggctcactgcgatctccgcctcctgggttcaagccattcccctgccgcagcccccaagtagctgggactacaggcgtgcaccaccacgcttggctaattttttgtatttagtagagacggggtttcaccatgttggccagtcgggtctctgtctcctgaccttgtgatcagcccgcctcggcctcccggagtgctgggatgacaggctgagccaccgcgcccggctgttttgtttttagagatggggtcttgctctgttgctcaggcaccatgatagctcactgcggcctctacttcctaagttcaagtgatcctcctgcctcagcctccgagtagctaggactataggtgtgcagcaccacacctggctaattattttatttcatttttgtagagatggggacttgctatgttgcccaggctagtcttgaactcctggcctcaagcagtcctcttgcctcggtttcccaaagtgctgggactatagacctgagccctgtacctggctaaaattgtctctttcattttacacagataatggcttacttgtcacactttaacaccaaacgcatctttgaggtcattttacattagtgctgttccccttgctcttgatgatctgagacccgtgtacctgcgacactctttacccgcctcctctctctctctctctcttcctctcccgctcatccgcccactcatagcttccactattttctgttgtcttccctcctctgagaccccccctgtgcttccaggagtgccttaagcttggatctgagggcrggaactcgccccggctgcttggcttctccctgtgcccctggtgtccatggacagggtcccctgtccggttccacygtgccgtggtggtgctgggcctctgaggcgagccggatggacggacggcatcccctggaccctgccacccttgccaccgtgccacagtgaacacgtgtctgatttagaagtagacattggtctgacaggcatttgttttggtatttttaagtcacggtaaccttggtgttttgtcaagttcattcagatgttaactaaatctttgtgaaaggtgtgaagcatctttctccaatgaaaaccctaaaggacgcaagtgctgatgtgaaaatacgcaaggggctcacggagcctctgggcagacagtacacgtctggaacttgtttaattgtgattgagtctgtcggtgacagtgagctctgaggagcccgctggtggacgctggtgtctgtctcagcccctcctctctgggctgggcacgcaggaggtgaggcagccactgggcggacaggcactctccgattttcctaagtattcttgtccatactgattgccagctagtcatacaatttagtgggttttcctaaacatttatttgctgtcaagtcaatttaattagaatcaggagagcttctgaaccaccccggggaaattagtacgtataaaatattatgacttgatcgatggccattgcaattgttcattaaaagttcatatttcaaatactgtgaaaaatcttgaaatgccaattcattattgtagcatttaattctgagtttgactaaacagtggggtgtcatttaaagaaggtcttcctgctcccttttccactgacgtcttcctgtgctgggattcctgttttaagttcctacttttctgaagtgtcttatttctttctatgggagcgtgggtgttgcccgtacttggagcgacaccactgtggtgggaaaaccccacctgggacggcacrgacgggacggtctctttgtttggggactgaccaagacttgtcctcactctcgggagatctgaagaggccctggggtaggcacggctgttgtcttcatactcagttgcagtgtgttatttcttcagccaactgattatttgtttttttattttgagacggagtcttgctctgtcacccaggctagagtgcagtggcgcgatctcagctcactgcaacctccgcctccctggttcaagcgattctcctgcctcagcctcttgagtagctgggattataggcgtgagccgctgtgcccagccttgatacyttaaaaacttaggaatgggttttagtgagccttacgtgagccttacaggcagaggatatggacctgccaggctgtgctccttgccatgctrtgggctttgaaccaaaagctgacacgtgggctgyggtctcaggatctttgttgctctcagtttccaggagactgacaaggcgtggcatgggggatgtctggcgctggcagagctgggcaggagaggcctgttgctgccgtctcgactcgtggatggtgagtagctgaggcacggtcaggggggatgtctggcgctggcggagctgggcaggagaggcctgttgctgccatctcgactcgtggatggtgagtagctgaagcayrgtcagctgcgtcaycaggctgtccgtggcaggctgcagcccttcgtctgaacccatctccgcggtgtggccctgccgcgggcacgcccagaagagcttgagaacaaggtctgtctacctttttctcgcattggcctttgtaatttcctaattgcctcttttgtctgctgtggaattttaatgccacagattaccctgtgtagctggttttggagggccacgaatccttgtaatgtctgattttcttactccccaaaaccggttttcattcttgagggacattgtcgccccttaaggacacatgcagtggcacctgcttcagttgtagaaccaggtacccctggcagcatcctgggtcacctggagtgacgtggtgctccctggagatgaggctcacgccagcgtgaaaccagggtgggaactggggtggagggccaggggagctctgcagtggccagcagtggggtggggacagagggcacagcatggcagatgcaggggcactgccccagaccagctcttgtgccgtggccacacgcagccctgtctgtgtttggtggggagagtccctgggtgtggctggcagtgccctctgagggcaggaaggaaaggatgtctgtacaggatagagtgggggcccatcctgagagggcctcaccacagagacttgattctgtccaaaataaagacacctgagatgtggtggcctcacgtcttcccagtgtggagctgtggtggcgtctgaagtgaccgctttgcacttggcattttgatgtatggggagagcttttagagcctgcagttcttttttttaatgtctctgcttatttttttccagacttctttaatgtttagacctctttattgcgatctaatttacatgccataaaatgcactcatttaagtgtacggttaagtggtttttatatatttacagagttgcgcaactattgccataatttaatttccgaacattttcattgcctccaaaggaaccctgtgtttaagaactcactctttactctccccagcacccccgccctggcagccatgtctccagtgtctctgtgaatttgtcttttatagacatttcctaacagtggaacctacgacatgtgatctttggcgtccgaattcttcggctgagtttctctgtgtcgtagcctgtggagtgcctccttccttcctgtggcagagccttgtcctgctgtgtaaatgcaccacacgccaygttttgtccatccttttcatcagctgatgtacatctgggttgtttccacctttcactgttaggttaatgctgccatgaacatcgtgtacacgtttttgagtggatgttgggtgtagrcctagtagaaatgctgggtcatacggtaactccacgtttaactttctaagaacctgccaaactttttccaaaatgattgcaccatttcaagttcctgcctgtagtgtgtgagggttctgcttctctgatcctcaccaacacttgcttttatctttttttttttggacgcggtttcactttgttgcccaggctggagtgtggtgatgcaatctctgctcactgtaatctctgcctcccaggaccaggcgatcctctcacctcagcctcctgagtagctgggaccacsggtgcccaccaccatgccasattaatttttttttttagttttgttagagacagggcttcaccacattgcccaggctggtcttgaagtcctcagctgaagcagtccacccgccttggcctcccagagtgtggggaatacaggcgtgagccaccacacttgccccctgcttctttaaaaaaaaaaaaaaaaaaaaaagccgtcctagtgagtgtgaagcgccaccttgttttgcttttcatctgcttttccccagtgactgatgacactgagcattttctgtgtttgcccgtttgtatgtcttctttggagaaatgtctkttcaagttctttactcatttaaaaaaatatttttttaattgttgttgtaagtaagagtttttttatgtattctggatataagtctcttattggatatatgatttgcaaatgttttattgcgttccatggttgccttttcactttcyattgattgattgacagagtcttgctccgttgcccaggctagagtgcagtggccccatcacagctygttgccaccttgatctcctgggctcaagccatattcccaccttagcttcccaagtagttgggactacaggggtgcaccaccatgcctggcaacttttttttctttttttgagacaggatctcattcccatcgcccaggccggagtgcagtggcgtgatctcagctcactgcagcctccacctctcaggctcaggcggtctgcctacctcagtcccctaagtagctggggctacaggtatgtgccaccatgcccagctaatttttgtattttttatagagatggggttttcccatgttgtccgggctggtctcgaactcctgagctcaagcgatccccccgcttcagcctcccaaagtgctaggattataggcgtgagctactgcacctggccttcatgcctggctaattaaaaaagttttttgtagagatgggggtctcactatgtggcccaggctcgtcttgaacttctggcctccagtgatcctcctgcctcagcctcccaaagtgctgggattgtaggctgtacctggtgtgttttcaatttctttgatggtgatatttgacccaggttttaaattttaattaagtccagctcatcagtctttttctttcttgtgtttctggtgtcatagctaagaaatcattgctgaccccagaaccatgaagttgtggtttcatttaacgttttgttccatccgaagtaagtgactcgtaatgtttatttgtgacactagatgtgtgtgagggtgtgtgtgtgaatgygtagctgggatggaatgaagtccctgcctgtggggagccagctccaggttcactcaaaggagacaagagactctactggcttgtgtgtgtgctctgtcatgtcttatggcaacatgcactgaccccaggcagctggggcgagaggatatgggtgttggcatcataaacgaaaagggtaaagctatggttcagaaactgayacgtgatgtggaatacactggcccatgaccttcgcatggttggttggccccttctgcctggcggtgccctccatgtgagctgaaccctctttgcagcccccattctgttcctggtgggacatggagaagctgtgctgtctctgcacagggcaagggttctttcaggcaggggtgaaagagatcccatctyggggctgactcaggaggtgacagggctgacatttgatgagcatttgcagcatgctttttatgtttttgttttagacctcacaccattcctctgagagccgtcttgtttatataaagctatagttgggagccacgtgtggtggcggtgcctttaatcctagcctcttgggaggccaaggcaggaggatcacttgagcctaggaatttgataccagcctggacatcatagtgagacaccctctctgaacaaacaaacacacacacacaaacactgcagctgtgggagccaggaagtctttctggtgtcacagctcatgctcagcccttcggcctcctccatgtcacacggctgagctgtccctgcacctccttgtctccttggagagttactgtggttctctgtcagtttggtttgaaaagtgaaaacaggctgggcacggcggctcatgcctataatcccagcactttgggaggccaaggcggggggagcacctgaggccaggagttcgagaccagcctggccaacatggtgaaaccccgtctctgctaaaaatacaaggatgtggtggtgcatgtctgtaatyccagctactcgggaggctgaggcagaagaatcgcgtgaacccaggaggcagaggttgcagtgaaccgagatcgcaccactgcactccagcctgggtgacagagcaagatcctgtctcaaaaaaaagaaaaaaaagcgcgaaaacaaatgcttggcaaataaatgtcgtagaaagacacaatatagatgagcatgtttgatgactaaagcttttgtttgtcttagaggaaatgtggagcttcattggtgcatgctaaaggaggaagaagtaaaactagggaagtcaggtgggcaggcagtgatgcgatgtttgcctggaaggcaccctgggtctttctgcccttagtcctctgaatagggggactctgcctgctggactcaggaaaaaagcatcgcattttctttgggttactttttagggaatcctgctgattcctctccacacatacagtgcacacacacacagaatctccatctgttgtgctgtaagcctatttcttggtctctgactctgtgcacaccaccacgcccagctaattttttaaagaaattcgaaagtagcctgcgcaacaaaatgagatcctgtttctacaaaaattgttttaaaaaggtagttgggtgcagtcccagctactcaggaggttgaggtgggagaattgcttgagtccaggaggttgaggctgcagtgagccatgatcgcagtgctgcactcacgcgatcctcctgcctcggcctgtggacagtgggccatgttctttttctctttgcatcatcacctctgtttgaggactactgttaaagggctacttggtctttattttaggtgattcaaattccaggacttttcttgagtggtcctggcgtaggtcctttcaccttttttgtggctcctctttgaacacctctgttgttgtggcaggaggaggtgggcactcctcaccatgagtaagctcctacaatgtttgtgaacccttacggtttcctttgttggatacaagaagcacaggtggggggatgtattggtttaagtttaccttttttttttttttctttttttgagacagagtcttgctctgttgcccaggctggagtgcagtggcrccctcttggctcactgccagctccatctcccaggttcaagtgattctcatgactcagcctcccgagtagctgggagtcaggcgcccgccaccatgcccagccaatttttttatttttagtagagaccagatttctccatgttggccaggctggtctcgaactcctgacctcaagtgatctgcctgccttggcttcccaaagtgctgggattacaggcgtgaggcactgcgcccagccaactgtactattttgataaaatgtatacatgtgctccttattatgcattttgtggttttcatcagtattttgctttttgaaaaatgtcaagtgttctgatctctttggacattttgtatgaaccctatttcccttgctatccttattgattgagaattgtgcatattgatttgggtaataataactagcacttggtgtttttctgagcttggatgtgtagattcatgtctttcatcaaactcgggtagttttcagtcattgtttcttcaggtatttttgctgcccctctcctctccttgtgggactcttgttatgttaatacacatgttggtactcttggtggtaccctatgagtctcttaggttttgcactcatttcagctcttgagtcttcttgttatgttaatacacatgttggtrcgcttgatggtgccctatgagtttcttaggttctgccctcatttcagctcttgagtcctcttgttatgttaatacacatgttggtaagcttgatggtgccctatgagtctcttaggttctgtgctcatttcagctgttgagtcctcttgttgtgttaatatacatgttggtaagcttgatggtgccctatgagtctcttaggttctgcrctcatttcagctgttgagtcctcagttccagaatttctctttagtttctcttttaataatttctttttgagacagggtcttgctctgtcgcccaggctggagtgcagtggtggtatcacggcttactgcagcctcaacctcccaggcccaagcagctctcccgcctcagcctcctgagtagctgagaccacaggcctgctgcactggaaaaaaaaaattgtagaaacaggatctcactttattgtccagactgctttcaaattcttggactcaagtgatcttcctgccttggcctgccttgggattataggagtgagctgctgtgcccagcctgtttttataatttctgtctctttatcaacattccatgttagtttaaatgttgttcttttggtctcctttagttctttgtccacagttttcttgagatctgtgagcatatttaaagctgttgatttaaagtctttgtctaagactgagcacagtggctcacacttgcttcccagcacttaacctttgctttaaagcctaaaaaggaagaaatctttgcatatgtgtttcccaaataacagatttgagggctgtgttggtgacataggtctgtttatacccactgtgtggctaaagcaggtctctgttaaattagcatctacaaagcttttctcctgccttccctcaaacttaggaagctccctatgcaatcttcaggctggggtccttcactgccccctctcaaggaggcctaccccttcccccagaaggtgcagtctgtcaccccatgtcttataaagtgtaatggtctggtgtcccaaagccacagagaagcccattctaaccttcctgcaactttctgaaggttggagagcatgtttgttttactgctaggaggctcaaggtccctgtgaacctgcatcaggtagtaagccctgcatgtcggaaatacagactgcctaactcttatctaaggtgatgttttgagaaaattttwaaatgtataatacattttataaatttcgaaaaaattttaataaacattaaatttttataagtttatataaatgttataaattttgaaaaatgtacagagttgcattggagcacacgctctcagtgttcatcgaagacgtacaagcagcgtcttacgacgatgttgctgcagctgccttggggtcttgttaaaagcaccattcagtagattaattcccacctgtggactgtgttttctggcttccaaaagaaactgtcatgtttttctctctggatgacgaaaactctgcacgtacttcctatgacaagtgcgattggcgcccactgctcttggcagttgaggtgaggacacagcgtttctgtgacggtgaaggggacagggtttggagggagattcagacattaaacaaggaaacgaagggagcaatttcagagaatggataaagtcgttaagaaaatacaaaagggcggtgagatcctcagtgatggggccaaccagtgacttgaataagacttggggaagacctcctggggcgacatttacgctgagagcttctaccgtgaaggagccgagcaggatggactcctgaccgcagcatctcaaagaggaacgaaggctcgcacgagctgggacagcrgaaagagcagaagagtgggcacagaaaagcgcctgggggccagatcctagaggggcttcaggaacacagtgaggggtttggaaattattcaacataaagtcrgatactggggaatacacgggrgtgcagtggaaaggaagagcgagggagagtgaggccattcgggagccaccacagtgttcggagtgagaccagagctgtgaagaaagagaaaaggaaatacgctgcatgtaggattctgaactcaacgactttgctgttctattcagtgaaagagagtgagatagtaargtcagtgagtgacatgttggagccttccacatagtaatggtctacaaagttatggattgatgagttcacacaggagggagtgagagatgaggaaggtgaatgggtggaaaagcttgaaccgggttcccaggctcactggcatggggaggtggagaaaaggggaggaagcagccgacatggaaacccgcagaggctccttcagaagggatattttataggagaggagtccgattctgagagggggaaggggtggaggaccagagtttcctcacaggctctggagcactgaggtggatggtaaattccaggagagcagctccagctgaggtctagggacagggcattccctccctggtagagccgttggggctcagtgccgaggctggctcaggctcttgtggggggccctgctgtctgtccagccctggctgtggcctrgcctgaccctgctgccccctgcaggcctgtgtacctcagttcccaggtgatcaaggggccctgggagaggttgggtctgagcacgtcctgacatggccccagtgtccagttccccgcctgtttttgttggcttgtttaatcttggtaggcttttaagctttcaggttttcaggaaaatgcaaagcatgagacatctttgactttgtacgtggaccgattgttctttttttgtgttaatggtgtttttttccttgtgtgaacgtgtgtgtttcgtgttgcactccgccctgctctccctccctccctccctgtagaacgtggcattttggctgaacgttaacactggtgggggcagacggcagtgggcccccgttaagactgtttagaaagggcgttgtcggcatcttctcttacatgtgaattcaaggatcctttattttttttcagctttattgatatgtaattcgtctaccatataattcacccatttaaaatatatagttccatggtttttagaatattctattattacttagaaaattgtggcaaaatatgtataacaaatttgctctttttattattaagcatgttaatccagtggcattaattacactctcacttttgtacaaccatcaccattatctggttccaaaacttctcatcaccccagattaagaagtcactcgcccctgatgctccttcccttcaaccctttgtaactctagtctactttctgcttgaaaaaggactttgcctgttttagagatcttgtacaagtggaattggacaatatttggcctttcatgtctggcttattttatttagcatcatgttttcaaggttaatctgtgttgtagcatgtatcagaattttctttcttttaaaggctgaataatatttcattgtatggacataccatatatttatttattttatttttacttttatttttatttttttttgagacagagtcttgctctatcacccaggctggagtgcagtggtgcgatctcggctcactgcaagctccgcctcccaggttcacgccattctcctgcctcagcctcctgagtagctgggactacaggcgcccgccaccrtgcccggctaattygttttgtatttttagtagagatggagttttatcatgttagccaggatggtctcgatctcctgacctcatgatccacccacyttggcctctcaaagtgctgggattacaggtgtgagccaccgcgcccgacccatatatttattttttaaagataggatctcactgtattgtccaggctggagtgcagtggctattcacaggcccaatcatagtacaccacagcttccaactcctgggcttgagcgactctcccacctcagcctcctgagtggctgtgattgcaggtgtgcaccaccgcccctggccatattttcttgatccattcatttgtcagtggacgcttgggttattcccaccttttgggtattgtgaataatgctgctgtggacatggatacaagaacctgtttgacacccctttttttagttcctttgggtatataccctgaagtggaattagtgggtcatgtggtaattctatgttcagctttttgagagcttatcactttttgtatgtaaaaattacgagtgtttagttcttaagtcggatcatgcataaatgcagaaacgtagttaaaaaataagtctcttttttttttctttttgctataaagctctaggaatcgattttgcttttagagatagacacaaagggcttatcctggttgcaatgggtgagctattgcagatgacctttggaggaattgtgtcggagtgtagaattttcacagtgtagctcgccatgcatcaggcacatgtagcctgtgccacaaccattgtgcytgggcggggttctccatgctgccctgttgcaggaggatgctctgcccctgcttctccctatttgtcatttaagatgattcctggtgctttttggtgagcgatcaaatggtgttctcagaatctttgggcccttgacaacggagggctgtattcttgggggtgtgatgtgagagctccttgtctgcagggtgtgaggctttgggtcctgagtgtggaccgtggcatgtgatgtcttgtcacggctccctgcacggctgtttagtttctgaaagctggaagtataatatttttgttctttgccaaaacatactggtgtatataaacagaagtgcccaggtgagcgactcagcactgcgcctgtgtttatggttctgcgtctgaccgtgtgccttttaggctggtgtagtggttgtctgaggtgggtgcctgacagggctgggggacctgctggtgtccttgctgctgctttagggacagcttgaagcagtgtcctcagataccccttggaattgtgacaaactctgtatccctcttacaagttttatagaactctaaccagttgcaaataactatttgccatcctgagtattgtcattttaaaataaaactattgcgtcactcatctgaataaatctgggaaattgaggtagaataatctaccattcttcgttaaaaaatttacagggctgggcgccatgtctcacatctgtactcccagcactttgggaggctgaggtgggaggatcacttgagccccgggaggttgaggctgcagtgagctgtgatcgcgccactgcactccggcctgggccagtgagcgagaccctgtctaaaaaacaatttcataggcaagtttttctctcacagaaattttattcttcctttttcttcttaagcccatatttccatttacttttttcccagagcattttaccctaatgtaatgtatttctgtgcctaagaatctttattgatctatcatttatctgcaacgaaagaaaataacataaacataaacttcaacttttgcattttgtatggccataagatgctagttatttatttattttttccacaggtgttcatgaccttttttttttattatttttttaactatacttttaagttttaaggtgctagttacttagaagtttttttagattgggttttaaaaaattatgagtacagagttgaccaaaacaacataaaatagcatattattgaaatttagctcttaataagatagctgtttagtttgagttatcttttgatgagtcaggctttttttgtttttattttttgaaatgattcttgctctgtcacccaggctggagtgaagtggtatgatcttggctcactgcagccttgacctcctgggctcaagcaatcctcctgcctcagcctctcaagttggtgggactacaggcaaacatcccattgctcagctaatttttgtattttttgtarggatggggtctccctgtgttgcccagactggtcttgaactccttggctcaagcagtcctctcacctcagcctcccaaagtgctgggattatgggtgtgtgccaccatgcctggccgtgagccatgcttttaaccagaataaggcaaggttctgcaacagtacaatttttgctttttatttatgtattttttttgagaaaaggtctcactctgtcacccaggctggagtgcagtagtgtgatcatggctcactacaacctctgcctcccaggctcaggccatcctcccgcctcagcctcccaagtagctgggaccgcaggtatgtgccaccacacctggctaactatttttattagagacggtgtttttccatgttgcccaggctggtctcaaactcctgacctcaagcaatccatccgctttggcctctcaatgtgctgggatgacaggtgtgagccactacgcccggcccctatttttactttcagttttaagtgctaagaagtcttattcattcaagtcttattcaagtagctaggaatggcagaaattttgctttagcaatgctggtgtttcaactttttccaagctcacgcctgacctctgtgctctgtcactgagcagcttcagtagggtggcctcagtcctgtgaagtgatgcgttgacagccacctgcatggggaagcatttcccagtctctggagcagttcccatcgtagtgtccactgcatggtttccagtgtgttgggtgagaggctgcctttcttgaaaagtgagagaaagggctgttgtgagaggggacatggggatggagaaaccctttctcaagcagagccttaggggctgaggctccggaagtctacgctcctaaagcactctgaagcctgaggaccccatggatggccattgagtagccccaggggtgcttcgcacatgccggtacttgaccactgctttaaacccatgtgcacacatgcacgctcacacacatgcacgatgcagaagtgcatacacacgtgtacatgtgcacactgacacatgcacgttgacacgtgtacacccaatcgaatgtgcacaactacccccacagatagcacacacccacacaatcgaatgtgcatacacccacagatacacacacgtgcacacccgtacaatcgaatgcacacatccgcagatatgtacacgtggacacccacacgattgaatgtgcccccccacagatatgcacctttgcacacccacacaattgaatgcacacacacccccccacaggcacacgtgcacacccacacaatctaatgcacacacacccccatagatatgagcacgtggacacccacacgattgaatgtgcatacactcacagatacgcacacatgcacacccaatcgaacgcacacacacctgcagatatgtacacgtggacacgcacgattcaatatgcatacacccacagatacgcacatgtgcacatccacacaatcgaatgcacacccccccgcagatatgcacacgtgcacacccacacaattgaatgtgcatacacccacagacacacatgcacacccgtacaatcgaatgcacacacccgcagatatgcacacgtggacacccacacgattgaatgcgccccccacagatatgcacatgtgcacacccacacaattgaatgcacacacacccccccacaggcacacgtgcacacccacacaatctaatgcacacacacacccatagatatgcgcacgtggacacccacacgattgaatgtgcactcacagatacatgcacacccaatcgaatgcacacacacccgcagatatgtacacgtggacacgcacacgattgaatatgcatacacccacagatacacacacgtgcacatccacacaatcgaatgcaccccccccgcagatatgcacacgtgcacaccggcacaatggaatgtgcccccccgattgcacacgtgcacacccacacaattgaatgcacacacacccgcaggtacgcacacatgcacacccacacaatcgaatgcgcacacacctgcagatatgtacacatgcacacccacagaatcgagtgtgcacacacccatacataatgcgcatgcactcacatgattgaatgtgcacacacccagagatgcacacacacacatytaatcagatgtgcacccccacacagatatgcacatgtgcacacccacaggatcgaatgtgcacgcctaatcagatgtgtacacccctcccacatatgtacacatgcacactaacacaaatgtgtacacacccgcaggtatgtacacatgcacacctacacagtcgagtgtgcatgccccccacggatatgcacacgtgcatacccacacaatcccatatacccacccccacaatcacgtgtacacacccccgcagatatgcacacacgcacacccacaggatcgaatgcgcacacacccacagatagcacacacgcacacccacacaattgaatgcgcaccccccacagatatgcacacgtgcacacccacacaatagaatgtgcacacacccgcagagatgcacaagcgcatacccacacccgcagacgtgcacatgcacacatccacacgatcaaatgtgcacgtgcatctgcagacatgcacaagcagacacctacacgcactcgcagacatgcacacccacatgggcgaatgtgcacaccccccccacacagatagcacacgtgtacacccacacaattgaatgtgcatacacgcacccgttcacaggttaatcgctgccacagctatcagctctttttcattgactgttacggcaaaatattctaaaggataacatagatttatgtttatttgcattttatgtttccttatggttcatatgagtttattggaaaattagcaacatacacatcattttggggaatggaaagtgaggcagagtaagccagaacattcactgtaacattataagcaagtagaataaattgataataccttcaccagtaatgcactttccctagtggaaataaattatttgtataaatagcctcttgatgtttgtgtgttatttagttatacaaatcacatttttcttttttacatatggcactttaatgttagtactgaaaatgttttttctgacattttttcagtaattgtcatttacatcaaatatgcagctagagctaatagaaaaacagttaaaacaatttgttgtaatggtgagatatttataaggaaacatttataaaagatcttctgtaagacagcttagacttgaaaatacatatcagtcttagagtcattcaggtgtttttacaaccaaaagtagaagcaccttttaatattcatgcttaatatttataaaaactgaattggagggttttttgtttgtttgtttgtttgtttttttgagaagcagcagctgcatttgtaaaaatgtgaaagtgccagttcagaggtgttgtagcttgccaccttggaaggcgtgtgtgtggccgtagctctgtgaacacacgtgtgaacccggcgttaggacacccgggccctccttcgtagtgtgaacactctggccgtgtcctgcagcttcgccttcttagctccttgctgggattttccagcatcccttagacttgtcctcttttgtcctttgggtctgaggtcacactgggcctcttggctctccatggagctcagtgtgggtgtgtcttgccggcaggcaggttccggggccscagcatccccatcgcccacccggatgttcctggggctgtaggccgccagctggcacagggccacggctgccgtctgcttctgctcctcgctgctgtccaccgcgcatgcgtctggagcctcctcgccggggcctgtgggtggggccccgtcaccgtcgaggctgcctggcttggtctcagggtggctgggcccatcctcagaaccttctgtcccagtcttctgtggaacagcagcagcaggttcygcagctcgtggtcgaccggggaaggcrggcctcggagcctgggtgttacaggggtccttcaccgagagattgagtggaaggtcctgcagctctgagaagctggcggtttccgcctgggggctgccttggtacgtgggttcgtgggtggctgccaggtttatctctgatttcttggagaggttgagggggcccatcccggagctgtcgtccggactggaaggcgcggcctccgagacgagagaggcgcttccggtcggagcmggagggtctccgttcacaacattgaggctagaagaagccaagaaaaagcttagtaggagcttgcttagaaaagcaactgcgtgaagcagtgtgagcaagtataagcctggctcatggaacccaaccagaaacattcccttggaggttttgaaaatgacattttcttaccttactggagactctgctgtggtctcagcagcctgggcaggtaggcattctgtgcttttcttaacaggcctgaaggctgtgaggctttgctctggcgggtagagtcttcccagtgcgctggaggctgccttgttggagaggtcgtacaggccttcgcaggtctggctcgtctgcatgaagtcggtggggctcggcctccctggggagcccgtggctgcactccctgcgcgggggctcattttggacccttccgtgtctctcygcccagccttggaggagtctttagcctcaggaattggactttcgaactcgacgtgttttctgttggggtccgaagggtttaacctggaaggactcgaggctggatagaccagrgtggcttcttcaagcaggtgagagctctgatctcgggtgaggccagtgacaggtgggagtctgagaccataggaggaaaatgcagactctggcctgtaaaatccgtaaggaatcggcaggttagagggatattgctggaaaaacctgtagtgatygtatgtggctggagatggagccaggtgcttagggatcggccccrggtgaggcaggaagtgtctcgggtcttgggttcygtagactgacagcaggggtgcgtcacactcaggcgagctcccagccagcaggtaaggcgagtagatggtggccagcccgtgctctgtgtaaaagtgaggcgggtactctgggattgtggggtgcaygtaaggggaaatggccccaagcccctttgtagatgagattttatgtggaaactctggtggaaggaaaggtgagccggctttccaggggtagccaggagtgtggaaggccgacttggtgtggaaagacacggccttggcagtggggttgtgtaaagccagtgtctcgggcgcctcggcgttgtctggccccttgagtctgtgctcgccractggaacaaatgcagaaggccgagctgcgccttccagagcaggctgggcaccgagggcggcttccggagctgggctcttgcagggtgatgccctgtggagggctggcttctgtcccaggcacctgtggkttccccgggcttgcagctccaggttttccttgatgtcttccctggcagagctgtgctgaagcttygagtcgaaggcagagagtccatttgcgacagacttggaagaggctggcttcgccgtggcatcrggctggttggtttgcttggggtctagtgagttagatttagggcacttgggaactcgatcctgctctgatactaaagtaatcgagtttttacaaagaccatacttcatgtgattaaaaagatgtgacttctcattgcaagtaaagggacattggaaacatttatacttgaagggctttcctggaggcctggggatgtaatgtggcttttttggcttccgctctttgaggagactcattttcctccttatgccttggactctggctgtccaggtggcgtgatcactgtcgacgccrcgtgcacttcgtggtttctaaagaggcacctcccgctttgctttctttcccgakcacttctatcagaagccagctctgcgtgctgagggtctggcgagagcctccgtcatctggcggctgggagctgtaataaagagcagtcttggtgtcaggacagcgagtgaggggtcggcgagaagccggcctcggctcgccacagtgccacaggatccctgaagcagarcccctgaagggctgaaactgcctgctcctgaggggagcagctgccggtcacagaagcagccctgccctacccttggtaacctggctgctgactccccaccgtgttttctgttttctgagtctgatctgaaagagtcacctcggggcctagaggtggagtgyggtgtgtggtgcgttgagtgtctgttctgagaatgcctgtaagcctttgagttttgggaactttcatcctgtgacctggacctttcctcgaaagcgccctgccgggggctgaggacaccgagccccctcccagggtctggacagagtcctgtcccagggctgcccgactctgcttgggggttacacgcttgaagcagtgggtgtgtgatcggccacactctcacgtgaaatacgaaggggtttgtggctgtttccccttaacatgtacccacagtcacagagtgcccctcacttttacacagagcgtgggctggccaccgtctrcttgctcctacctgctggctgggagctctcccaagtgctgtgcgcccctgccgtcggcctgtagaacccaagaccatggatgctgctgcctcccctggggccgatccctaagcactcgtggcagtttctgcccactttagccacgtcgttggtgtattctagtgtgcttgtttaaaaatgaagaacattcgaacacaagactctaccctactgcttctaaagtcagctttatcattaagtagcatttatgttgtctcagatatgaatacaaatgctatatttatgttgacttaaatggttgaaatactgttggtgaatttgtacatcctgtgagtgacagcagcattgtgagacatgctttcacggtcacccggttcctgctggccaggaggcatggccagcagcgcctgcccgtccagatgcaccaccaaatggaagaaccaaagctttgccacactcctgcccgagaggagaccagagtgagtagtatccgctttagagatggttgggtcatgggaggaagctgtcctggcccttaacctttagggagtgggttcagccctctggccacacccactcaggtcctgggacccaccagaggctgtgtgtgtgatgtcagagctggcctgctcttttggattcttccagagggtctctgtgtcccccttaccagcctcaggtttccttcagaggctgtgccgcacgcccaaggctgagaacaaaggctgtttttytttttttgagacagagtttctcccttgttgcccagtctggagtgccatggcgcaatctcagctcactgcaacctccgcctcctgggttcaagcgattctcctgcctcagcctcccgagtagctggaattacaggcgcccaccaccatgcccagctaattttttttgtatttttagtagagacggggttttgccatgtkggccaggctggtctcgagctcctgacctcaggtgatccacctgccttagcctcccaaagtgctgggattagaggcgtgagccaccgcacccgtcccagaacaaaggctttgagagtctgggactgtccacctggcagctgggcctggagcgactcaagcagcaactgtgcctgggagacagggtgagtgggagatggggtggaggtgcaatggatcaaggctaagcactttaattcgtattaaaaatgtaaaaaagaaaaggtctttagggtctaaatattttcaaacagcttaaaaataaagttaaatgacccaaatgcctatcagtgatagactgaataaagaaaatgcggcacatatacaccatggaatactgtgcagccataaaaaggaacgygatcatgtccttcgcagggagaaatggatggagctggaagccagcatcctcagcaaactaacgcaggaagagaaaaccaaacgtgcatggtctcacccataagtgggagctgaacagtgaaaacacatggacacagggaggggaacatcacacaccagggcctrtttaggggtgggggtcggggggagggagagcattaagacaaatagctaatgcatgcagggcttaaaacctagatgatcggttgatgggtacagtaaaccaccatggcacacatttacctgtgtaacctacacgttctgcacttgtgtcctggaacttaaagtataataaaaaaaaaatacattaaagtaaagttaaatggagggctgggggccgtggctcatgcctgtaatcccagcactttgggaggccgaggtgggaggatcccttgagcccaggagattgaggctgcagggagctgtcatcccaccaccgcactgcagcctggtgggcaacagaatgagaccctgcctcaaaaaaaagctaaatggaaatgacttaagaaaactgtttcaactgcagtattttttttaaggaatgggcagatgtgcccattcttgagtctgygaggttttatgtgtagacatcagggtggctaaaagtcaagtgaaaagccgccccttgaaaatagagcaacgtgtgtgggagcctaggaggcagctgtccctgaagcaaggcgccacccctcctccctgcacccgtgtccttcctcccacacgccaggggccaggggtggtggctgggctttcatatggctgccccgaactctggggaagtgctctgattttgttctcagcaaactggtttctctactgatttattcatatttctttctttctttcttttttgagacggagttttggtcttgttgcccaggctggagggcagtggtgcgatctcggttcactgcaacctctgcctcctgggttcaagagattctcctgcctcagcctccctagtagctgggattacaggtgcctaccaccacgcccagctaatttttttgtaattttagtagagatggggtttcactatgttggcccggctggtcttgaactcctgacctcaggcgatctgcccgcctcagcctcccaaagtgctgggattacaggcatgagccaccgtgcctggctcatttatttataattcttaaaaacacaaccacccttccccctacaaactgcctctattaacatactttaagttctttaagacatttatttactaagaagtggtttgggtagaaaaggggctctgctgacctgccaccttcgctgtgatgagtttctgtgtagcagggacagcgaggcacggtttggatgaggacaagatgtttgttaccctacaaccagggagggtgtcgggtgacaccctgggctcagaccccgcgctcagcacccgtctcccaccgtgggctgccacagaagctacamggcaccgggtcaaggccaagcaaatgaaacacgtaatgatagctctgtctttctaatttccccctattagaagaaagaacgtgaaataattctttatgggctcagtccctaccgtgtggggcagacctgctctgggtgatgaaagcagtttccctgcctcccttcaggaagtagagaagccgggtgcctggttccagccaaacgctgggccagccagctcagtcagtggggcctgtgccggcatgcctcgccgcgctccctggttctgaaggcgtgagaacctctgcaagtcaggttcccatgattgtataggatgtgttacggcagggatctgaaagctgatgatttcatcactagctggaagcatcaggatcgaaacgatgacagttgcaaaatgttcatcaagtgagagctgcgtcctcgcgagaccgaaacgccgcctctagcacctgaaacacaagccctcagaggagcagatgattccctcaggatttaagaaaattgaggacttcagttttcgaagccgsattatttcacattgctgatacctctagcgcctgaaacacaagcgctcagaggagcaaatgattccctcaggatttaagaaaatgaggacttcagttttcgaagcagcattatttcacattgctgatacttttaggcaaaaaaaaaaacaaaacaaaacaaaaccaaaaaacaaaaaaacaaaaaaacccacaaaacccgtgttggttagattttctcaaaagctttacaacaggcaggttacgtgtaagctctgctgttgcccaaaatagtaattagggaaataattgcttttaaatgaatatgtctgttttctagtcagatttgcccttttgttctttgatcagttagttcacgtaagcgggtgtggcagggaggaagcccctggtggtgagagtgtttggagctcaattgctcgaagggaattggtgtcgatatggagtctcgggcagtggttttagtaaccttggataaaccgacctctcaggcttgcacaatttgctaattaaaacagggagcacagctgcttcagttgtaagccgggcgtaggtcacctgatctgtaaaactacaatagtgtcagagaagtaagtgggataacattgttgctttggtaagctttcaaatgatgatgatgtcagcctgtgagttctgtgtcctgcttaagtgaggtttataaggatgaagaaaccaaacccgacggccagtacctcaggctgtcacagctgtctgtgggcacagcgtttgaaatagtctctgtgtggtcagtttctaccagcccgactttgtactctggcagctgctggtgttaaatattcccaaaagagtatgttgttgcccaaacagtgtaacccagaaatctagctgtttacagtaatttggatttgtatttagaggtgcagtttttctctagaggggataaagaagtgcggagcgtctttctctcctgggggaggtgtgtttccattttagttaataacatgcccggagagctgtctgtctgtctgttaataaagcagagtctcattcattatctgctttcatttgagaactgcagtgctagcgtgttttacagtgaagacctcggtgtgatcctgaaggagggtttcatcctcctctcatttcccactggatcggcaggaagcgttagcagggtggacatgccacagagcttccagatctggatcaaaggtggctgttgctgaaatacttatgcagagtcttccctgactgctgctggctaatgtgtgccctcttctccaacacacctcctccgagcctggcctggcacaaagccttctttctccaagttatttcagatcaagcagccaatgtagacagtgtctacactaaagggcgtaagaacagtggggtgcagtggcttcaaacatgctcaggatccagctgagctttcaccaggcttttcttgccatatttacagatgccactctgtgcctttctaaatattttaaatgttgtgtgctcagccgatgcacttggcttctggaaagtgcgctgagctgagagctcgcttctcttcctgctcaacgtgcactgggccgggtgttggggcgtagctgcccacacagacagtgctttgaagagtgagtggtttcggttggccatggggttgtgtctaaattgccaatatactgtctttccaaaggttcctaagtgtggacagttaatgcagcagacagttgttagggtaatagtgagaagttgggatgcttaacaagcttctaaggagtttgaactttgaaaaatagacaagagaaagagttcttaaaaaaaaaaactttgataggacasagcggaagtaattacagtttaactttatgggacgtttctgtgacaggctgggtaactatgcttgtcatgcgtcctaacctgtgccctgagattgtgctgtaatgttccttttggtggtgtccagctgtctggcaaggagcctgctcggctggagcattgtgaagggcatgctgtaattacaatattgtgatgtggcgttgttgcataactcaaggacacaccattgtcgcctacccactgtgatgtcgcaagaacgagatttgtgagttttactccaattgagcttttccagtgattgactgccactccctcccagcctttcggttctttaaaatgaaagataaacctcaggacaaccaagacctggggaaaagacagtctttgggaatgtaatttggaagaatggatccagaaaaacaaccaggggctcttaactctagtttcggcaggagatcccgagttacagacctgagctcgtaaacaaacgctcaccactttacagtcgccgcctcatcctgaaactccggtcagaaatgctggaaggcctttgctaatgcgcagtgaaaattaggggcacagatgtggacggactgtgcttggtcagtaattgttctcctccaaatcaagtttatgagaaatttcatataaggaaaaaaacccttttgtatctgtgtctatatgtacagaagaccttaacaaccaaacagaaacttaacccctttggtttggttttgttttcgaaagcttatgcccaattttaaacttcatgtaagcttatgtacttattttaaactttaaaactattaaaagttaaactagatagtaaattcggcactgtctaatgtgcatacaccacaaacatataaccctaaattcagctgtgtctaatgtgtatacaccacacatatatataaccctaaattcagcctgatgtacttataccacacatatataaccctaaattcagcctaatgtacatataccacacacacatatatataaccctaaattcagcctaatgtacatacaccacacatatatataaccctaaattcagccctaatgtacatacaccacacatatataaccctaaattcagcctaatgtacatacaccacacatatatataaccctaaattcagccctaatgtacatacaccacacatataaccctaaattcaccctaatgtacatacaccacacatatatatatgacccttacctcttgttagcatttattgtagtttgtttttgaggttaggagcagttaagcaataatatgaatttgtgttggtttaacttttatgaattttagggcagaacaaggagttaatttccagataagcttgttcatgttcttagaataaagtgtcagcctcattagaagttttgtaatcgtggtctgcatcccagccatgcacctgctgggtcctgagtaatcctcggagcccagagcaaggcagagcagacacggagcaaacgctgcgttcagctgggtattttagatacgtctgagaagagttttaarataaaacttgaatttgaaaagaaatagtgagtacttaccagaggtgggcagtgctgggatgtggccggtcttggtgccggtggctggcggtgctcaggaagcagtacctgttctcacgcttgctgggtgaaactggagcctgctgttccagtgggagggatttaagtgtaggagttgagccctcggggcgtagagatgcacctgatattcctcctgcccgcagctacgattcatgtgtttgcacccaccgagctgctgcgggcagcctccccagcactggacccagcaagcaagttatctcgccgactcccagcgctgtctccagactcaactgtctgtgagtgcggcgtcggtgctgcctggacggccatatgtcagagggctttcgatgtgtccgcagttagaatagagattactatattcatcagaatcacacccgatgaatatttggcgtcatgataaagacatgtgagactttcctttagaacttgagcatgtgtacgcaggaggcaaacacttggattgattctcaagcgcgcataccctgggaggcacagtattcatggcgtccttgccatgaggtccagtgaggcctttgaggatctgtggaccttccaccctctaccctgctcctgagagtctctgtccctggtcctcctcaggagctgagccggcagggagggagcttatcccagagcctggctgcagggacctgccggagcttgcccgacaccaggcaccgcaagagctgcggagcagggtgtgtgggtgcgggggagggggccagctgtgcactcccgcaaaccaccctccccccactttaaattgcagaggcacttaacttgggggccagtttttacctccacacccccccaccaaaactgcttgcttgcttaatcggaggccgcaccccagttgtagcgaaggctggcatgtggtgtcggtttgaggactgggaaaggaggtgggatgagctggtgtcaggcccttggatgagcctgaggctgcagggcagaggctgcagggctgtggcatagggacgagctggccaggacagacatactggtttttttttttttttttttttttttttttgagacagagtttcactgttgctgcccaggctggagtgcaatggcatgatcttggctcactgcgtttctcctgcctcagcctcccgagtagctgggactacaggcgcctgccaccacgcccggctaattttttgtatttttagtagagatggggtttcaccgtgttagccaggatggtcttgatctcctgaccttgtgatccacccacgtcggcctcccaaagtgcttggattacaggtgtgagccactgcacccggtctgtttttttgtttttgttatttttttccttaagacttaagattttacatggctttgygtttacttttatatttaattccttttttttttcttttgagacagggtcttgccctgtcacccaagctggagtgyagtggtgcgatcacggttcactgtagcctcaacctcctggactcgagtgatcctcccgcctcagtctccccagtagctgggactacaggcacggtcactatgcctggagaattttttgtagagacagggttttgccatgtttcctaggatggtttaataccttaaaattttttttggtggcttttgtccattgagacatccatatactttatgaagtcaaaaagagttatgtaagtcttatgacaaaaaacagcagttccctgtccctcttacctattcctggatagcaaactatcccaaacttagtggcttaaaacaagcaccgttttattacgtcttaggatatattgtgtcaggagtttgtggagggcctggccgagtgctgcttctgtttcatggacactgactgaggtggctccgtgggagaaagctggcaggtgactggtctggagggtccaggacagctttactcacctgccttctgtcctggaggggcagctggaatcctgagatcagctggaacctcatcctcacttagtagcacttcagaggcctccctagcagggtggtcagctgtatgatggctcaggacttcaagagagcaaggcggaaggttccagtcctccagaaggctgggccgcagattgtcagggtgtcccttctgtcacctttctctgctgaggcagcctcgtgctgcccagatgcaaggcgggagccgagggctccacctctcagcggcaggagtgccaggtgtctgcgctacgactccctctgcccgkaagccccaccttggcctttcctaagctgagtgttctgacccttgccatggagggtccagtgaggcctttgagaatctgtgtaccttccaccctctaccctgctcctgagagtctctgtccctggtcctccttgggagctgagacggcagggagggagcttatcccagcgcctggctgggtgtttacctcctcgattccagccttactgatctgttggtggttctgtgccctctctccccctctctcccttctccactcctggtcgaggtgttgtttggtggcttcccttcatggaagatgggaatttgcctctctttgccccttctgcccccatgtctgccttccccgtcacccagggggttttgcctgcctctctcttgcactggaaggcctgctgctcggatcccatgtcgtctttctcttgagttaatcatttagtttgacatgaggcacacaccttttataggctcttgagaaagtgcaagagagatttttttggaggtcttgaattattgaaaatgtttttatctactcttcaacctcactgatagtttggctgagtctagaatttcaggccagaaatcatttaccttcagatttttgcaagtgttcttcattttctttctttcttttttttttttttttttgagatggaatctcgctctgtcacccaggctggagtgcagtggcgcgatctcggctcactgcaaactccacctcccatgttcacgccattctcttgcctcagcctcccaagtagctgggactacaggcgccctccaccacgtccrgctgattttttgtatttttagtagagacggggtttcaccatgttagccaggatggtctcgatctcctgacctcgtgatccgcccgcctcggcctcccaaagtgctaggattacaggtgtgagccaccacacccggccgcaagtgttctctattttctctagcttctagtactgtggttgagaaccttgatgccattctgattcctgattctttctctcttaacattttagtgtgaaaattttcaaaatacagacaagttgtaaggatgctccagtgaactctcatatgcccaacggtggggttctccagttaacacagctgtctgtgttcccttcccttcccctccctgtccagcttacttacccttcccttcccctcccctcccctccccgtccagcttacatacccttcccttcccctcgccgtccagcttacttatcattcccttcccctccccgtccagcttatatacccttcctttcccctccccatccagcttacatacccttcccttcccctccccgtccagcttacttacccttcccttcccctcaccatccagcttacttacccttcccttcccctcaccatccagcttacttacccttcccttcccctccccgtccagcttacttacccttcccttcccctccccgtccagcttacttacccttcccttcccctccccatccagcttaatcgtcttgctgcatttcaggtcagttgcagacatcagtatgctttgccccaaacacttttcaggcatattcttattagtttatgattcttctttcaaaggtaaggtttacattcagtgaagggcacaggtcttaagaggatcatttaacgagttttgacaaatgtgttctcccattatggccccagagagttccgtcacagcagtgccacccttccccacccagaccgtggcaactgcaggctgatacttttccaccatggattagttttatgtgttgtagaattttatgtcagtagtgattcctgatttttatggacagctgtttctcacctgcaggttctttcctttatcctcagtagtcttagttttcttaactttatatttcgacacttctgttaagtacttggtttctgattttggtttccatgagctctgttttgttctgagtgttccttttgtagcatctcattctcatgcagtactttcagtagcttttcttatctaaggattttagtgatagctttcttttagtggggagtggaggagtgggggtggatgttctccgtgtgtgtgtgtgtgtgtgtgtgtgtgtgtttaaagacctggggtcttgctgtgttacccaggctggacttgaactccgggtctcaagtgcttctcctgcctcagcctcccgggtagctgggactgcaggagcgccatgccatgcctggtgccctccctgcatcgtcagtgtggctgcctgccttccagggcctctgctgagcacctcggagagtcagccctgtctcctgccccagtgctccttgggttaggcctaccctgcccctccccacagagttctctggtgccacagatctggagctttttagggacctgtcctgtggatcagggggagtctgagttgcctccctccaggggagggctgggcttcttggtctgaggcatttcctgctgtccctgcacttccaggctcctccgtggtcctggtgctgccttccctgcccttcctcttcyaccctgtagcttatttcttgaaaaaagaaaatggtccgtttctgctgtttttagtgggattttacccgctattttttacatgttcaaccccctgtgttactcagaattcttgcgattaggtttttgaccaaatcttaggaaccgtcatgggggtggcagctgatgtttcttgcgtgttgatggtgtggggcaccgtgccaggtgcatcacctgcactggtccatttactcagaagcaccacgcacctggcctgtggagtccccccacccacaggtcgggaacrtggccgaggtacccagcccagagggcgatgagcagagttacaccagaggtggggggtgcttccctgggtggggaaggaggggtacctggggtggtggctgctcttgggggtaagcaccggtgccagtgtgtgttggggggtgccagggacccaggcaggtgctggcgccgcggcctctgtgtcagggcctctttccctaggggcacacaggctggaagtgcagtcctggttgagctttcctagtttccaggtcgggggtgaggcacaggacatggccggctcggccccttcctctccatcctgtccagctcagccccttcctgtccatcttgtgcggcccagccccttcctctccgtccatcctgtccggcctggccccttcctctctgtcctgtctggcctggccccttcctctctgtccatcctgtctggctcggccccttcctctccgtcctgtccagcttggccccttcctctccatcttgtccggcccggccccttcctctccatctcgtctggcccggccccttcctctccgtctgtcctgtccggcccggccccttcctctccgtcctgtccagctcagccccttcctgtccatcttgtgtggcccagccccttcctctccgtctgtcctgtctggcctggccccttgctctccctccgtcctgtccggctcagccctttcctctccgtcctgcccagcccaccccggtcccttccgcagcagcatcctctccagtgcactgtgtgctgggactcaagtcttggctcttccatcttcaccctttgtgacttggggcagcaattgctgacctccctgggcctcggtcttcctgtccgtgaaagggacttgtgagcatctctcacagaacacctgtgatgaaggaagggcgtcacatcttggatcttcttaaaatacaagattgtttctgttttaatcctttgtgttccttgtgaggtgctgcatccagaggaaaggagaaaggaaatgaaaactctgcggaaaatccacaggcctggcatcagcctcccagtctgattttgacgcggctgtaggggagacacagcaacattctgtcccccgagggcacagcttcaggaacggctccgggccggagggcacctctcgcctggctgtgttgtgtctcagggctctgcgcttctaaagggactcaggccagtgggcagaactgtgggatgggactgggaggcttagggggtgagggtgtaagccctgtgcctccctccacgtgctgcgtccggcatgccacgtcccctcgtccagccctctgctgccccctccacgcgctgcgtcccctgtgccgtgtcctctcgtccagccctctgctgccccctccacgcgctgcgtccagcgtgccgtgtcctcttgtccagccctctgctgccccctccatgcgctgtgtcccatgtgccgtgtcctctcgtccagccctctgctgcccactgctctctttgggacttccattgtttccccttccccttcctttcctggttttcttccctagtgaggtgcccttcctgctgctgcagggccctgctgtggcctctgccttccgtccctggcggtagtgagactggctgagacccaggggaagcttggagactgtcctagatttcggagatggtggtacacaggcttgctggcttgggttagggctctaggccctgccttcgggttgtctggaagccgccagccaggcctggacacctctctgcccccgtcacctcggagcagcagcccaggagcgggtcacagcccttcccctgtgttacatggtcacctgcctgagaacccctgcaggcccctgtgttttgggaagttgatttaactgaacagagcgcagctgagaaggggcgcctccctccccacccaccctcattgcctgggaccgcgtgtccaggagccgggcctcgggtgtctggtctctgggccacacaggctaacatggccaagcccagctgcacccccggggtcctcacccgccatgtgcctgtggtcgtggccaaggtctgggcccaacctgctctgggcgctgtgggcaccgctcagccattttctacaggtggccgaggagacatttggtttctcattaaaaagaaacaggccgggcgtggtggctcacgcctgtaatcccagcactttgggaggccaaggtgggcggatcatgaggtcaggagatcgagaccatcttgtctaacacagtgaaaccccgtctctactaaaaatacacaaaaaattagctgggcgtggtggtgggtgcctgtaatcccaactactcgggaggctgaggcaggagaatggtgtgaacctgggaggcggagcttgcagtgagccgagatcatgccactgtattccagcctgggcaacagagcgagactccatgtcaaagaaaaaaaaaaaaaaaaaaaaaaagaaacaaccctgagaacatcagtggggttttactgactgtgtcagacaactcagcgatgcagagaaatgaaagtggagttgatttggctcttgtggtgagatacagccaaggtgtatgagagaatttggggaaagctttctttctggacatttgttgacgttgatsagtagtggagggctttatttgtaagttgaagtctgagatttgtcatgccaatacctaaattttaatttgtttgtacaaataacgccacaatttaattcttttttctttttgagacagagtcttgctctgtcacccaggctggagtgcagtagtgcgatctccgcctcccgagttcaagtcattctcctgcctcagcctcccgaatagctgggatcacagttgcgtggtaccacgcctggctagtattttgtatttttagtagagatggggtttcatcatgttagccaggatggtcttgatctcctgacctcgtgatccaccctcctcggcctcccaaagtgctgggattactgggattacaggcgtgagccaccgggccgggcccacgatttgaatttttatggaactggggctaacttaattttttcagacgagtgggagtagagcaaacggcccctgtctgttgcccctttttcctaccaaggcccctccaggctgtctcttgcctggtgagtgtgaggagatgggtgggcgcggccctgtgggatggtgctctgtggcagggctggcagtttctgggtgtgtggcctgtgggtagcctttgtactgggcgcacagtccccggctcctcccttccaacaccttcgccctgagcggcctcggaaatggggcttctggcggctctgcaggcaccgtcagagtcagagggagggcgagcggcttttggtttctgtttaaacagcgtcctgtcgctccctcctctcctgtgcggattggcgctgcggcttctgtgttgagagggaaacttgaaaccctgagctatggcttgttttgtctttgattgggaaacccaattcaggtttgtgaacttgggccaagtttaagaattcccacagttttcttcagctcctctcctccctgaaccccgacagcgaggtgtcttacgcttcggcattctcactcgcctgactcagacttgttagttttccagagcaactcatgtggccgccgtctagggagtttattcagagggtgcctctacatgcacagcagccaggtacagaagtcatgagttaaatcgcacaaggacaagtaaaatgaaaaaaattagcactcagatcttcttttttttcatgctacaaaataacagtgaaaaacctaacgatgaaaatagatgcgaacagacaaaaggtcaatgggcttgatcccttctcatcctctctcctgtgtctcctggaggcttctgcacctctgtgtcttcccccgctctgctgcgtcttctccacctcgatgtccccctctgcctgctgcgtcttctccacctcgatgtcccctctgcctgctgcgtcttctccacctcgatgtccccctctgcctgctgcgtcttctccacctcgatgtccccctctgcctgctgtgtcttctccacctcgatgtccccctctgcctgctgtgtcttctccacctcgatgtccccctctgcctgctgcgtcttctccaccttgatgtcccccgctctgcctgctgtgtcttctcacctcgatgtccccctctgcctgctgcgtcttctccacctcgatgtccccctctgcctgctgcgtcttctccacctcgatgtccccctctgcctgctgcgtcttctccacctcgatgtccccctctgcctgctgcgtcttctccacctcgatgtcccccgctctgctgcgtcttctccacctcgatgtccccctctgcctgctgcgtcttctccacctcgatgtccccckctctgctgcgtcttctccacctcgatgtccccctctgcctgctgcgtcttctccacctcgatgtccccctctgtctgctgcgtcggggctgcctaccgggcttggtcttcagggccactgtttctcctcagctaagtcctgagagtcacatttccatccattgcagtgaaatcttttccttcaggtatttccagaccttggttttggccccttttcatatcttccttgtttcctcgctgtggttttcatttcccctttcgtctccttaacctgttttttgatggtgtctttttaggttatctcaagttcatttcaagctctgaaagtaggaagtaaagtaagaaccgcgtggcactagcaatcactaggcattgttccaagcacacggataaactgagaatcctcgtggtcgccccgggggtgggactgccattgtccagagagacctgcttttgcctgtggtgccacacgggtccctctcacaggatgcgaccatggtggctttgcgtcatgtcacctcagccaggcaggaccttctgctggaacccccttccctggtagtcctcggagagggctgtgcacaatctggaggcagaagcgaagcagtagcccccgtgcgcggcagctcttgaggctgtgctgctgttggctgtgctgttgttggctgtgctgttgttggctgttttgctgttggctgtgctgttgttgcctgtgctgctgttggctgtgctgctgttggctgtgctgctgttggctgtgctgctgttggctgtgctgctgttggctgtgctgctgttggctgtgctgctgttggctgtgctgtgctgctgttggctgtgctgctgttggctgtgctgctgttggctgtgctgctgttggctgtgctgttgttggctgtgctgctgttggctgtgctgctgttggctgtgctgctgttggctgtgctgctgttggctgtgctgctgttggctgtgctgttgttggctgtgttgttgttggctgtgctgctgttggctgtgctgttgttggctgtgctcttctgctgttggctgtgctgttgttggctgtgctgttgttggctgtcctgttgttggctgtcctgttgttggctgtgctgttgttggctgtgctgttgttggctgtgctgttggctgtgctgttgttggctgtgctgttttgctgttggctgtgctgttgttggctgtgctgttgttggctgtgctgttttgctgttggctgtgctgttgttggctgtgctgttgttagctgtgctgttgttggctgtgctgttgttggctgtgctgctgttggctgtcctgttgttggctgtgctgttgttggctgtgctgttttgctgttggctgtgctgttgttggctgtgctgttgttggttgtgtgtgctgaccccggaccccctacagtatggctgtgcatggactggtgatttggcccccatggcctcatcagccctgatccatccctgcattgaattcgtatggggcttgtggtgagtctggactgactcagctttctaaaagctgaaaagcaaaagttaataggtctgcagagataaatggacagacccggtatcctcctgagagctcaaaacacctcccaattattgataactaaatatgtagtggagatatagatatgtataaaacgcacattacatactgtgtgtgcacatacaatatttcaacagcagaggcgactggcatgattccataattgatacagaaccgtgtagctagccgttggagaatacacatttgtaggcacctgaggaacattcacagatattacacagccaggccataaaacaagtctcgagacatttcagagactcactggcggacagatggtattccatgctcacaaagtaatgaaattaaaaactggatacagaataataaaggaaaggtgataatttttagttagaagatatacaaatgggtaaatcacatgagtcaagtctcaggagaagttttaaaataaaaagttaaaaaagtttaaaaataaaaataaacagtcacaaaattattctatctaaaattttgggatgcagctaaggaaacttaaacctttaaacaggtgtgacgaaattgtggcctgcaggcccagtggggcctcagcctgtttctgtacagctttggagccaagaagggttttcacattttaaaaatgttatcaatgagaataaacacaaccaagcagagtctgcgatgtggactgcatgtggcccacagggcccgaggttctctctggccctggcaggaatcacttggtgactcggcctcagacacgtgtacagaaamggagaaaggttcactctgcacagggcgggtgggaagagggcagtgagcagaaccctagaaatgaaggaggtggaagacaaagatgagagaggacacacasagccaaacgcagctcttcgagagggctgatgggaccaataaasgcgtggccgacgggcagaaagcaggagccttacacacggaagggagccctcgtgcagccaccgtggagatggaaaatggcatgttaagaatatcttttgccaggaaatttggtagcttagkcaaaatagacgttccgagagaaatgtaatttatcaaagttgacccaggtgggaatagaaaagtgactcctcactgcttcagcgcatctgcttgtaagcgggaacgattactgttgaccccataggatttttaatgattttgttgagacgcaattcacatgccattcagttctgtcattaagtgtacagttcagtggcttgtaaygcatttgcagagttttgcagccatcgccacagtcagttgtagaacattttaccccacgctccttcgctgtcatccccaacccccccgacagatggataaaccccccctcctagacaccacagatgggttctctgtgtctacccattctggacatttcctgtgaatggaaccgtgccccctgtggtcctctgtggtggctccttgccccgagcgtggcgttggcgtggtccgtgggcgatgcagcccccagcagtgctccttttcttttccttgttgaagcctgttccatcgtgtggcatcttagtcagctcaggctgtggaaacaagtcaccacagatgggggctcaagcagcacaaatgtatccctcacagttctggaggctgggtgtccaaggtcgaggtgccagcaggctcggcagcaggctcggtttcttccgggttttcctgggcctgcaggcgctgccttcctgctgcgtgctcgccgttcggtctgtgtcttggtgtccttgtttcctcttcttaggcggacactggtcatagcagatccgggccccacttgcgtggcctcattttaccttacgcatctctaagggccacatctccagatacaggcactcgggggcactggggttaagacttcagtatgtggatttcagggagacagaattcagcccacgacgtacatggaggccgcattttatttatccatctgtcagttggtagacgtttgggttgtttcccactgtaggctgctgtgaataaagcattcgtgtgtgagtttttgtgtggatgtggtttttgtcttgggtataggcctgggcttggagcataggactgttcggaaagttaagggaatgaacgtattcagagctcagaaccgtgtctggcttgcgatgcgttctgttttgaggttagtgatgatgatggagagcggctcccgaggacgagagctcgtgatggagagtgcctctttatgcccgatgtgaatgtggctactcagctttctctctctctttttttttaaattaatttattttgtcgagacaggttcttgctctgttgcccaggctggagtgcagtggtgtgatcatagctcactgcatccttgacctcttgggcgcaagtgatcctctgacctcagcctcctgagtagctggaaccacaggcatgtgccaccacgcccagctaattgtcgtattttttttctttttctttttttgtaagggtagggttttgccatgtagctggtctcaaagtcctgggcttaagcagtccacctgtctcagcttcctaaggtgctgggattacaggcttgagccactgcatccagcaacaccccccctccttttttttttctgtttttgagtcagggtcttgctctgttgcccaggctggagtgcagtggctcactcacggctcactgtagctttgaactcatgggctagatccatcccccgacctcagcctcacaagtagctgagactacaggtgtttgccagcacacccagctcattttttctttttttttttgtagagayggtctcaccatctagcccaggttggtcttgaactcctcgcctcaaatgatcctctcatcttggcctcccaaagtattgcgattacaggcatgagccactgttaatggccccagctttctttgggttcgtgttttctcagtgtattcttttctgtcttttaatttttttatattcttgcattttagatgtatgttgagtaaaaatctaccgtatgtgattttaagctggtgagtttagtccatttactttactgacatgtttgggtgtctttgtcttattatatgaattttgctttttcagatttttttttgtttttaaaagttgtggttcctattgggcccccaacccagtcccattccacatcttcttccttgttggtttggaatcatctattctgtttcctgtgtttcttcaggggtcgtattcagcttgtaccacgaatattcagagccaacagccagcttcttagcctaccctccaagtaacacacagcacaccctgacctcgatcactttccatctgacatatttgacattgttgagtttttagttcttcttgtttaacattagacattacaggttgagcaccctgaatccgaaaatccaaaaccgaaaactttttgaatgctgagttgacactctgcaggtgatgggctgcagtcaaaacacaggtaaacaacacacagttgattcagcaccccaaggggaaaaagatcctcccaacccccttcagctttgataaatcctttccacataagaccaggttccctcatgcaagcacgtccacaaagggcgatgaaatgtcgggtgcaggccggacgcaggcgctgcaggctccttatgaggctccacatgggcgagacctgtgcgcaccgctcgtgtgtttgcgtatcctctgctctgtggtgtacagatactgttgaaaacatcagaaaggcctgcaggttacttgtatgggggtgtacagatactgttgaaaatgtcagaaaggcctgcaggttacttgtatgggtaacagtggtcagaaaaggggcaagcattcacgtttgcatgtcgcacagaaagtcagactgctggggggagctgggcagcagtgtaagagcacggtgctggagtgagtgccagagatgacctaagaaacaggaggaatggttgacgttctgtgctggaaacgatgaccagaaaaaccctgcacaaagctacacgtgaaatttctatcacgtattgaaagagtggatctgtcagcatcgcagtggacacaagccacttaacagtgccaatcacaagacaagcaaagctctgtgtaaaggccctgatcgcattcatgaagctctgtccttgggactcatcatctacgaaaggccacacctcctaacacygtgctcttgggagtgaggatttcagcaggaattctggggaacagaagcrttggggcgtcgcatctccctgtggccttcctccctgtggccttcctccgcctgccagctgccccctcaccctgctgtccacctcacggacccctcttcgccccatatgggccactttggcccccaccaccccttcctggatgtgcagaccctatgcggtgccacctgatgcttcaagactgaattttccagaggggcagggaaaggtgtttgcttttttttttttttttttttttttttttttttttttaattttttagagccagggtcactctgttgctcacgctggagtgagtgccatggtgtagtcgcggctcactgcagtcttggcctcctggactaaagcgatccttccacctcagcctcccaagtcactgtggcactatgggtgcatgctaccgtgcccggctaattttttttatcttttgaagagatgggatctcactatgttgcccaggctggtcacgaactcctgggctcacgtgatctactcacctcggcctcctgaagggctgggattacaggtgtgagccactgtgcctggccaggtgtttgctcttaaaaagtcayttctctctttctgtgtgtatttgtgttttgaggtaaaatttcacataacataaaaataaccattaactttaaagtgaaaaactcagagcatttagtacatacccaatgttgcacagctattacttctgtctacttttaacacatttttgtcaccgaaaaaatactctggtgtccattcacatagtcatgacacatcacgacacatgactgtattcccaacccctggcacctgccaggctgttttctgcctctacgtttacttattctgagaattttatacacatggagtctgcaatgcgtgaccctttgtgcctggttcatctgtattgtagcatgtgtcaggccttcatttgtttttatggctgaataatattgctttgtatgggtagactccccccccactttttttttttttttttttttttttgtagagacagggtctcaccatctagcccaggttggtcttgaactcctggcctcaaatgatcctctcatcttggcctcccaaagtattgtgattacaggcatgagcctgaatctgaaaaagcaaaattcatatagtaagacaaagacacccaaacatgtcagtgaagtaaatggactaaactcaccagcttaaaatcatatggtagaattttactcaacatacatctaaaatgcaagaatataaaaagattaaaaggaaagacagaaaagaatatgctgagaaaacactaaccaaaagaaagctggggccagtaacagtggcttaatgcctgtaatcacaatactttgggaggccaagatgagaggatcatttgaggcgaggagttcaagaccaacctgggctagatggtgagaccctgtctctacaaagaaaaaaagaaaaaaaacagacgccccaatgcttgcgttccccaaaattcctgctgaaatcctgactcccaagggcacagtgttaggtgtggcctttcgtagatgatgagtcacagggacagagcttgatgaatgctatcagggcccttacacagttgacggacacttaagttttcccaccttttggcccttgtgaagaatgcttctgtgaacgtttgcgtacaagtgtctgtttgaatccctgtcttccccttttttgggtgcgcatccagggcgggatcgctggaccgcgtgcggaccctcgctgcgcatccagggcgggatcgctggaccgcgtgcggaccctcgctgcgcatccagggcgggatcgctggaccgcgtgcggaccctcggtgcgcatccagggcgggatcgctggaccgcgtgcggaccctcgctgcgcatccagggcgggatcgctggaccgcgtgcggaccctcggtgcgcatccagggcgggatcgctggaccgcgtgcggaccctcggtgcgcatccagggcgggatcgctggaccgcgtgcggaccctcggtgtgttactgaggcgtccccaagctgtttccacagacgctgtgctgccctgcattcccaccagcaaggcgcagagcttctggtttctccatgtcctcaccaacacctgtgttgttcttttttaaaaaattataatcagcctcgtaggtgtgagggggtatcttgtgattttgatttgaatttttcttaatgacgaatgacactgagcatcttttcatgtgctccttggttgtttgtgtatttctctggataaatgtctagtcaagtcctttgaccatttttaaattggattgtttgtccttttgttgttgagttgtaaagctgtttgtatcttctggatattaaactcttatcagatatatcatttgcaagtattttctcccattctgttggttgtctttttttttcttttgataatgtctttgtattgtgtcgtgtttaatgtaaacatttcaccattgttttaattccctcttttcagttcttttctgtgtgtgtgcagtttttgggtgtgtgtgatgtgtacatacacacatgcacatatacaggtgtctaaaaagtattttgtttttttgttttaaatatttgacacttttaaattggagttgagattctgtatggagtaacgtattgttgaatgacaggaaagtatgaagcttgtcggagtgttattacttggcatagccacaggagccatacaaatgatacaaccttgctgcttgtgtctcatggtttttttttttttttaatttaatttaatttttttttcattttttttttaaattatactttaagttttagggtacatgtgcacattgtgcaggttagttacatatgtatacatgtgccatgctgctgcactgcacccactaactcgtcatctagcattattttaatttgttttagtttttttttgaaaaagggtcttgctgtgtcactcaggcaggagtacagtggtatgatcacagctcaccgcagccttgacctcccaggctcaagcgatcctcctgcttcagcctcccaagtagctggtgctacaggggcacaccatcatacctggctaacttttgtatttttttgtagagatgggatctccctatgttgtccaggctggtctcgaactcctgggctcaagtgatcctcccgcctcagcctccctaaatgctgggattacgaacatgagccactgtgcccagccagcctttgttgtttttgaaagttgaaattcatgtttttggatcaaagctaagctgtgacatataaacatgaagtgatctagttaggtttggttatacaccatgtgcagaaagcaacctcttcatgaatcttttaatgaacatctttctacctggaagaaaccctttacctactaaacttactttcacaccttcctaattttgttgtcttccgtgtttttgctagctccaggcctattcggcatttaaaataaaatgcaggttggccagtctggctgggcagttctacaggtactacggctggaggatcccagttgacttgaaattcaggttttgcttgtgaaagtagctggctggggcttctgttgatgacagtgctgtgtggacggcctggttcgctgggtgtgcctcacagacacaggacactttttagggttgcttttgaatgtgcctgaggtgaggttcctgtgttttccttgtacttaccttcatattttctgaccctcctgtggatggaaaatcgactgagtgtgtgaagggcctgtcggtgtgaacgggccctgctcagccggtccatggctgtcttaggatcccgcttggtggcgaggagggtgcggctcgtgggtggctgcctggggctaccccgtgtagacttgctgggactttgtctagacaagagaactgctgtcagtggcgcttcctgcggggggatgagtgcggctctcagcgcctctgtggggctgggggtcttgggccgtgaggccggggccaggctgcgtggcaaccctgagtcccaccctcattgtctttgctcggggccccgagaggccatggggagcctgccggctctgtgtcctccccgcactggcttttagggaaagagagtctcgtgggtcatccggcctgccggctctgtgtcctccctacactgacacactggctttcagggaaggggagtcttgtgggtcgtctggcctgccggctctgtgtcctccccgcactggctttcagggaaagagagtctcgtgggtcgtctggcctgccggctctgtgtcctccctacactgacacactggctttcagagaaagggagtctcgtgggtcrtctggcctgccggctctgtgtcctccctacactgacacactggctttcagggaaagggagtcttgtgggtcgtctggcctgccggctctgtgtcctccccgcactggctttcagggaaagagagtctcgtgggtcgtctggcctgccagctctgtgtcctccctacactcacacactggctttcagggagattgggccttgtgtgtcctgttgggtgagcagacacacaagctgtgacttcagggctacggaagttgctctgtggtttccggcactgcagactccaagtgtgagccctgtagtgaggacaaagagtggaggttggagttcagaattgtggacaggctcctgaggaccagcagaggctggaggccagggcttgcccgccgggagtgtggctgtggaaagattccagtccacagtgggggctgctgcccagactcaccctgaataaagtgtcttcagagccacctgtcctgcctgttcatggcagtgacccagaaagattcatcagtgggcggtgagttgggaacagaaagaaaacccttgagataactgggttggagacagggagcaggcttgtcattgtgcactggtgacatggcctttggcctccccagccgtctggcctgggcctcgtggtcctgctcttgggcttcatgtgtccttgggtgtcagctccagcatggcgtcctctgggccctgctgcttctgaagtgcctgtgccagggacactgtcttggggccagtggaggtctgagtatgggggctgggagtcctaggcagtgagtcatggcagaactggcccctgacttcctggttaagcctttaattctcccgaatgcctgtttttgcttctttcaagttgttgtgcttgagccactctgtcattagctgtgggcgttccgagtgccagcgcacagtgttgagcagagcgggtaggagcgccctggcttcagggagggcccccgccccctgcatggcggtcacrctgcgctgagcgtcccctcccctctggtggcctttcgcagtggtggaggggcaggaactgactggctcttttccctgtggtggctgctcgggtggcagtgagcggacagcgagggggacagacacaggtggaaggaaccacggtgggtttcattaacaatgacagtggctcaggagatcctgaggctgattaatttgcaaacagcaattacttgggattgcttgaaaagaaagttctagcttagaacaggaacctgaggagggctggccacactggaatccagtgcccactgtgacagtggagagccagcagacgccactggctttgatggatgatggagagggtcctggtgtcttctgccatttgtggggggtccttgtgtgctgtgtttgcaggcaccatgggtctccctggacggggttcggttccaccccagcgcccttgtcttgtttcatcgcccgtgtccgggctgtgtaagaagcatgtccatttgtcccgagcggagggtctctgccccgcccctgagggaggccaggaggcccttgttggatgctctggcgggcggcactgggacacggccattgcacccggccctggacacagggcggccaccgcatccggccctggacacagggtggccagggacttggcggggggagctcttcagaatctgtcacatgcacgtgaatgctttatggctttggtattcttctgtttaattttagtaaaaccgcgrcccgttgcaagaagagtgtgggcgttggcagctttgtcccaggtgctgcagggttggggtggtccctgtcaccgcctgctgctggtgggggtcagctgcacggatgcacggcctcgcaccagcggcagccccagaggccatgcatagggcaggccccggtggtcagggacccacccagtcctgccaggcgttgggcttgggatgtgcggccggctgggggcacacattcatgccgcaggtccccgtgagtctgggccgtgtgcctggcgagccctgaattccacctcacgtcagccgctgctggttcacgtcagctgctggtgttgagtgttcgcatgatgcttttctttcttgggggatggatcagtggatggagaaataaagctgtgagggcataaaatcaatgtttgtttatattgataatcatcccttaaactcagatccaggggcgtcaagagacctgagcccggccccggtgtgccgcgcactggccatgtgtccggagagggctgtgattgcggctgtcagccctgtccattggagctgcagcttggtaaatgcacagatggattttgagaaggtttccctctaaagatgtgggagtctttgcacctcgccaagctgtgctggtgtggccgtggcacataccgggctttttacgtctcttctagggagtgagtcggtgggcataggatggctaaggtatgggaattttaatagggaattttctagtaaatggttctgttagtattacagcttattttagaaagtaaggtgctttcatagagaatgtttaaaattattaagaggtagacaattcttttaaaaacctgaaggtcttttttttttttcttttttttgagacagagtctcgctgtcgcccaggctggagtgctggagtgcagtggcgcgatctcggctcactgcaacctccgcctcccaggttcacgccattctcctgcctcagcctcctgagtagctgggactacaggcgcccgccaccttgcccggctaattttttgtatttttagtagagacggggtttcaccgtgttarccaggatggtcttgatctcctgacctcrtgatctgcccgcctcagcctcccaaagtgctgggattacaggcgtgagccactgcgcccggccaaaacctgaaggtcttatattgtggtgtgagtttatatttatttccatcattttatatttgtcagatttttatgcaggggggctgcataatgtctccctggagagcctcagcctctgtggaagagttgggtcaggagaagcctctcggcggaggaagccggrgggagaagcctctcggtggaggaaccttcacccagagaccagcctgggggtccttggcccagacgggggaggtgggaacatggccttgggttctttcctccttgcagtttgggtgaataatgtgtgatgaggcctaagaggagatttataaagagtataatctctcagtcttagagaaaagtgtttcaaagtatgggttctcagtgtctgtattgaaaaaataaaaaattcagtgaatgggtaggttatttttcgatctgagggttatttctaagcacatgatttatctttagcacgggagggtgatgccccgccatgtctttttagcttagggactgtcttctgccgtgagttggcctctctgcctgtgcacgtgtgttgccggccccggctcagctgtggcagaagtcagtcacctgtggagttatggaagtccaggcggccaccccaggccggggcctcattccgttargtagggccaggtgtctgtcctctcacgcgtccgaggtggctgccggcgtgcgggtgtgactgtcgatgagagctctgagctgggatatctggtgacggctgcccctgcttggtcttgcggtgtggctggggagaggattactgggtggaatgtagccgtccgccttttgtgttgacctcttgacctcccttttgggaggcttattaatgtcaaaaagtgaagatatgaggatgggatcgtaatttctttgtgttgctttccagtagcccagggaccaagctgtgggaaccaggcctccatgtgctggccccaccgtcctcgtggtgcctgtgtctgtccaggcttagtcctcagatcagctgcttcaccacattggctgcaggctgggtggcagatgcccccaggaggaggagaagcatttcttcccagggctttggcctgtgctgtgtgcctggaacctttaggtgctgtggcttcgcagacccggacgcagcgtggaggccaagcggtgtctgtacaggacccttcagtgatgagggtggccaggctccagccaggtcctagggaaagctctccgagagcgacggcttaagcagttctgaaaaattgcaaatgatctgtgttcttggagaaagaatgggagagaagcactcactcacaataatgttgcacctactgtgtgcgggtagggtgcaggcagtgtggtccagtgtgagcggggagggtgctggttgaggggttagtgctcgggacgcagcctttggacccagtgccctcccaaaactctgctcatcagtgcccctgagctcagcattgacccctggaggaactgggcgccttccctggtctcagactgtaagcctcctcgggaagcagcagttggctcctgatgcagctggcctcagatcctgttgggagagcaggattggtgaggaacctggagaggagtaggaggtgctgcctgatagcagaggtgggtgatgggggcagagagggtagcaggggcccagttcagtcctgtctggttttcacgtggagctttttatagagttgtgcttctcaagcctttcaaatgcctcacagcggcagtccgacgtgcagtcagtgacagctgagtagattaccaccctcaggactaaatgcaaaatcatcttcactgggtgcagcatttacagttttggtgctggaacctcctaaccagtgttcttaggggctgtcttaccagtgaagggagctgcctgctgttgacgctccacaggaggtttgcggcatggctgccatctgtgttgtggcctgggactttcttagagagtgggtaaaagatgagtcatctcttgtgtgatttatcrgcttcacttgtgcttccagggctctttgaagcgtctcactttttaatttcatgaagaaacaaatgtagtgcagagaacagaaagctgctgtgtgacctgcgggtgcccagcctgtggggcttcctcatcgcccccatccaggcagatcgagtgccggctctctgtgctctccaggaggtggcctttcacagcagggacgttctgtgctcttattttaacaactgtaagaatctgagcttggtgacagttgggtgacccgggctctgtgtcttcrtgttggccagggtgtgtcatacacctggcctggcctgcgtgcctcacgtgtggtggggatttgtgactgtccccagcaccttgacagagggtccttgactctgcgaccctgcacagtgggtggtggcaggtgggatcttggttcacaggcacaggtggggagagttgctgggccagcgtggctgggtgactttcctgtggaaagagcgggcttggggcttggtgcgtgatcccaccgaggccggggttgtgcttggggcactgggggagagcagagcaggtgatgcatatccgggcgcccaccctagcagcacaggaagggctgggatcaccactccccggggcaccgtggggacagcgggggcctgctcactcccyggggcaccgtggggacagcgggggcctgcttgtgttgggggtggggctccttgcccccyaagggcaggccgagcaccaagtctgtgcttgccccgctgtgcagcgttgcaggtgcagcagacatgaggccagctgctgctccctgcaggcagctgagggcctctgggaaggcttctctacaacgtcctgtgggaactggaaacccagatgtcagtggaaccaggtgttctgtccatcactgcctcttacctcctagcaaattcaacactggcgtttttttttctgagcaagttgagctgcatttttgggacaggagccatggctgtgtgtgctggtgctgaagggagggtctgcagggacggccacacggatggctgtgtgtgctggtgctgaagggagggtctgcagggacggccacgcggctctcgggagcygtttcctgcgctcgggctctgcaccggcaggctccacgctgagggtccctccacatccaccccatcgtgggagggaggctcagtgctctgcaggggcctgagcagtcggggagacaccccctgcccacagccaccctctctgggctatgtgggaggtgcccacgtttccacgccttcctcgtggagggtgtggcgggctgtctgtgccgcgggggtactcggctgcactgtgcacagccctcaccgcccagtgccgaaatgggaaggcctgacagggcgatgcggtctgcaccagctacatctgcagaagtccagcacgatgcagtttatgcctggcagtgatgtttgtttttaaaattagtaaaacctcattagttatcagaaggcgtaactatatgatgattttttgtggagggattatttctaccttttgtgcagagaatgcctggatcccttctgccccttggggtcacatattgcagtggggactgtggtgctctgagggttaagttgtttctgtcacctggaggctgctttttcctcaggcaattggcgttcaacaaatgacaggctgtctagagagaagggtttttcaattacatggctggacctgggttgccaaaaggaagcctcctggggtgtgttctatacgcgacatgcatttgctgtgtgtaattggaaccatgagaaaggtttttgttcagagctattggatagtttccttattttaaacctgttgaatctggaaagagttgtttttgaaatttttttctgataataacgttatataaaagtttatggcagaggagtttctgttccacacgcccctccccgagctttgtggtcgcccaggtgcctggctgtcaaggctggcctgtcccttgtgttcagggtcccgagatgtcagagctggcagcccaagtcctcccctttatcccgagcaggagaagcagtcctcactccatttttcaccccagggtatagcagcacctaccaccctgggatgaatcagagccaagaggcttggtttttctgttcttgttaaggaaattgatcatctcacaccctctcaagctgttttactttgtgcaaatcagattcctttctagggacctgcgaggagaaacatcctcagcttctaggactcccggggatgccgtcagcagccaggccttggcagctgccgcttcacctgtgctggcgtgtggggccctgacgtctcttgcgggtgtcatggagcaggattggaggtttctgagcagcaggagggcaggagaaaggccccaggactttgcgctgtggcctgkcctggaaggaggctggctgggcccttctggatgcctgtagcagcactgccacctgggcagaggccccagaggccccagaggccgaggcaggctttgttctctgctgctgggactcagccctgcgggagcacagggaggacagckggaagcccagcccctctgtggctctgtccacagctggggacagcagtccagtgtgcacgggccacccacagccctctcaggaactggcctcttctctttaagacagaggagtgcgccaggtgggcctctggctggacctcctaggccatcagttttcccagcaggaagtgctgatcagactgaaggaaggcctgcgtgtgtgtgttggcccagatgcctgttagtggacgctgtgtctgcacagctgtctctgggtggctgattcatcccagcagctgactacgatggtgctaaagagaaccatcttacacggacttggggacagaaacctgggctcccctaccgaggtcaggtcctgggggtgtggtgggatcagctcccccagcacctccgtggcctggggtggggggtctgtgtcctcccttgggggcttctcacagggctgccaagcagtgtccaggtgcatgcgttgggcgtgcaggaggcctgaggccattgtccatgctggccactgccactcgcggttgtctgttgggagtcggtctgtccagtrgatgaataaattgggactcagcggtttgcacccagatgcccgaggctrtggagttgccgggtggtcgtgcctggggctgcctggagtggtgttgcagtgactgtccctggggatctggcctggcagggatgccacatttgggcagcgctttcctcttgaaggtgccacagcctgttagttttgatgtgttggccacgaacaggctgccctgttagcacagaaagtgaacgtgagcagtrcgagaaggctcagagtggactttccggggcaaacaactgagggccttttgggcrtcacagatttggtttagttcggatcgaggtaatcatcttgaacccgcttattagagtcagtggctttttctgtctcacagccgccttcttgtttggtttcgcgtctcacatgcattctgtgatcctcactgactttttagaaggaaaatgtttgacatttacaagaagtgagagatactcttgcaaatcatccagcagtttctggtttgcagattgatggcagccctggcctttaccctcagtgcctcctgccggtgatggtgctgccggctctgacctgtgtgaggagggccttggagagcacaggtcccccagggggaggactccgggaggtgctttgcgggagggagtcatggccgagagagggaacgcagagctgccgtgtgtggccgtgcagggccttccacagtgagttgtggggtcctgggggtgagagctgrtggtggtctgaccatggtgggaggtggtccggtcctgtagaggcgtggctgccgcagttggggcgggctctgggaatggcgcggtgtctggatgtggaggagtgaggaggagccggccctgagctgcacccaaggagagggctggccatggcgggggcaccacaccggaggacagctcttctgtgggcactgggcttgaagaagctgcagcgcatccaggtggggtgtcctgaggaaaggtggcttggagaggggtgggcccctgcctggagccctggcaggctggggagaccttggtgtctggcagggaccccggaatgtcctgctgctcccccgggcctctgtgtgcagcgccctgcgtcgtggctgggctgagaggaggcagtttccctagcccctcactctggcgaatttcacattcttgataccacggtatctttgaactttctattttgaggaaagttcatttttatgtagttttagtaagtgtataaacgtaataatcttattaaaagtaatcaccatatgtatataaaatacactgtgcagaaacatccatttttattgctgtttatagagaataaaagatccttagatgcaaaaagtcagaggggaaatttgcatataatattcgtagtcctacagttgttgcttatggtgttttgcctaagaccatttctaggtgcatttttctgggagataatgtatctgatgacagttgcatgtgcagataaccggcctctcatgtatccatcccgggagtgccttttctcagactgtgtgtagtgttagtgaacttgattggtgggtgtgaagtgtacagacggcgtgtgcgtggagcgggtcgtgtgcagagccccgaacgagaccctggcgtgtgcgtggagcgggtcgtgtgcagagccccgaacgagaccctggcgtgtgcgtggagcgggtcgtgtgcagagccctgaatgaggccttggtgtgtgggtgcttcagcgtgagggccacctggggaggagtgcttatctggggaggctgagctgggttggaggcttgggtgctccccctggctccgtgggtctccattgctggcttcatagctgtgttccgttttctttgttcagcagttgatctcaagtatttattccaaagcacttgaaatacatgaacctaataaatcgaacaaatacagtaaaactttagcttcttggaacatccccatatacttacaccacgtcctaaaatcctctcatgtctatgtaaaaaatcgggtagcctgggtaacgtgggatgccatctctacaaaaaatttaaaaagtagctgggtgtgatggtggcatgcttgtagtctcagctacttaggaggctgaggagggaggatcgcttgagcctgggaggtggaaggtgcagtgagccaagattgtggcactgcactccagcctgggagacagagccagaccctgtctcaaaaaaataagaaataaatgaaatcacacttgtgtgatgtcagattacccattaacccacttttgaatggagctggaaggataatccacacctacctcggatttctctgcgtggctgttttgcataggagccctgcatgggttattcttgaagtcagcactgtaggagccgtggccggctttgcattttcatcctggttcaccccagacctgctctgggcagagccaggcatcccctgggacgctctgcctttgcgtgtccacgacagtacaattccaggcactgcctggcatctgcgtctctccctcccctgaaccaggggcgcctctccctcccctgaaccaggggctcctcttcctccctgcctggcaggagctgcgtttccttgagtctcctcagactcggcagacccctgggtggtatcatgtgctattctgaaggagcttttgcttcatggcacttgaaaaaaatcctttcactggatctgagttggtgagcatgcatcttyctttcgtaggtttgttttctgaccaggccgtgggtctaacaggagccccgagcctctgggtgggctccgtgtcgcttgcgtgcctcactcatctggcaccgtgaccgcgctccggccctgagccccacttctctgaagcctcacgtgttgcccrtgtggtctgctcctcaccgtcttttctcttgtccttgcccagttgtcgccgtgatcctgaaggcgctgacctacgacgagaagcggggtgcctgcagcgtgggcaccaacgtcagggacgccgcctgctacgtgtgctgggccttygcgcgtgcctatgagcctcaggagctgaagccctttgtgactgcaatctcgaggtaggcccattcgtygaggtrcatyggatrcgccgtgccccctgacrgcgccrtgtgtcgtytcctccrtgagaggtgtgcacagcagatgctcgtgaaaaggtgaaattacttggccrgaggatctgtgacaaagccaccgcttggaggtcaagctccttttctgtgggtgagcaaccagagcagaagtgtgtggaggaacattctggaggtcttggccaccctgcaggcagtggattcttgggcgcaggtgatcgacaaccagagcagaagtgtgtggaggaacattccggaggtcttggtcaccctgcaggcagcagattcttgggcgcaggtgatcggcacgctgggtggcgtgggaggaagcaagtggggcacgggaatcgcctgtgcgtgctccctgcggtcgtgggtcttggcgagaggcgaattctgtctctatctcctttcaagttcctctggaatacagcaggcatgttggacatggcagtcttcagatggtgtttgtttttgttgaggagctggattttgtgtttttgtggaccagcacttgagagaatgttcagtagcaatagccttcgctggcatgcctgatgtcagctcctctgagatgtaagtgaacacttcagaacctctgggaggtagggagacactttttccctctggcttcctgatgagaaaactgaagccagcaggtttcatgggatcaccagaaccccagaagctgtgcggcctgtggcgggcggggctcctgcctcggtgtccagtgcgcgcacccagctgagccccgtagtggtgtcctgtgccagggactttcaggatctgatactttttgcttaggaaacatgcaaaacatgtgtccccagcgcaggaaacgattcaattcaattcaaccgtgtgcgctggttttgtacactgcttttggactgaaatgagttcttttgtgctgaagaaggcaggtgcttcctttcttgttgtgcatgaaggagctggaggcgggacaccgaggaaggcgactcagtgtcactgtccgtcatgggtgtgtgagcccacggctgaatcatcacaaggtttcacacccgcacttcacctgacaacttttactaggaaaatgaactagggaaactgacttcagaattatgcccaagtcttagaagctcctcctgcagctgttcaggagccgagcgtcccctgctcactacaagacgcctgaaggggtcatgggatgcagcgtctgaagcttccacctggaagtgcactgctccttttggtctgggcggggcggggcgccggtggcagatgcccctggtggcaggctcaggctactgtgctgggtcccctctgccccgcacgccccgcgagcaccagcagggcctccccggcatgtggcggggccagcgttggcctggggcccgcttggctttgatctcgtggggcttcgtcttttggaygtcctgggtgcgcctccactgtggctcctgggttccctcacgcacccgggtgtaagcgccactgcctgtgtccgacaagcagctcgttgtgaggcacacgctggtaagcagctcgttgtgaggcacacgctggtgtaggctccgaagggtctcggtgacaggcgcttttctcttgttcctgcccactgctgttccatcttaccaaatactcagtagcgtccggagagggacctcaacccggttacttccctgggtgtgcagcacgtggccagygtctcatagtctagattcttgcatcagagcgaagcctgagaggagccgagggtcctcctcctatccagggagaccgtgtgtttcccgaggcagctgtgaacacgcacgtccctcttgtcctgctcctcttcggaggagaacagcgcggctggagggtgctggtgctggccaacgtgttatggagagtgtggcttacctgaggccagggaggtctggggtggctgagagcggctgtggcctctgtctgctgctctccccagtggccactctggcagcgctgctggrcaggggcttggctgctggtggtcttcagggagcagtgccttgcagagtggagcagagaagacggagaggtccggctttaggcccctgccgagctcctgaggccctgccgcgtgcctgtgccagcctgcagcgctgctgtctgtgtgcgggagctcttgtgtgtgatcagcctcaggaaaggctcttcctgttacttccttgtgctgctcctgcacttctaggaagttgatcctgtaactaggaagtgaaagcaaaaaaatgtatctttcttattgttgataggaatagtcacagaacgagaaaacttccttacgttgatatctcattcagtttccttagcaaccctgagaggtgggcaggggccaccgtcattctggtttcactgaggaagtcaggacagcactgaagacacctgtccagcaccttgtgctgacggcttcccagccaggcccatcacctggtggccgaaggcttctgagccaggcccatcacctggtggccgacggcttctgagccaggcccggcacctcgtggccgacggcttctgagccaggcccggcacctcgtggccgacggcttctgagccaggcccggcacctcgtggccgacggcttctgagccaggcccgtctgggcagcagctcccaggccctggcccggggctcagcgctgcctcgtggctgagaagctcctcaccacctgctgtgaggccgtggaaagaccctgaatgcagacgtgtgacggctgcagctgcatctggcccctcagatggtggttcccctttcatggtgaaaatcctcacggatttccttttcagcctcatattttgtctaagagctgtcaacatcactgaaacctgggcctgcccttcatcctggggaggactccctggtccagtgtcacaggaggagtcgggccagggttgagggctggcacaggacatgggggtgagacgaaacctccactcacctgggagggtgtctaggtgggcacggaacccagggtcgtgtatgggccatcactcatgggttctctgttttgggggaaagctgatcccacyggaggktgactgtaatgagagtctccagatcaggtgccgactttggagaaatgcaggtgcaactgtccgaacaaatcaagtccccgctactggacggggctggcagctcagctggggccggagagaaaagtcacgagcaagaaagttcttacctaaggtcctggacaggcagatacataacttctgcctttggcaacgttagatgtcatcgttccagagtaaaatacctataaaaacctgccgatgcgcggggagcctggccttggtctgggtgtggagggctgggggccggccggtcggtaggtcctggtgcaggcgggccccgtgcttcatggaggttggcgccgctcggtggcctgctcgcttattcttaggcctgattcacagaggctggggccactcagtgatctgttcgcacgttctcaggcatgaaccttcagggctggactcctgttcttttgtgcagtttccacaggggaccctcttgctccagggtcatctttctcactttgaagccccttgagccgcccctgcacagcctcctgttggccccgtgagggtcctgactggggctcctcttttggagcagctgccacgtgtggaccggcacgggcatggtcgtggtctgcccagctgggtgtggggttgagcccatcatgctgtggggtgctccctgggggttgtgtgtgtgtgggtcccacggtgggaggtggggttggggtgagtgtgacttctgtctggggcatgttgggtgggcgtgcaagggggtcctgggactcctgagtttctcaggcctgaaggactgtaggacgcactgtgggctgcaggcttgaagaaggatgtgagtttctggagtagcctggactgcacagccagggcctccccggcatgtggcggggccagcgttggcctgggtcccacttggctttgatctcgtggggctttggtttttggaggtcctgggtgcgtctccaccatggctcccgggttcccttgcgcacaccgagccagcagctgctggggcctcagggctcgcagctcacaggcttctgacgcctcagcctggagctggcgttgtgcccctcgcccctttacctgtgccatcccggccgcagacccaagggtgcccttggagccgtgccygccggcctgggtgtcaggcttgtccaacgggttcttagagaacctgggccccatccctccttggcccacgcagactccaggcatccggccgggcgggctgtgagtcaggctgcaccaggtgagcgtgtgggatgctgctggtgcgagcctccctgcccaggagccctgcgcacccgggtatcggttggggtgtgcccttccagatctccctcccttggtttgtcataggtgaccacattttaattaccagcttttatgcccgtcaatttgggaacgtgatacaatcttgatttctctaactttcacaagttcttcggtgggtcctgtaacagtgggtgcttgggatcagagcatcagagtggaattttcgcagggaaatggaaatgcctgatcgagctgggcggtggcagcagccgctcctcactcttcaggtgcctggctcttctgagagtcagttcgggggtttagtggctcactttttctaattggttcctagctttttgctaaagaaacttggattaactgttcttttgcctcatggtgtgaatttatactgttcctgttttataaataccagaaggagcttcgtaggtaacttttaccatgtgttgaaggtagcattggttttgaaaacctgatttcctcagtgtcgcacacgggtagcttaagaggtgggataattgttggagtagtgaatggatttccctgagaagccaagtgcaatttaggggcagtgacagtgcgaagttaaagtgggacagagtggttatgtgttatctgcaaaatccctcctaaccagtaatcacagtctaatttgcaagaaggaaaagaaagccgagccctacgctgctgctgctgccattgtgcgtccagtgatttcctcacctgaaactcttttgtaagcagctcgtgttgacatcagctccgcccaggcagccacggggccctcccctgccagggggcagcctctgactttcggcctccacctcgagcaaacctgctgagcggcgcggcccagggaggatccgccgaggcctgcagatccgagatctcttcctcgggggcaggattgtcctggaaaatcaggaaatggcaggcattgctcagagctacgtcttgttctccctcaccggtgttgctcagtggcacagcttccaggggaagacaacacgtgtttttcaagaaaagttaagtggccattaccgagcagagtcctaaccctgtgaaacccggcaaatcctgcctccacgtcagctcaggtgtgactcgaaagcacttaaaaaattctcgtgttttaccactgtgttgattagtgtgagctttggttcttgggggttaggaaaattcagccataggcaggtccgatatgatttgcaactttcaaaaaacaggatggctaaataacaaattactagtctgatattttttaaatgtctgactttcaaatgacacagaattattgtttcttaaggtaaaaacagtgtatttggctttttattgctataaaatattatataaataagaaaacttgagctggggtgaggtctgcactttgctgtacctgccgaaaatgaggtgcctggagcttgggacaagtcgaggcgtgcacttccccttgactcggacaggaaagagaatccctttctgtttgacacagaccatttctctgtgttgggaaatcctggtgaagtatcacataaacttctccagcgaaagcaaacgggcgaggacacctagggcacgtttcagcgcagacaggccggcccttctcgcggcctygcagtgtctctctccaggttcccggggatggtagatgaacgtggtgactcactcagggtgttcctgcgaagggaaactgagaggcccacgtgggacgttgggtgtcctgttggagtagtcctttaggaaggagcttttatatttatatttaactagcatcattaaacctgtttgtatttatttctcgatgagccagttttrttctgagaatgagaaaatagagccgttttaataaatgtccaaatcaggacagtgttaaatttgttgtaagtccatatatagttgattggtcgaattaacttgggagtctgtgtttagttaaaaacagcgtttctcaggcgttgctgtattttctgtgaggttcagtaaaatatacacgcaacagcaaccattttgacttctcatggcaggagccagcttcgttgaagtgggccaggctgaagtgaggccagctttgcctgctgcagccctgtggtctgtgtccaaattgctgagtactgccgggagagggagccgggagtgcctgcgtctcctgctgtcagccggtctgactgcctgagcggagctgttgaagtggactgaacaacagtaaccttagagggttagacttggtgaggatggtagatgattttaagtttcttctcttttttccattctttcttcattaatcaatgttccacactttaaatatagtaatttaaacaaataacacatttcaagaattcagtgtaacatgtgacctttcagtagtattggctggagccggcggcaataaagatagaagcctgtgttcctcttgtggcaaatgttaaaggaaaccagaaattcttgattcatatttttccctagaacacgtggctttacrggtttcaaaaaatgaaactcttgttcatatggtaaatatgacacacatttctatgcattctgaaaagatttagaataaactgccatttgttgttaaaaatagcagttatataactttttttttttcttgagacggagtcttcctctgtcgcccaggctggagtgcagtggtgcgatcttggctcactgcaatctccrcctcctgggttcaagcaattcttctgcctgcctagtagctgggattacaggtgcgcatcaccacccccgattaagttttttgtatttttagtagagacagggtttcactgtgttggccaggctgttctcgaactcctgatctcgtgatccacccaccttggcctcccaaagtgctgggattacaggcgtgagccactgcgcccggctgtagttatataacttttagttattagaagatcacattcatatgtcttgatcagtttaatgatttctaagatatcattaacaaaagccattatgatgtattgaaataggattgatcttaaaacgttcgtgctaatgtaacgtgagttccctttaattttaaaccagtatttttctcttcttatttaggctatagtttgttataaagagtatagagaggaaaatggagtgcttttctgttcatagagtttttctgaaattaaagtcaaaattttcagtttcaagtagtgaaagcagtgttaacagaaagtttcccagatactaatcctgggtcttttaagatctttagataattagttgctttccaaaatagcttttaattctgaactcattttagacttaaagaagaattgcaaaaccagtggagttcttctagaccctccacagcattctccgatgtgaacatctcacatttggaagccaggargtgcagtgtgggataaaggccactaacaggctggtctgcccgggaccccgcatggcatctggtggtcctgtgccctcagcctcctctgctctgtgagctcctcagtctttatctttcttgatcttggggcacttaaaaaataggttttattgagatgaattcacttgccataaaattcacccctttagggtccacagttcagtggtttttagtgtattctcagacttgaggagacctcaccccagacagaagccatgtgcaccaggtcccgtcacccgctccaagcctggcactgccagcctgctttccgcccctgtggatttgaccctgagacctccagagacgactggccagatgttctgtaggacgcccctctctctgatgctttctcgtgtgttactggaaagagtgatgtgaggtgacctgccctcctcygtgtgctgttgggcccatatagtgccccacaacgggtcctgcgtggtctggaccttgatccctggtcaagatggggcctgccaggtgcctccacttgaggagactgtgttttcctctgtaactakcagtgttcttgtggggtactcgaaggttatgcaacatcctgctgtttctcctttggttttcaccccatccgagctctgtccaaagaccttgttgtgtggtctggtggtggttcctgtgtccccaccccgacgttcagtgattgcagcttgttcttaaggaaggctcgttcctctcccagctttatttcatcattcgctcctgccagtgtggactcatgggtgctcatcctgtttgggggttatcatctaacactattgttactagttttgtttgagttataatctaacactaactattgttattaatgttgctcaaattgctccagctttggccacttcaggttggcttctgtgtcctttcagcaagatcctgttcttttttttttttttttttttcttttttcctgagccttttttctttccttctggcaccacaagatgcacctggcttatctttttgcccctgccccagccctagcatccaccacttcccaggagtctcacatcctctcggtggagaacagtatttggaatccaggacgccaggcttggcctcagctgcctctaggtcccctccctctgtagctgagtgtgtgcccctcttcacagtccatgtttgcacagacaccagctctagcccagcttcctcctggcctcccttcgtgtgccgcttctgggcctactgtgtagcacgctctgctgccgtgcgtctgccgtcatgcatctgacgtgattttggagctgccagcccacacctgtgtgagcaacagactcaccactcagggtgggacgctctgtgcatcctcctcaccctgggcatagcgttgccaggccatcgctcgggtgagcccttctggtgctgctggtctgggatgcagacaagtctgccggttccctctgtgctggtccgggatgcagacacgtctgccgcttccctctgtgctgggctccccaggtctgtgattgttgcttcttcaatctgcatgtggttgtgttctacaactcaagcaccaaacaggacagtccgtctcccccaaaaactccccagtctgctccccaaccctgggccaacattggtctgattttggtcctgatagtttaccatttctggagtgtcttataaacggaaataatcagtaggcttttcattctggcttcgttgacttggcacagtgcccttaagactcatcccagtgatctttcctttttttttttggagtggtgtattgttggacggacctggcggtcacaggcctacctgtctccttgggtgtctccagtcctttctggaggctcaggggggctcaagggaagactctgcttccctgcttgagttgcccgcattcctttgctcatgggctcttcatctaccttcacagccagccacgtccacgtctcgcttcatccttcacgtaccctatgcctgtggtcctttcttctgcctcctgtgtctgtccttccttcttccttcctgtatgtatttatctccttacctgtctacttatcagtctgtctagatggggtctcgctgtgttgcccagactgtactcaaattcctgggctcaagggatcctcctgcctctgcctcccacagacagatggagcacaggtgtagccagggccgctggtgtgtaccactgtgttcggcacccgctgggctgcaggagtaatccagggccctctccccatcttagggtcaactgattgccaaccttaattcccctttgtcaggtaaaggaacatgtttgaagtgggacacccttatctttgggagtgggtattattctgctgaagacaagggtggggacagatatgctgtgaccagggtagttgggcttatgactttgttgttgtttacgtggaggaactgaaagacctgggtgtgctgctggatgccccaaggatctggcaggaggaggcatccaggccctcagggcaggtagcgggtgggcctccgtggtgttgggaggtgctgggcccggaggtatcagcaggaactgcagggtccctaccgcaggctccccacacrgtgacacctgtctgtccgtccgtctgtccacaggagcaggaggggctgggcggggaggacgcagggtctgtcggagcatagcagtggcccgtacgtgagggactttgttgttgccgtctccccagggtgcagagcgtggtggtttgtggccatccttgcagtgtgagtgagcaagtggccgaggggtagactttggatggctccaggcggaactcggggaaggaggccgtgtactcccatagctctgggctctgtttgtggctgtggccacacagggcagggcctcagggcagggaggccagtgcttttgggaagggcctcccccagccctcagaagcctcccaccctattccccttgggctccatccttctgttttttttctggctctggttcctggcgtctgtttgcaaggctggctggacactgcaaccacctgggcttgctgctgtggcctggacgctggggtctctctcggcccggtggtgagctgagaagcggccctgtggtagaagagggcctttccacgctgagaccacagattgtccctgcaataagcaaacatttctctaaaatgtgagataaacgctttatccactggtgatccgtggttgttagtaattaaaccaagtaaacggtagctcattcggtcaggccgcttgccgccgatgaggggtgcagagcttctgcagcatcctggggaggtcccggaacgtgggtctgggctgtgctgatgctggagcagccagcggggagagctgccaggccactcctgacagccccgcacccgctctggatggaagcttctcgctcccagccgatacgggcctgctgcctgctgctggggctggaggggcccctctgcttgagccttggggtaccccgtgcctacgtgccctcctggctttgcccatggttggtggccgtgttttgggctgcgttgatgtcgttgtggagcccgctctgggcctcggcacgtctgagcttgattggggtggaaaatgcacctggtggtttgtattatgttgtttctgttttatttaatttcatttgccattcttatttcaaaagatgcttcctatgtttatgctatattgttagtttaacttcctaccctttccatctatgaatttctgtttttattgtggttctcagtgaccacactctaggggtcctttctctctctctctgtctctcccccctctcccctcctcccttcctccctccctccctcctaggcagagcctgtgagacttgcaggcatttccccagaacccaggccctcttggccatctggctgctgccccacccaacctttggcctctcctggggctcctggatggttgggcgtcccaaatccccatcagcagagcacttggtcacaaggcccgagtcacatgccccagcttctccgaggaagtgcagagtccagccgcagggaggactttctcaaccggccctggggccagctgtcctgctcctccttgtttgctgtgggctcacctctgtgggctgctcactcagacccactcgcacccatgggaccttcccacctgtttctcctgcctccttcagtctgtgcccagcaccctgctgtcaagcccattcccccccagcccctgacgttggacatgctggaggagactgtggccctgtggcgtgttctgggccatctccagggcctggagcgggcacctgtgcccagcactggaggctgggggacaagtgctctctctgataaatgcccccgagtttcagttctgtggctgtagtttgtaggtctcctagctcagcatccccgagcccatgccctggggactcatggggccgaggagagaggagcgcagagaacatgaggatacgtgagccccttgcctgagaggtgtgctgtgaacctggagagcaaggccagtgggtctggggtgacagacagtgcgagatgcaggaaaacaggctcgagatgctgtgaatctggagaacaagtgggcctgggtctggggcaacagacagcgtgagacacaggagaacaggcgggatgctgtgaaaccggagagcaaggccagtgggtctgggtctgggtctggggcgacagacagtgcgagacacaggagaacagacgggatgtcatgtgcattgtggctggcagggccggcgcctcacacacacgccccggaagtcaggatgtggtgctgacggtgtccgcgctgccaggctggagcgggtgacggtgcctgcgctgccaggctggagcgggtgacggtgcccgccctaccgggctggagcggagcttgctctctctgcagtgggacctgctcacttttccttagctggatgtatctttcacatttagcttgtttaacagcagagctggtgagaggacgcacacctggcgtcaccattgtcccccgtgcatgtccccggcgtccttcatgttgacgcgggccccgccccacggctcaggtctgtcaacttccctggaacaaggcagagcacttggcccctggaagacctggaaaccaggaacctcggaggcgctggcggccttggaggccgcttatctccgcgtgtctgaaattctgttttccaccttttccctttaggctggtaggaggcgcmwtctctcaagccttccttagaaaggatgattgtcctccaccctgccccaaaccccctgtgttctgtgcaacgcctgatgagagcgttctgggttattcacagtaactgagctgggtgatctcacaagaggacataatgaagcccaaggagcctggtgggggccgggagaggccttgctctgagtgtggctcgcatgggggcagcgccttggcgtctgtgtgtggtgcggtggttttcctgccactctgtggaaggggcctctgccagacgccttgtcttcagggcctcaggtccctctgggcacggtgggtgttcatgtgtttctgcagggttaggctctgtgcatggcgtggtctgcaggacctggacagcccctgccccggggcatttgtgtcggccaccttggtttgcccccctgtccaaacgctgccagttctcgtcctccagggcactccgtttctgtcttttcattcactggacctccccacctcctgcgccgccccaccacagcaggccaggtgcgttctgcccccaggccctgtcctcgtggctctttgatcctgtgccctcggtgtgcaccgtctcgtggctctcrttagaaccagggtcggccacccccagctcccacatggcgtctggtgtcttsggggtcacatgtgtctgtctgcagtccctgggtgcctcaagctgtgtgttgcctgtggggcatgtctgaacctcaagtgggcctgagtcgtgagagaaaggctttctcatcgatactgtgtggtctgtactgttttgcagaatttctttttaattaatcctttctctttttcacagtgcactggtgattgctgcggtgtttgaccgagacataaactgcagaagagcagcctctgtaagttttctcattttgatatttcctttcctgaaggtggggggtgggcctggtctccctgatgctcctctgtgcactgctgcctggccagctcacccatccacagcaggagccgcgagggagctgctgagagtgccagctgcgggcaggccactggttcttactgtctctgrgcgtcttcagcgtgtgaagggcggtcagggttaagcatccccagagctgcagccatcactgctgggggttgatgggtgatggaggcgagtgggaggtgcccgatgacaggtcttggtgcaggcagctgcacgctgaagacgcagaagagagtgggttctgcgagggtggccagaatgtggcggcgggacgggtcactcaccgggtggctttgagcctcgggaggggctgttgcgagcagtggtcagctctgcttcacccgccacactcgcctgggccttgctggatgtgggagctgcctgcaggaccgggtgcgtcttgaacacagatggctggtttcctctagagagagccctgtgacgtttggggtgaattctgggtgtgaggagctgtagcaactgctgctgcgctgagcagactacttcatttggctcagagctgggctggagtgaggcctgtgtctcttgggaccacagagagcggacagttgagacggtggaccagtctcaagataagagtctttatttcagatacagataagacgctgaacacgttttaagagggtaagaacagagaggcagccctttgagaaagatggaggggtgaggttggcttttggtgatggggtgggccccacagttcctcatgggctcgagctgctggaactctgtgtgcaggctcagcatagctggcttagtgggaacctgttgagggagccgttcacactccctgatactgtcagacttgggggccagtggaccaggtggaaggggtgctgggactggtgagggtttcctgtcagccctgcagtgtgtggcccctggtgagtgggaccaggcggaaggggtgctgggaccggtgatggtttcctgtcagccctgcagtgtgtggcccctggtgagtggggccgtgcrggtgcagtgttggttctctctctctctcaaatgcaggagctcagatgataccctgaagtctttctagctcaaaatgtctgtcatcttctatagcttctggtggtctgcctgctctctgtatcctgaagtagttagaagtctttctctgcctcaggtcctttaaaactagagagaattcaccaggagagctcagaagctcttctctgtccctgaagctgctcttattttgtcttcagcatcagtaaaaacctcataattttttggggaaatcatcacatttttgccctgctatttacccaaaggcagtaaatgtaagactttgaaatataatacaattttatgttaaatctgtacttaaattaagcttttagattttctttactgcaacctaagacatttcatgggaagcagtaataaaattaaagtacttaggcttctatgaaccctgaatatgaggtgaaataatataaatcatttttcacattaaaatccctttaaattggcaataaatcttttctgataaataccaccgagtgcacctagcttaccctgtagcttgcaaaattaaaacagccaaargtaaaagacacctttttgaagcttagttggaaatgtgaggattgagggcctcataattgggaatcattttttggagctgctgctttcagataacgatgtctcggtctttctggctcagcttggcttcctgtttgacgctgtgtcactgggtgaggtcacccctgtgaggccctgaggcctcttcagcaccggccaggaggcagcagcaaaaggcgttgaagtcctgtccctccttggggctggacacggtcccttgcccctgaactctagacgccctgcattgccctggtgctcccatgtcaagactggccgcggtcgtccatcccatggtttgtgaccctcccagcaacgctgtgaggaaggtgctgcagctggttctcagcattggcaggagcatggcgactcaggcagtcagtgtgtgagtgagtttgtgaaaacagttccagctgtgttcgttgctgaatgctggtttttctgcatattggaaggaatctagcagacccccaaacgtgctgacattgcaagaagacatgtctcccggcggggaaggaatgggcagtagagatggggtgtggtcgtggcttcttgttcatcatgaggaagggagatggggccccgttcactcacagttaaagtaaaggcacttaaagcctacatttaactgagaagattttaaatctttttcttccagcatttcgtttgatacatagtgtctgacctctatttgtgactttttattttgggataattgacatttatatgcagttttctcccctcccctcccctcccctcccctcccctcccctcccatcccataccctcccctccccgtccatgccctcccctcccctcccactctgtcacccaggctggagtgcagtggtgcgatcttggcttattgcaacctcggcctcccgggttcaagcagttctcctgcctcagcctcccgagtagctgggattacaggcgtgcaccaccatgcccggctactttttgtatttttagtagagacggggtttcaccatgttggccaggatggtctcgaactcctgacctgaagtgatctgcctgcctcggctcccaaagtgctgggattacagacgtgagccactgtgcctggcggagatttacatggagttttaaagactaatgcagggagagcccatgcgtgtttcaccattgcctccatgataaaatctggcaaaaccgcaatggaacatcacagcctagaacattgagccaacccaccagtcttattccttcttccttggttttacctgtactctgtgtgtgtgtgtgtgtgtgtgtgtgtgtgtgtgtgtgcgcgcgcgcgcacgtgcgctcacgcgtttacttctgtgtgattgtatcacatacaaattcacgtatccaccaccacaatcaggatacacagcagccctgtcttcccgagaggcctgtgctactgctttgcccacagtccctgctgtttccctctcctgacccttggcagccaccggtcggctctccgttgcctattctattctgtcatctcgagaatgctgtgtaaatggactctgtggcctctaatgctgtagctttcttctctcggcacagctctctggagacccaccccgagcgtggtgggtggtgctggtttgctgcttctgttgctgagtggtgccgtggtttgtgtgaccattcatgtattacgacatcaggatggtttctagtctttaagctgctgtaaacattcgtgctcaggttttcgtgtgagtgtaacttccatttctctgggttaaatgccaggagtagtttctgggtcgtggtagttggacatttaaactgctttctagagcagctgcaccattcacgttcgcaccaccacctgcccgcagccctgcctttctctgtcctcgcttgtgtctgacatggccactgttttctgtgtcggcctttttgacaggcatgtggtgatacgtcgttgtggtctttacctgcgtttctgtcatgcctgatggtgtggagcatctttcacgggcttacttgccgtctgtacctcctctttggtgaaatgtctgctcaggtcttttactcatttctaagtggattgttttttgtagttsttgagtttagggcactctttacatatgtaggattctggtcctctgttggatttgcgtttggctttctcccagtctgtagctcatctttccgtcctcttcatagggcaagagtttttaattttttaattttgctggggtctcgatcagttttttgtttttgtggctcatgtttttagtgctttttaagacgtgaagactttcttaaggtctgggaactccacctcgcccggtcccggggatgctgtcccgtgttttctgttctgctggttggtctgcgtgtctgttctgccagcgcacactgtgtgacgggctgtgctgcgatgctgctgtgcatagtcagccttcgcactgggcagggagatgcctcccagcgtcttctttctcaggactgttttccctgttttagggcttgtgcttttccacataaatcttgaatttttaaaacatcttttagataccactggaatggtacatgtcttcctaatagtgtatgttaaattgatgttacagtatatctttgttgcattgccttttggcgggttttgtttcttactttcctaatgaatttatcacaaaagttacaaatttgcaaagcagcagtcaggcctcctcccagcctgctgtgaagcgcctgtttcctccaatctccagcccagcccaggggtctgccttggagccacccgcacgtstggtttctgtgtgattggccagaggyggtgggcgcgtctgctccttttccctggggggtgggggcacagaccctgggtggctgtgttcggctccttacttggtgcccgtctgtgtgtgctcctcccagcagccatcgctcaaccttgctctcaggaagcccccaggcgagtgttggcaggaatcctgccaggcgggaggtcgctcctccagagcgtggtccctgaagccgccagcctccctggcctcgccccttgctggtggtgtgtgtggtgtggccgtgggtgcactttgctgggtcttcctgggacactgaagtctcctgtgtctccagccctgagaactcggagcccgggtgcttttgggaaggacggggcaccagctggtgacacatgggaagggaggtgtggttgtcaccttgcccaggtaacctgctctgcctggtcggtgcgcctaaggggggcagggtgtttggggaggacatgagaggcctcctggaagcacttcatcctgttgaagttcacattttgaccttttcagcagcccttgctctgggcctgtgcccggccctgggactcggcctggagagcctattgacaccgtgccatgggtgcgggcagggcgccctccctggagggcggcacgtggtgccagttggtgaccatgagctgcctcactcctgaggaagagtgttcgggctctgggctttgatttaacctgcctgtctgtctctctgagttgacagccggggcctccgcgtgggtgctgctgggaggctcagtggtaaaggccacttttcaggatgtgtctgattttataaacttgaattcttaaattgtggttttaaagagcaccaggacgtaaaaacagagtgacgcaccttgaggctctgttcagccaacaatgagggcttttatttaaaaaataaagccgtgggtcattcacgttgtgctgtttgttctgaacttgcctctggtgttggcggaagctgacctcgctcacctgctgtgtttgttctttgctccgcaggccgccttccaggagaatgtggggagacaggtatggctgctttcaaacacctttattccaaaaacttcctgcgggtttataggtaggaatcttgagagctataaccctggtgtcttctcgcactgtgagatgtggtgtggctacatcaatgccagggtcatgagttcactatrggacgcacatgttaaacagcgagtcctgtttcacagggaacctgcatgtacagtaatttacacacacaggccggaaagctgtgctttacacgttgccaagagccacataatgtggctctgcagggtrgggcgggtccctgggaccagcctggccttgcggggacgcagacctgaccccgcctcatcccacacagagcaggagctggctctgttgacgtcagcttgtgcctcatccagaccatagacgggcccagaagtcagctcccagaagctacggaccccatgaccccacgaccccacatcatgctggggctgcttttgctgtgccctctgaccctgacatctggtcactggtcagcttcgcctgtgaatggggggccccaggttactcatgttgtgtgtgatgacgtcacatcttgggcgtgtggttgggtcttgcaggagagtgggacagaggccggagaggggaccggggtctgggctggacctgggcggggagcaaagttcccacgagaagtcagccgagaaggctctggagttcccggacagcaaagcaaatgcagccggggtctgggctgtggccaggtggtgtggggcggcatggggtggacgtgggcctgcggacccttctgacctgtggggagccctccaggcaaggtgtctgacctggagtggaagcattgaggccaaatgagtccacaggaaaagccggatgccagagtcagctggagaggcgggcggacgaggacttgcgcctgttattgaaatggttctggaggagcctggcgtgagtggtgtgggcggctttctgtagacggagcccaggaaggggcgtgactacttcttgctggcccgaggcagccgaggcccacccagcatccttggggtgccgyggggcctgcatgtgttcagagccctgagccctggtcggagccagttcactaggaagagacaccagccttgcaaggggagcctgggtgtgcagacagcaagagccgcccaggccaaggagaatgtgaacgaggtttggtcttttgagtggagagtgtggctgctgtgaggaagaaggagcttgttggaaaccacttagctgagcctagggacttgccagcttcctggaaagtgagagcccaggagaagaagtctccctgtccctgggcttccagcccctccagagcccccactggagaggggcgtgctgaggccagagcccggggtgacgaccgtgctgggtgggccctggggcgcactccgccatcactctgtgttccgggttcccagatgctgcttcctgggaggagcagcccagtcgcatagggagccacggggccctgcagctgagctgaccagcctccctgtgtgtgtggctggatttgagccacgttacctttatcggggcagctcaggttggggattgattgacagggaaaggaaaggcctttacacttggtctaaatttaggcaagcagccagaaaatgggatattcccgtgggtgcgggagtcttgcacctcagtcctgagcctgagcagtgtgagtctcagagcatcctgcacagtgaccagcatgcggacggcagcgggagcctcgtggaagaagcggcacagattttgaagagacacagactttgaaagaaatgcaagacgcgcaggtgcggagcgtctcccagccccgcacggccatgtcctgctgaggttggatagaaacatttgagaagaaggtcgagaacttggcaaggcaaagcaaacgggagtggacgtgtcgcatagcacacagggaagcagcctaaaaaccctcggatttggaggaggctgtttctaatacacagatttggaatgaagttgtaagaaatgcgttacagtggaggccgctgggtaacagcagcagggatggggggtggttggggagcggcctgggggacacagagggggctgggggcagagacgagggaccagcttctctgtccaggttcgtcttggctggagttggagactctggtcctgagtggtctctgccttctccctactgagcccaggggctcttgagcaggttgtgactaacccatgggcagcttccacgttcagggcctgtccgacattccagccctatgaccctgctcctaggcgagtgctgtccaggcccccgacaccatcaggcccttgtggtggcctgtccacacccaggccccccacttcccccctgcacaggtgaggaagttgaggctcagggcagctgagcccgcttttgtctgctcggagcctgttgttccagccctagcctggccagacagagccttggcccctgtgttggtcttgctttgttctcaccgtggggggatgctggacacagagtccccttgttcttgttctcggtgagacctggtcctgggccaccccggatgtttccctgggctcctgcctgctgtgatgtggggcatggagttgtaccccagtgggcgacatcccaggttgtggcacctgctgtctttctgcagagtgagccgcaacagctccacctgggtgcaggtttctcccctgttcacggttcagtgaaggatgctcatgctgtcactgattgcagcagcctcaggcagaagtttatggtatctccatcagcccaagctcccagtgtaacccttgggagagatttgctggaagaaagccgcatggtacctgctcattccggcctctcctggtgggaaggagggatgtggccccgggtgttctcaggagtgctggctgttcagttacgttgacttgcgaagctattacatgaaggtgtgaggttttaatggtcaagtgcagggtggtgatgaatgggttaaagacgtcaaggaaggatctgaatcccggcctcggaggtgggcaggcttgggagacctttgaaaaaccctgctgtggtttatagctgtaaggctttctatgtggggtttaaagtttgtcatttgtattttcttaggaaattatttatgttgtttccagaatttcacatcctggaacctgagagtggtatcagtaacaccatgtaggctgcggggctggagctggggctccactgggaggctgtcgtggcggggtgggaggaggtgccgcctctcccatgtcagagcctcggcggctgctggtcctcgatgcttctggggtcagctgtcaccacccccaagaaccggctgggccagctgcccccagtcaacgtcttgcctgcccgggactgctgagtgaggcctgggctctggtccaggctttgtagaccgtgcaggcggctgcatccccgacctgacccaggcctgctcgctctggtgtgcaccgacctgccagctttgtggcactttgtggcatggggctcaggccgatggaggtcagtggctgtaacactgttgagaccygaagaccgtttacggtgtatgttttcgggaaaggtctcttaccacgtaccgaagtggaaatgtttgagttgtttgaaaaagatgaaatacttgtgagtggtttcaatgatttagcgtggtgttgcctgggtagaccgtcaggaagtcagtgtgacgtggaagtcctcggcgagccatgtctgtggtgtgtggcttgctcaccacctgcctcagggctcggggttcatgagtgtaaatgtctgtggatgtgattattgaacttggtgaaatgcctttgttcattcaaattcttcttyttcccccatttccactttcttattagggcactttccctcatggtattgatattttgaccacagctgactattttgccgtcggtaacagatccaactgtttcctggttataaggtaagtctttaatgtatatcacaaaaatagaatactctaaaatcagattggatgtcagaaatcagctaccaccattttcttttttcatcctgtaatgtccactcaatggaatgtagtttttgtgtgaaaaattaaaaatggaattgggaacagtgactgaaacttgtgtttcatgttgattggacacacctcatgctttactacgctagataggggacatttactcaygtgttaaagaggggctcagcttcaggagtgcggccttgccgtgagtgctgtctctgcttatgatttttctcctggtcgccccgttttacccgtgctggttctgtgtggggcttggagtttgagaggaagcagctgcaagcacggccacacctcctcctgatgcttccctactggatgtcctaaatgctttcccaccgtgaaatcttggattagaagggactgtttctttctgtttcggtaataggaagtgttttgagggactgtttctttctgtttcggtaataggaagtgttttgaagttgaagttatctgtagattgtctatgaaatgagtaagaggtattttagaaatcaggttagaaacaaatgtttagcacctctaattgcagtttacagaattatatcaaactgttttagttgtgtaattaggtactggggaggttacttcagttatcttagttgatccattgcagcagaaatgtgaaaaagggtgtgactttatttatttatttttggagacagaatctagctctgttgcccaggctggagtgcagtggggtgtgactttatgaagtgatttatttgccttaaattaggaccagaagcatgcccgatgcatttttaacattaaccattaaataccctaaagatcgattccccaacagccctgctgtgtagaccgtgcagaaaggacgtttctccgtcaccagcctgsgcagaattttgaaaatgtagcatttggcctctttcccaggaaggatctttgaacacacttatctgtatttttataccctttcaggtttcctcaacatttaatgtccttttttgccttatcagttctttcctattaatacttggccatatattttatgtggaaaatctactggcccgatgcagtggctcatgcctgtaatcccagcactctgggaggccaagacgggcagatcacctgaggtcaggagttggagaccagcctggtgaaaccccgtgaatactaaaaatacaaaaattagccaggcgtggtggcgggtgcctgtaatcccagctactcaggaggctgaggcaggagaatcacttgagcccgggaagcrgaggctgcagtgagccgagatcgtgccactgcactccagcctgggtgacagagtgagactccatctaaagaaaaagacaatctaccaccttttcccgagtttcctgagtaacacacctgacagctatgggaagcttcagcatatttcccttgttgctgaggtttctaagccagcctaaaactcgcatgtaattagctgtgtgcgttttataaaaacatttgccaacccaagacctgggtccaggcatgtcttcccccagtgtgtttggcttcctcacgatgccaggccctgcgtgcagaccagatgccacttgtgaggacgcaccggcaggcaggcccctccaatcctgagggcggcatcacggggacckgcagtcatggctgcaccctagtaccgcggggcccccctgcacccgaggcagggtcctgctgtcagcctggaccttggggtgagggaggcagtggtcctgttcagcagagggcatgggactgagcacagcccatcagggaggagagttagcagggccctgggccctggcggggagctgctgggggcctttgagccatagtgaagagtgtggattgtcctgaggtcatggcactttgatggtcaggtctttgttttgaacatatccctgtggctgtatttggtgactggaaataaggagagggcttgagggctcttgggagacgggagagggctgggggcctggaggtgtgcccgctggaggaaggtgggagttgccagggcattacagagggtctcagarctgtgttggcatcactccgcaggtggagggcacagctgagggcgacagtgtcgttgagtgygaggaggttggggcctcagcttgcacgtgctggcctgcgaggaagcatcagccgtgctgacayggagatgtttcctctgcaaattggagtttcggacacacagactggaattgaactaacgggcaccccaggaagactgtggggcgagacgaggaggatggggggaccagccgtcgccccrctctcctgttcatcatcacagcctcgttggggtgtaaacgacccccagtaagctggtgcatgttcaataggtacatttttgtaaatgttaacatctgtaaattcgtacctatcaccacaatcaagacgagaaaaggcccaggtttcccctttcccattcrgggtccctcccctcccacacccccttcttcaggcacccctggtctgttgctctcactgcagctgtgtctgcatttcccaaagctctgtgtgaatgggttcaggcagtgggcactctcctcactcacactggcttcctctgctccatgcttcctgcagactgtccgcctgtggggaccgtcccccgagcctccagggccaggggtgtggtacgtggcgtctgtctccactcacctggtgaggggcttctgggcagtgtcttgtctgggttgtcacaggtgcagctgcggtgaacatgtgtgtacacatctgtctttgggcctgcactcttgttctctggcatagatgcccagagctgggtggctgtgctgtcagttttttttttttttttttttttttccttttgagacagagccttgctctgtcacccaggctggagtgtggtggcgcaatcgcggctccctgcagcctcgacctcttgagttcaagcgatcctcccacctcagcctcccgagtagctgggactacaggcacacgccaccacgcccggctaatttttgtatttttctgtggagatgacaaatcatgttgcccagggtggtcttgaacccctggtctcaagtgatccacctgccttggcctcccaaaatgctggccttgcaggtgtgagccaccacaccctgcctgtagctttttctgaaatggccacatggctttcggcgtgatggtgccacgcgcccccggtgctggatgagctcggggtccgggatctggggtccttgccggcgctgggggtgttggtctttcaagctcggggtccgggatctggggtccgtgctggtgctggggtgttggtctttcaagcttggccattgtcatgggggtgtgggagcagctgactaactcgtgttctagtgactgatgatgcagtttcagtcatcatccatttcaggggcgtgtttaacacatctttcgcccatttayttattaggttagtcgttttcttcctgttgagaatttgagaattcttcatgaattctgcatacaattcctttttcagatgcttccttgctacatatttcctcctgctccgtggctttccctttcagtatcctgtatattcctaagtcaaagcctttttaaaaaaaaatcagctttgggccgggtgcggtggctcacacctgtaatgccagcactttgggagacccaggcaggcagatcacgaggtcaagagatcgagaccatcctggccaacatggtgaaaccccgtctctaccaaaaatgcaaaaattagtcgggcatggtggcgcacccctgtaatcccagctactcgggaggctgaggcaggagaatcacttgatcccgggaggcggaggttacagtgagccgaaatcrcgccactgcactccagcctgggcagcagaatgagactccgtctcaaaaaaaaaaaaaaaaaycagctttatctttgtacatctactttattacatatagtttacatatagtaaaattgccagttttcaatatgggtttaagtgtggcagcgggtttggcagatgtgagctgttgaatgaccascactgtggtcagtgtggtgcacatgaccctccctccaggaggcgccatcctgactgacctcctgtcgctggggctccccygttttagaatccgtgcaggtagcttccttcatctgctgcctgcctcatcagctgcctgtgtttcagggttcctcagtggttctcactgtgtggacgccccacatttgaggggctttgagcccccgtgggttttgatgtgagcacacggcacagctctgttctccccggctggttttctgttggagtgagcattgagcccccgtgggttttggtgtgagcacacgtcacggctctgttctccccgatggttttctgtttttcatgagcattgagcccctgtgggttttggtgtgagcacacggcatggctctgggttttggtgtgagcacatggcatggctctgggttttggtgtgagcacacggcatggctctgttctccccggctggttttctggttttcgtgagcattgagcccccgtgggttttggtgggagcacacggcacggctctgggttttggtgggagcacacggcacggctctgggttttggtgggagcacacggcacggctctgggttttggtgggagcacacggcacggctctgggttttggtgggagcacacggcacggctctgggttttggtgggagcacacggcacggctctgggttttggtgggagcacacggcacggctctgggttttggtgggagcacacggcacggctctgggttttggtgggagcacacggctgcttcccacagctctgctgcagaccctggggcttgggccgttggacagctgagcagaggcttcgttttcttttcctatgtgcaggaggctgaacaccgcttcaagtggttgaagtgtgtgtgtattttctgtaaactttttgatgatatttctgctacactattttttttttattgattcagaagaactggtttattttagggaagcctcctgttggtaagatcagttgcggttgttttttccagatttgttgtttgacttttgactttgtttttggtgttttcctggtagactttgttcggcatatgtgttggtagggatcgatttcttctgtggctctgggtttcgagtcataattagaaaggcatatcctacttagagattattgtttaaaagtcttccgtgttgttttcacaagatgtaacttttatttttgagacataatttacacgctttcagctgcccctgtatggagtggacggttgtggaggggctgacagtgtgtccacctgcgtcacctgcatcttccttgggagtggagctcccaccacttccacggccaacactccttccccccagcctgtgtgctgctgccctgccctcgacgcggagcagggctgcccctcggggaaggtcgtatccatggaaccagagggaacacactcctgtgtgtcaggttctttgctcagcgtagtgcgcctggggaccgtccgcagcgcgtgtgtcctcagtgcatgtgtcctccgctagtgtcctcagcgtgtccgcagtgcrcgcgtcctcggctcgtgtcctcagcgcgtgtccgcagtgcgtcctcagcatgtgtcctcagcgcatgtcctcagcgcacgtgtcctcagcgtgcgtgtcctcagcgcgtgtgtcctcagtgcgtgtgtcctccgctcacgtgtcctcagcgcgcrcgtcctcagctcgtgtcctcagtgcgtgtccgcagygcgtcctcagygcacgtgtcctcagcacgcgtgtcctcagctgcttttcgttggtgagtctttgctcagcatcgtgcgcctggggcccgtcctcagcgtgtgtgtccgcagcgcgtgtgtctgcacctccttttggttggtgagttgtgtgcactgttctgtggctatacartttttctgtgagtttgcctgacatttaggttattttgaatttttggctctgatgaataaagcagttgtatatatttatttagaaatcatcttcatgtggatgtgtattttcatttctttcagataaagagttagaatttttatatatttaactttatgagaaactgccaaactgttttgcaaagtggctgtataatcttgtactttcaccagaacgtatgcagcctctggttttcccacatctgtgccaacgcttggtatttaccagtcttttaaaatttacccattcgagtgggggtaacgatttaacaattagcattcctggctgaatactgatgttggacatcttttcatgtgtttattggccttttatttattttcttttgtgatgtttatgtacaaattttgtatcaattttttgtttggggtttatctttatatattctgttacaagtcggtttgccttttgattttcttaaaagtttttaacagctttgccgaggtataatgggcatatgttagctgtatatggagtgcagggctttactgaagtgcagctggcacacactaaccagagcgcacagcttcctgtgtgtgacggaggcctgagcacagccatcaccctggagcccccccatgtctgctccttgtaattcccgcctcggtcctcccccaccctgaggcccctgatctgcctctgtgggtgtagatgagttttttgcacgtccttgaattttgtgtgaatgaaacaaagctgtgtgcactcattttgtcagtcttctttggcttagggtagttgagattcagattgtgtgtgttgttgctgagtattcgattgtgtggatcaaccacggtttgttttccccgtggatgatgtcagggtggtttccagatttcgccgttacacatgaagctgtgtgcacgtttgtgtaaagcccgtgtgtgcacagatgctcttttcttttgggtaactgctcaggagggaatggctggatcacgtggtagatttgaagaaatgggcaaactggttttgaaagtaactgtgctgaattcccacccacaggcagtgagttctcgttcttccgcgtctcaccacctctccatgctgtcttttccagtgtgtttattgccggctttcctgagtacacgcagccaatgatagaccacctggttaccatgaagatcagccactgggatgggtaggttttctgtttttgtttttctaagagctttttttccccccaaaggagagattcagttragcttataagccttgagtgtattttctcactgtggatgtcgtattttaaaataacttctgagaagtaatatgaattccagtcttcatgccggatgtgttgagtcatggtctgtctccagttccacttctggagcgcctggtccagtgtgtccgacgtggcrgtgtacccgtgcraatgtccacgctggcgtgttgtggagtgccgctgccgtccgagggggcgcgggcrtagcttggaggcggactctgcgttgtctccctcagcagtgcttcccgctgactctgctccatgtggctccacaggtggtttctgcgctgtctcctgggagcccagcagttcttagtggccgttttcatcattacagtagcagcttcagggtttccttgcatttcataggcagttaaatgtgtctcagaaaggaaaagtgaagtgcggtctggagcataaacagcgcgttagtgctgtgaccgccgccctgaggagrtcagagggtcccctcctaggacagtgccgtgctgtggcactcctcacggagcctcgaggagcggyaggtgcctgtgggtggaggtggctttgtgagggtgcgagtccagaatctcagtttcagagttggtgtgatgtggagggggtcctttctgatccatgggggatgcgtttgctgctgcctggggagcggcccggctgcctgccgtggtcctgctgcctggggagcggcccggctgcctactgtggtcctgctgcctactattggtcctgcttcctggggagcggcccggctacctgcggtggtcctgctgcctggggagcggcccagctgcctactgtggtcctgcttcctggggagcggcccggctacctgccgtggtcctgctgcctggggagcggcccggctgcctactgtggtccaggcagggccctcaggactgggagcctctgggaaaggaactcctgggtagcactcgggctgccgggggaagaccctcccttcattcgcttacagagaggggtgtgaattcctgagactcggggtgtccctgcaaatgttacaccaaaactctctccattaggtacaaggtcccctaaaccgaacctggggaaaattaattaatttgtcagttgtatcagccgattagtcaataacgtctttaaaaccaaagttacagatatatgcccrtagcgtcggagctgtgggactctccagytggtacatatgcccgtggtgtcggagctgtgggactctccagctgttgctgtctgtctctgcctcagttctgtcggcctttccttcacgtgttttgggyggggtcacttattggaggcagatacactttcgctttttgtctcttcctaatgtattgaccctttatctttgcggaacggccctcattgtctcgtgtgagatttcttgccttaaagtaactgatgactggtgtagtacctgagttggcaagccttttctttgaggggctggataaacgtggtagatctctgttccatacgctttgctttagtttattttatttagtttatgtaacccttgaaaaatgtgaaaaccattcttagctgagggccgtccttackcgaagaggcctcgggctgggcttgcggctgcagactgcattgcctccgcttctcaggtgctttgtcttttctgttccctcagagttgcaggcgatggtcttctagacagcatgcagttgggtgtcgctcagggtgtggagtcctggcacatgagacgccacctgcctcgaagagctctttgtttaccgttagaagtggaccctgagcagggccctcggccgacaccagaggggctgtggcaggtggtcctgccagcgcgggcgtctgccattgtgcctggtttcactgtggtgctgtgggtttggtgtttttaaataattagaggacagacacccgccttctgcatgttttcaccttcacattttgcttctttgttgttacatggtcgccctcatgatgattttaagtcaggaccacttgctgctccagctgggtctggaggggctggggcatgagctctgcgggtcgctcccagcttgaccatctgcctctgcatggagctctggaaggaggggtgggctcaggaggggctccagcctcttgagccggtcctgggtcagcctttcgcggtccgcatgttcaaccatgggtgctttcagtgtgtgtctgatgaggcagttattggatatgtgccccagatttggtgggtgagcctcaggaaattccttctgttcaccccttgtaatcgtggaggggtggtttcacgtggctctatctcacactcacaacctcagagtagcgtgggggtggggaggccggacacccaattgccacctggccctgagaaggaaaggcagctgtgtcccaagaagaaccgtggttagccrtgtgacctcrctgttgtagactgtccttgtcgtctgttggagtcggaggttcttgtactggttcgtgtgagtgagtgagtgagcctctgctaagtggccggttgaggactygtgtgttgtctccctcrctttctttttatgaattgaataaagctagaatcataaaatgaaggcacttacgacattctctcctcactctyagggtcatccgagagttggctgcgagggcgctgcacaacctggcccagcaggcacccgagttcagcgccacgcaaggtgggtgtgtgtcccggccggcytgcgggcaccatgcatgcactgcagaaaggcctgggttgctggtttcaaaggctgggggctgaaaataaggttgtgcttctgtcttggtgagaagcatctgaggaaagagctgtggacttgatcagtggataggctgtgaggacggatgcggtgagtgtgtccgcctgcagggcagggagccgctgaactgtrttacgtacaccggagcccgtgatggtcccgccggatgcctgacatgcagtgctgcttccctggtctctaggtggctcgcacctgccacacgacactccctggtctctaggtggctcgcacctgccacacgacactccctggtctctaggtggctcgcacctgccacacgacactccctggtctctaggtggctcgcacctgccacacgacactccctggtctctaggtggctcgcacctgccacacgacactccctggtctctaggtggctcgcacctgccacacgacactccctggtctctaggtggctcgcacctgccacacgacactccctggtctctaggtggctcgcacctgccacacgacactccctggtctctaggtggctcgcacctgccacacgacactccctggtctctggttggcatgcacctgccacacaacactccttggtctctaggtggcttccatctgccacacgacactccctggtctctggttggcatgcacctgccacacgacactccttggtctctaggtggcttgcacctgccacaygacactccttggtctctaggtggcttccatctgccacacgacactccctggtctctaggtggcttgcacctgccacacgacactccttggtctctaggtggcttccatctgccacacgacgctccctggtctctaggtggcttgcacctgccacacgtgaatgcactttggaattgggcagcgtgtatagaaagaaaaggcctgaatgggagactcaaagtctgcccaggactaacatcaccttggaatggctcagctaagtctgcacttcttacacttcatcagtgaagagagaaatcctgtttgttctgtcttgtttttttctacttggaataaataatcatctgacttaaatgtggggaagaatacacacatttctcaatgtgtgtaccgtcactcccccgacatttattacaggggctacactggaggctggattgtggctcttcagtggagttactgatgtgacgcctgtgttgaacatcctgtgggggctcgttcattcctaagggatctttcagcttcgtgatctgttaatgaggcatccacgtcacgggtttagtgtggcgctcccctacttttcagtgataattaacccttgctgacactgagggggctcagctttgtcctccacccggttgaagagcacggacacccagaacaggactgtgaccttttgtagatttctctgattctcgaaaatccgatcacccccagccgccacatcttagcctctctgattctcaaaccatcgcaagcctggcagcacttggggaggcttaggctcggggagcttggtttccccacgcaggtgtggcagagccgcctccctctgcrtccgtgagggttctgaggagtctgtgctttctgagcaaactcagagtagaggcaccacccctgggggcagccctgcctctgtcctgctccgccccctccaccgcccaggcagccaggcagagctcctgccaggaccagaggccaccctacaccgacagggaaggcctggggagtgtgtcgtcctcctccatgctccctctcctgtctgagttacccaccccgtctggggcacttgggagcgggccatgtccagcacaccgcagcctccgtcctgttgcccttggtgtctcaggggccatctgcatcaccacgggtgccgtcctgggcactggggtgatgaccctgagggatgccagtgtgggcgggtgcgtgtgggcgtcccacaggtcgtccgtgtgtgcacgccgtcgcctgccctcccggccctgtgtgggtgcgtgtgggcttcccacaggtcgtccgtgtgtgcacgccgtcgcctgccctcccggccctgtgtgggtgcgtgtgggcttcccacaggtcgtccgtgtgtgcacgccgtcgcctgccctcccggccctgtgtgggtgcgtgtgggcttcccacaggccgtccgtgtgtgcaygccgtcgcctgccctcccggccctgtgtgggtgcgtgtgggcttcccacaggccgtccacatgtacacaccctcacctgccctctcggccctgtctcttgcagtcttcccgaggctgctgtccatgacactgagtccagatcttcacaygaggcatgggtcgattctcgcctgcgcagaagttgcttacgccttgtacaaacttgcagcccaagagaacaggtaggaagagtgggtctcgaggagacacagggctctgtccctgatcccctcaccatgtaatcacagtgctctccagttcgagactctctcatcccttctcatttttgtttatctgcaccagtgtcacagtcgataggccccaggttgtattgatggagtgtgtaagtggccctctctcctgacggtcatgccgtgggtggaccacccacctcttcagcggggcgggtgcagcacccggatgggccgggcatctccccacggctgtcctgcccctgctgcctccttgtgcacctcctggtctcagaggtgacaagcgaggtcataacagcaaaggtcctttttccaagacggcattgagcgacttgcatgttcagtatcctttcttcatcacgttccatagtttaaaatgccagagaatatacacgtttcttttgaatttttcagttggctatgtttgtacaaataataataaagcatgaaaaacatggggtcactgggaagttgtgtgcaggaggctgtaaggcatcgactgtcgtcttacgtttcttcccagtcgagtcttcctcaagagtaagaactcccggacttaccatagtgacggcaacctgcttctcggactccagtttaagaaacgtttttaagttcatgccctgtgctggagacagttccctgggaacgggttgagagcagggtatgggcccacctcccgcccaagcctgaggaagctctggtcggccccgagctcagatgcagagtgcagctccttcagggacgctcgctcgtgtgggtgcagctgatgcccgtgcaagacctggcctttatggcgctgctctgtggttgtggaagaaggcacatggggtggggtctggggagaaccaggcgggagctcccagggtcctccagtcgggtcccacagggcctgtgtcattcccccagcagtgagatgtgaccacacctgtgaggtgtctatcagggaagcacatttgagcctcagtgcccaggctagactggggtctggccacgtgggcacctccgcctggcacgaaacaaaattccagacccccagcaggaaagcaggtgccagcgtaaagcacacggtttgcgcagattgagccagtgagggggcctcatgaggcagggcttggtccaggcccccgcatgccagcccaggtctgatctcgccagggacyttcccttggatgtcagtggacatgagctgtcgtctcagcctcacctggacctgtctgttttccaaggtggtcacattggcaggggtcacagctttaaggggatgccctaacatcctcttcctttgaccaggcactgcttcatctaaaatcacaaatgggccaggcatagtggctcacgcctgtaatcccagctatttaggaggcggaggtggggggattgttagggcccaggagtttgagaccagcctgggcaacatagtgagaccccatctctaaaataacaaaasaatgcaatgtaaaacaatacagtagaatacaaaaataatcggaggtatgtcctgcagaggtctctgggacccactgggacctgaacaagaatgagaccttgctgagcctatgctcctccragtgtacttggggttagggtcttggggagtgtggcctcagctcctccgagtgtactcggggttagggtcttggggagtgtgacttcagctctgtgtttgaacttctgcaggcccgtcacggaccatctggacgagcaggcagtgcagggcctgaagcagattcaccagcaggtttgtgtgcagcctctgggtgtaccctcaggaggcatcacaggacctgcccccttagggcctcccaccctccccaggcagggtctgcagtcctgrtggccactgtgctccatcagtcctgggctcagtgggggacctgcggtgtgatcactctgggaacaggctctcygctggcgtcatgcttgtgaacagccaccttggagggttgccctgggaggggaagagactcctaggaaatgagtgcagactttctgtgcacgtagccagcatgtccttggtctctgaggaaggcttatgaagctagtgcagtcggtggaggtttcggctgcagctggagtgtggtttccctccggggcgcgcggctgcggtcccacgatggagcgtgcagccaactctgggtgggggcattgggccccgtgctctcctggtggagttgggggcacacagaacgagcacagaagcctctggtttccagccgtgcatctgcagctggggtctgatgtctcctgaaagtaaagcagaattttgtgtgtgcgtctgtcggatttctctggggagacagtgtgttcatctttctgggctttgagagattctcaaaggcttctgtgacccagaggtaaagtatgaactatggatcttggtgttacaggagaatataaaaattgttcacgagggattacgtggtttacttgtctgttgtccagatagctttatattctttaagattcakctcggattcttatcctatttttgccattaactttcattatgattttggcaaagccattttgtttgcttacatttttcacttttaatgtggtgtctggcctccccctctgaccgagacaagcatggctgcagagtgcagacggggaggtggccccgggcagcagccatgaacgtggcctccccactgacgctgagccatggctcccttttttcagtaaaatataagcagtaatagagccgatctccttgagtttttgtgagaattaaagaatacattttaaagaattgaggagaatttttggsacagtgtgagcattcagtaaattttagttgtagtggccatcacaacgtggcttttaagctctcttacaaaaaaagaaacatcagcatcctgtttggcacagttacttttctgcacaagaggctgcctgggtgggttctacgtcggtctctggggccagaatgcaggtggctccagctccctactctggccctctcctccctctctctgtgcctcagtttccccttcaagggagctctgggcctgtctggaggttaaacaaggccatctgcgtcagtaggtgggcctccgtcctcagccccctaggcggctctcctggctggcatggcatcttctgccattttctctttgttcttgtttttgacagttgttaacgtatacgtattattttaaaatttaaatcattaaataactttcagttttttattttcagctctatgatcgtcagttatacaggtgagctttacaaaaccaaagttcttatatctgtgtcctaatgaagaactgcgctgtcaggagcaggcggggcgggtgtgttcgcttccctctctgcmtatgtgtgtttgggttgagcgggtgggtgtcacccggcccgctgtgggaggygcatgagggtctgacctggttgtgtgattgggttgagtgggtgtcacctggccactgtgggaggtgcatgagggtctgacctggttgtgtgtttgggttgagcgggtgggtgtcacccggcccgctgtgggaggcgcatgagggtctgacctggttgtgtgattgggttgagtgggtgtcacccggcccgctgtgggaggcgcgtgagggtctgacctggttgtgtgattgggttgagcgggtgtcacccggcccgctgtgggaggcgcgtgaggttctgacctggttaggttttcagctctgcaggtgtcatcgcgtttcctcgttcccaggacttgctggtcataggcaggggtgtggcctccccaaccccgagatctggccgggtgcctccctgagggtttccctctgtgcctttgcagcccaggcagcctgtctgctctgacagattgctttgctttttctagaatttgctaccgagggtgtcacacagtaggaagcctttgggtgtggtttcttccccgacgtgtctttgagatacctgtgttgctgtgtgttccgtggtgtgcaygtacggcgccgtgttatccactcaccagcccaggctcatctgggtttccagcctttggctattgtagggaagctgctgtgcacatctagacgtacaagtcttggtacgtttcacgtttcctggctgactaccaggagcagcatcgcagggtgtggggcacatgtgtgacttctcagcagccgagccaacttcccagaccctgctgctgcacgtccccatccacaagtgaccccttggtgtggtcggctctgaacgtgggccctctgggtgagtagaggcctctcgctgctgctggagtctgcctctccccagggctcctggtgctgagcctctttccctgtgctgacgaagcattcctgggtctttcgtgaagttttttgctcattaaaaagttcagactttttgctcattaaaaattttatcgtctgtcttattgagctgttagaactcttcatatattccagatgccagctctttgtcacacacaggatctgccagtgctttctccagctctgtggttcacttttcttttctcttagtgactttttttttttggagaagcagtctcactctgtcgcccaggctggagtgcagtggcagcatgtcggctcactgcaagctcacctcccacgttcaagcgactctcctgtctcagcctcccgggtagctgggactacaggtgccccccatcatgcccacctaatttttgtatttttaggagrgacggggtttcaccatgttggccaggctggtcttgcactcctgacctgaagcgatccgcccgcctyggccttccacagtgctgggattacaggctgagccaccgcgcccagcctcctagtggctttttactgggacttgtgtggggtagtgaacctcgtgctgttctcctttaccttcgaggggtgaagcctccctttctgcctcctagtccttccaggctgctcccaagaggtcccttggctgctcccaccagtttctggccacctcctcagtcagcagggcgggtggccctgtttgggctccaccccacacactgggcctggagggctccttcaggtgctccttggggtactggaggacccctgccttgggcctcagtcctgtactcttcacctcctggtgttggagccagcatttcatatgttgcattctgtccagttttctacttgcaggaggggacatccaaccctgccactctgtgtgggccagaaaccagggtctcaggagtgaatattttgccctccccagggcagcgcgcctgcccttgtgcaccagggtcccgctgtcagcgccagggctggggcaggtgtcccagatgggcagagcagcccggagctccgcctagcttcgctcatggtagaaccgcagtgcactgcttctctaggctggatagggggctctttctggcatctgagattagtttctataaagtaagagctgagcgctgcttggaattagttctgtgatgggataccagtcaggactaraatgtccagtaaaaattaaaaatcagcatcacyccarctaggatgggagacctctggaagatggctgtaccacgttttttcctttcttttcataaaaggttgctcrtgctcagtaacacattcaactagttctcattttaatgctttttggagcstgaggttacattggcaagcatatttcatggtgttttatacgtcaagaggttcttctaattctgatgttttcattcctyttcaggggtctgggaggacagctcatgagacaagcaggtaagtctgaaggcctttgcagccctctgcagccctttgcsgcagccatcgttgagggaggtgtgctcgtggcgtgcagggcggcccattagcccccagggtgaagggctgggtgtgtttcttctgtggaggcggcatctgtgatgtgcttggtttgtccagtggttcctacgagggagagattgagagattgagattgagagagagaaagaggaagttgtgagctgggaggggttgcacccaggagccactggttctggaaatttctcaggaagcagaggcagctggggcagtggggccagtgcttgcctgtggacccagtggacattgcagatccctccgagcacggccccagcgtggacagagcagccctggtcgtgccctgtggactgagcagcgcagggaccaagagccgttttgggcgagcacaggaagctcaggcgggggcaagaggaaagctgagcagaggcgaagctccttacacacccgagtccaggcgaacctctgcgcctgattcccaagcctctgataccccccgggggttaggacagtcgggcattttttctttgctgattcttttttagcatgtgaggaggagggaagcgtagaacacattttagactgttccacagagtattaaaggaaaagcctgatttcatagacattcctgatggcagcagccgaccccaaggtccagggagctggattccccgacacagctcctggggccctgctgttgtggacagcccatcccacgccaccctcagcccctcgctgtgggactgtgagtgtgagtgtggaggcacagctggtgaggaagcttggaaaaatcgcggttgtgtgcagacttttgctgaggtctgcgtggtctgagcagaggagagcaggctgggattcggggaacccacggccggatgtcagggctgtaccagcctcttgtgctttctgtccacacctcccagccctgacctgatagggacctgcccgaggcctgcagccatctatctccagccaggctggccgggcttctgtactgagagcagccagcttgcatttctgctggtgttagctcagtgttctcatgagtctgatggacgtcacgggaaagtcaatcctagaaacgtgagccagtttctgtcagctgacgtcagaggcatgggactgccagttctgcaggtggtccctgttggctaagaccggtgtgtcatgttttggatgtagacttggtcattgtccctcagatgcctccagagcacacggtgcaggggtgtcacctttccgacgtacccatgggtgcccggagttgcctccttagtgggatcaagaccatcccccacatgtcatggacagctggtgacctgtaagccgtttctggatctaggagtttggcttgggatggagtggggtgtcgagtgctctcagaagggttcaatgtcccccacttcccacccacgacacgggtcgtgccctggagatggcagttggaggcagtcctacgaccttcacacgaccttcacgtgctccccgtgtgctgcggggtctgcttttagggtcgctcttggtgtttgagcagtaagtctgcacaggagccactgcccaccatgaaaggggggagttaaaggcgttccgaatccctttggccaacgacggagttgaaggtgttccgagtccccgtggccggcggcgacagagttgaaggcgtttggagtccccgtggctggcggtgatggagttgaaggcgttccgaatccccgtggccggtggtgacggagttgaaggcgttccgagtccctgtagckggcggcgatggagttgaatgcgttccgagtccccaggacgccattttggctgaatttcctttaccctcctgctccgtgaagcggggcccattggggaggtgctgctctgtaatctgctcttcttcttgaatgtgtggttagggcagccacattgatgtcccccaggctccagagtgaccgccccttaggggtcctgctgggcgttggccgctgttggccgcagggcaccgttggcctgtgcattgctgccacctacccatgatgggcagaattgtcacgagctcaggaggaaaccatggaaaaaccgcaggtcctggagcctccgtgtggttgtcgtgggcagctttccacgcgacgtgccctccctgggcgtgaggctgcatttgcacttagcggggagagggggaatgttgtgggttctagttgggctttttgatgatgawatttggaaagacttgagacaaagtagccaccctgtcctgtcccttcctcacccaccacacccactgctccccgctggcaggcactgcaggctgcacaagtaaccgtggaacctaaacamtsatgtgcttcgtccgggttttaaaaaggcgcccttaccgcggtttcggtgtttggcgtcttcacgccatccgggttctcggtgctctgctctgaaggatggtggagggctgtggtctgttgttgggggtgctgggtgcagggtggtttctgtctgcctctctctacccccaactccagctttcccaccctgccctctgctctggggcacgtgtgctgttgggatgcatccctcagggttcacggcagggtgtggattgctggggggcatcgtggagaagggcatctttatgggaggcatccctgctctgggccccctgccggcctccagctgtgtctgcaccatgagtgtgtttgctggagtgcggtgtttgcactccctcacaccgctgagtgcaaacgcggcactcctgcacatgtcgcctcgcaccgtggcgggcgtgtcccgtggaaagctgcccatgctgcccacgccctccctgggggccccttggctgcctgcactccccagccgtgacctcagctcccggcgccggccctccttgtgcagctccttcccctccatggcctttgctggccccaggagactctggcctgcaggctctgaagccggctgtgtccctggtgatcctgactgagccttggtgtcaactcaggtttttttctcctcctcgttcatttttacacttcgtaggaaattattttccctttcagctttcaagtaggaatagttcagaaggggaaatagttctgcatagcgtctgtggtcttggccccgcatctcccagtcccacatttttatttttccaaaggcaaccctttcagttttttagctgtctgttttccttgcttctgtatttctgagttctgtatgtacgcagctgtttcctgatatccttagttttagatgtgttctttcaagtgagacaagactccaagctcttgtcggggtgagaaatctgcgggttcacgggctacatgtgggagacggggaggggctgctggtcactttctcacccaggccagaggatggcgcccttacccccgaggacgccggcatgtcggtgacatgccgcccgcaggagcatcaggtgcgccctggccgcaggtgccccggaggtgtcgaaccgcagatttcttcagacgttttttgcacattttgtgggaaaagtggctcaacccttgggagtcgtctgcgtccccatatcaaagaaatgtcatacaggttggcctttgtcgtgaatattcacgagaggagatgaacatcctggatgtcctcagcgtggcctgaactgagctgcttcccccggtgccaggaagatgagcgtccccttgtctccgtcttagtctcagtggctcttgcatttcatgctttagaatcaaaggaaagaaacaggaactctgtttagtgaagcagcgatgaaggaggggtttgtcagtcagggtggactgcgttttgctcttgaaacaatccccaagtttcagtgtcttaaaaccacaggtgtttttttatcctgctcacatgtggatcaccgagggcaggggccgggaggaagggggtcatctggctcacagccttgcaccagaggcgtcacgagaatcaggaaaagttctcctctcatgccgaagacgggagggaaaccagagggactggtgagccttgagtcggccacaggtgtgtggaggatcgtgacttagcaagccggggacacgctgttaatggacttcctgctgtgggggtgagggctccgtgctccatctctgatgccctgtacacacctgccacctcccctgtcccctcagcagagacatggccggtgctgtcgtgcctttcgcttttacctgtatcttaaatcacacaggagttcattcggatttacctgtacagataccctgttctctttcttgttccgtgggaattcactgggatttacccacacagccacctgctgcttctccttcttgttctgtcctgcatttctcaccttctaagaggaccattttctctttgcctggagaacactctagtgttttccatagtgtgtgtctgctggtggcaccctctcgtttgtttatcccaaaatggctttttccactttttttttttgagacggagtctcattcactcttgttgctcaggctggagtcacagtggcgcgatctcggctcactgcagcctccatctcccaggttcaagtgtttctcccgcctcagcctcccgagtagctgggattacaggcatgcgccaccgtggcaggctaattkttgtatttttagtggagatggggttccaccatgtgggccaggctggtcttgaactcctgacctcaggtgatccacccacctcggcctcccaaaggtgctgtttttttttttttccccactttgattcttaaaggttatttttgctaagaatgaaactttagtttgcatttattcattcgtttgtgttttggcactttaaagataatagtctcttgtcttctggagaggttagctgccagtctacttattactgtattggagacaatcttttaagtttcgctggcttcttttgagatttttatctttatttggttttcagcacttttaccgtgatattcctagaacaagttccctttgtgtttatctgacttggggctctagggttcatacttgttccataatctgtattttctgtcgatgttttgttcactttagaaaaattcctagccatgatctctttgaacattgctcactggcctctcctctccttttgggactcttattacccacgtcttgtctggatcaccgcacttaattctttacgcctccttacactccctcctctggttttgtcttattcagtttggacttttttttttcttttcttttcttttttttttttttgagttggagtcttgctctgtcaccaggctggagtgcggtggcacaatctcagctcactgcaacctccgcctcccgggattaagcgattttcctgcttcagcctcctgagtagctgggactacaggcatgcgccaccacacccagctaatttttgtattttttgtagagatggggtttcaccacgttggccaggctggtctcgatctcttgaccttgtgatctgctcaccttggcctcccaaagtgctgggattacaggaacattttctttgatttaaatttcattgtcacaaattctttcaggtgtgccttatctgccgttaaacgcatccttgaatttttttatttttcagaacttattttttatagttttcatttttttcacatcctggaacatattaagcatggtttaaaatctttgtttaatgtcatcatctggagcctctgtggctgtttctgaaggacggtatatcatacatgaaaagcatctccaccaagctgcaggaacaagacatkacagaaatgctttgaggtctgcaatgttctcctctcccagagagacttgatgttggctcttgacgggaggcgggtgcttgctgtcggggtcacctccrttgggttttgggacgtaggaggggtccgtgctgggctggcccacgttttacacctatttctaggtgtggtcctctgggttcagagcctgtggtgagggstctaccgcttctccctttggtcatcctggactcccgttctcctgctagctggagatgctcctggatgcactgttgggggtttctggttcttgtggcgccccctggagtcagccgtgagccggggagagttggcccccgccgctctgtccctctcaggtcttcgtgagctctctggtaactgcaggcacttcctgtgtgttttcattttgtctggcttttaaaaatgtcttagtggagggttggtctgcgttatctagtctgttagtttttaaaaaatattcttcatttcgaaataattatagacttacaggaagttatgagattagtaatagagcctggctgtgcttcccatgcttcctcygcggtgactccgggtatgacagtgttggagccgggactgcggtgtcgaggccctgcctctaactggactgcaggcctgtgcggtttcgtggcttcatgtgtgtgtggagtggccatgtgtgtctagtttcgtgcagattgatgccctgtgtagatttctgtaactaactccacactcaaatcagaaacctgcrtccttcccacagagacagcccctgccctttgcattctcaccctgcccccctgccaccagtctgtcccttctagaatatgccatgatcgactcgtatggttgtggcatttcgaggtgggcattttctgtgagcgtggtgccgagaccccatccagctgtccatgtgttcacagtttgtgccttcctagcccacggttgggttttaccagagtgtgttcgaccagcactcagtaaagtacactggggctatttctatctgttgctgttgtgaacaaggttgccaggaatattcctgtgcgagatgtgggtacaagccttttcatgtctaccactgagtcccgtgtgccgtttcgtgagaggctgaggcaccgcttcattccaccgctgagccccgcgtgccgtttcgtgagaggctgaggcaccgctgagccgcgcgtgccgtttttaacttgattataaaatacatttaaagttcacatgcaggtgcatctccaagaaaattattttaaaaactagttaagactttcatttcccagtcctcaacacacatcagagcagtactctgttcagagctgaaaggattcgcgctgggacaaaggcgtgtcacttgagtgagtgatggtgtcacaggtgcccacgtggaagaaggtaaagtcgtatctaaaactaaatgtgagagtaactaawaacttacgcataaaaactaccatcataaaaatcctcgaagaaattttaggagacgttgtaggacagtgtcagtctctgaagaaaacttcttagtttagaaattttcaaatctgcgcagaagtaaagagaagtagtttacgggggggcccagagtctcgcccggcgcttcctttctcctcccctcctctgagtttaaagaagaccctgaatgtcaggtcccagcagcccctcgctgggtttttcyaacttgtggtaagaactggttttctggggttttttgtttctttttgtttcccccctcttggcatgtaatccccagctaacagattttataataataattccacaaggtagaaacaaaaggagataattatgttgggccttatattgaagaatagaccatgtgtaggttggtagggaaaacggagattgagaataaacgtctgttctacagtcgaaaaggtaaaaagttaattagtgtacaaagactaaattgtaaaactgcctgtgacgaggtaaaggatccagtatgaaatggggcagagcagacgtgtgggcatttcawgcagaagaggagcagactcacgtggccgtggacggtgagggtgccggcctcacctcggaggcatggaagtaccaggttacttcacatcgagaggaccgttttcctctttccagtcggctgyggttggcactgaagaatcttggtgctgacagacacagagcagggtctctcgtggaacaggagttgtctggtctgttcagtttgatgagtggcagtatctgtgacgatgggaagtgtgtgtgtggtccctgtcctgtgtgcagggacgccaggtggaccgacggcctccgcatctgtagcacggtcaggcctccttgttcacggtgacaaaaaatggaaggagagtttagtccctcaggagaaatagcaaataccatgaacaagkgtgcagcaggcgtctgcgagtgggttccgttgttaggtagagacrgtgggagctagagcagtgtgtggccgtgggagctgctgatgctgtccagtcgtctctgtctcgtgcgtcctggccccctcgtggctggtcagggccacgtttctggtcatggagagtgtgagtgacgagctatgtggggaagtgacaggcatgacctgtggtctggagcattgcaggtgatggctgtctgtcgcttgggtcctgagtgacaggtctaggagcagaagccgctatgcttcccgtacagcctgtcacagggacgtctgcagctccctgacaggccggcccggcttctctgaagtgcacgtgggctcacacatgggccttctgccacgtggctgggtctgcagcactttcttcaggctgctcagcggaggaggcgtcttgggcttctcatggtsgttctgaaatggttctgggatgtttccagccctggcagcagggtaggttgggcgggtgaggggcaggagctggccgcacacaactcagaatgtggcaaaggcaagcygctgtggcaggcgcttttrgaaaagtaacattgcgtctatccttttttttttttttttccagtgtgtgttttaatagaaaagttgtcactttccaaaatgccctttagaggtgacaccgtaattggtaagtgcttttgtttttaataatagcattttcttacagaatgacttcagattaaaaggtaaaaatgaacctgttaggatgggggcgataaacgattatagcttaaaggttcargatattaatcggatacgttgccttgaagttgttacaagaacctgcttaaataatgggtacccaccgccctctccccccaacacaggagggcccttccccgccgtcacctcagtacccccacctcctcgcttccatgcccagggcccggcactctgggtcagttcttctcccaggcagacagtcgggagctgcagccacccaggccctcgtggaccaggagcgtgccggccgccgacaccacggaccctgtgggcagaggcggctccagttcctcagcagccccccacactgggctgccagagcacagtgaagggagcccccagggctgtggtgtcccggggctgtctcagcagcctcagaagttaggactttttttttgttaaytgaatagccttcacatttgttgcttgtgcaggatctaattgagttaaagatttgggtttatattggtgggagccgggggagaccgtttgaaggaaaagatttaggkgtaacaaaagaataaaagtttcccaaaatgtgatgtataaaaatttacagaatgctggtatttccctcaataagagcttacacaatttaacagccatgagaggaaggggccttagacttaacacaacgtggagaatgttcactttggcttttccacagattcctctcaaaggttaccatcgactttaagattagtattaatagaagctgtttttgctgttgtttttkatttcatggtgtttttgattgcctgggtacgctaacttgattttttgacagatggttggcaatggctgataaatgacactttgagacatctccatctcatctcaagtcactcccgccagcagatgaaggtacagtgagcatgggcgttcccggccggcgctgtggcggtgttagtgtgttagtcacggatggtgtttgtgttggcgactgtgcatcatgaggctgtccctgcagtagcctgataactgacaaatgggggcataattctatttggaatcccggatggtagcgtctacacggtttataaccagaaaatccaatacagccattggaatccgaatgtttaattttttattgcttctggctgttttaattatagttacctttgaaatactttttctgcatcaatagtaactgtgctctgttgagttccgtgtcctgtaggatctgaggtttggaaactccctttatgatgctcctgtgcagatgagaaaacagcaccccaggacctctgctcgcacacattgacctggtcatgttgtgtgggtgccagtgtgtgtgtgtgtccccggccacctgccctcccctcccgtcctgggggttacaggtggactttggactcacagagctgtaacgctgatctcattgcatagataagaaaccatgggcccggcgcagtggcgggtggatcacttgaggtcaggagttcgaggccagcctggccaacatggtgaaaccccatctctactaaaaatacaaaaattagcggggcgaggtggcgcgtgcctgtaatcccagctactcaagaggctgaggcaggagaattgcttgaacttgggaggcgaaggttgcagtgaaccgagatcacgccattgcactccagcctgggtgacaagagcaagaccctgcctcaaaaacaaaaacaaaaacaaaaacaaaaaaaaccatggttaccaacgttgactaggttttgatattgaggatgaagaatggaagtacatttaggtgtcttgtaattctctgacttcctccatgcttagcatttctttttccttagcatcttcaattttcttattttttttttcttaaggaacttgaacattctgtaggatccaagtaccgttctactaattgaatttgaatgcatcatgatcagtgcctcaaaattttatttcaaaagtccatgattaattcacactggccatgatgctggtgcactttgcccctgggattggcacaggtggtgactcgtggaatgcagcaccctgtagacgacgcacctcctctgctcatggcccccacctgccccgcycccagtgcctctccaaggctgctctgttggcctcggctcctgggcttcgggggagcggtggaaagaacacgtgggtttggtgtttgccacttgctggctgtgtggtcacgagaggctcctccgtaggtggcagaggtgggggttcgaggagacagtggcactgagccccgcacgcggcgggactggtgactctctgcccgctcctgctctgtgcagcaattgccgtccctcccaccacggttcctggtggccttgggatgggttcccgggggtctcctgctgtccggccccaactcctgttcccagtgcgcccccggagccctgtctctctaaatgaggctgacgtggcttggcctgaaggccctgccccgttactctgggtgcatagtgtatgcctttttcttcataactatttctgggaaagaaaaatatgctccattttattattgttccatattagaagacagacattgtggaaggaataatcaggttatccattcagtttcttagttgtagtggtagtaaagtgatgcgtgtatctgacagatgatggtgagcaggcgtgctggaaaggagtagcatgacttaggggttcttttggtttggttcgaaagtcattgctgtgccgagatctcagggtgacccgctgtgtccctggtcaggtccttctctgacctcaagggtgacctgctgtgtccttggccgggtgcttctccaacctcagggcgacccgctgggtccctggtcaggcaggggctgctctgacctcagggtgaccacggtgtccctggtcaggtgcttctccgacttcasagtgacctgctctgtccctggccgggggcttctccgagcagagctgctgtgcgctcaccgtgctgcctttgttttaggatgcagcagtctcggccctggctgctctatgcagtgaatattacatgaaggagccggggraggcagatcccgcaattcagggtgagtggggagcccttttcttgaagactccaggggcttccagcaggaagctgctggggagtgtctgggcacggaggaggcctcggttgtgcagtggagcagagccaccacgatcatggctggagtgggactgttcgggtctcaggttcccagccgaggagctgtgggcaggtcctgcagctgcccaggatgttgcatcagctctgaacaggtggctcagcagggacgcgtctctgttgacggcaccctcttgctccatcacccaggctggagtggtgtggcgtgattcggctcactgcaacctctgcctcctgagttcaagcaattcttgtgcctcagcctcctgagtaggtgggactacaggtgcctgccaccatacccggctaatttttgtatttttagtagagacggggttttactgcattggccaggctggaatcgaactcctgacctcaggtgatccacctgcctcagcctcccaaagttctgggattacaggtgtgagccactgcactcggtcagtgtttttagaatttttgtatgcaccgtgacatttttctgctgtgtgtttcactcgttaatacattttgctgttttttccttctttaygaaagtagcattaggctggctttacgccgtgtcccrtgcgtagctgctgtgccgcctcactgtacatcctgcacccccgtgctgaagttcaggcttgcttctcgcacatcatgttcgagggatctgcttcatgaatcgtactttwatttttaaagtgtcacatgcacatatgttggcccacagtgttcctttatgtcatatgatagaacatgcattattaatcacgtcaaaagtgtgtgaatcaccacttaaaattattataagtatataaaaatcatgcattagcttggcatggtggcacacacctgtaatcccagctacttgggaggctgagtgtggggttgaggctgcagcgagctaagcttgcaccacggcactccagcctgggtgacagaatgagactctctcaaaaaaaaaattctctttctgattcctattttgaggtaggccactttggaaacgtgtctgctttgggaacctcaggcggctcctcctttgttcactgtggctttgctcctgtttggggcacacgtcgggtgtggctgtacacgatgggcagcagagggcctctcttcacactcgttgcttcctttcagaggagctgatcacgcagtacctggctgagcttcggaaccccgaggagatgactcgctgtggcttctcgttggccttgggcgcccttccaggcttccttctgaaaggccggctccarcaggtgaggctggccacgcgcagtggacggggcctagggcgagggtgtgggagcctcgtgtgttggggcatgaggtaggccyagccgttaataaacccatcagtgcttgtagctgggagggggttcctggaaaccrgcacctgtggccaggaggaagggggcagagggcacccaaggtctgtggccccttagggccctggcgaaccctttgctgtcagaggacagacttgaaaaagctgaattctgggagggaggagaaggtgttgtttgtagaagcagctgccgagagtgaggagaacacagttgcctttgtgcgtygtggagccgggtcctgttttggttgcggccgtgcatcctgcatccaggtcggggcagaggtggttccacgtcctcccagaggtcagccccacgctggcctcagtgacctgctctctcacgctttcctgtggtgctggtcccactgaccaacctgccgggaactcctgcttgtctcccctccggccacctggcgtctgaagctggaataggccctggccactgggttccccacgcccttccctccccatgggatccagccttggcacttcaggatctgcagctccagacggactcctgcctgtgtggcgggtgggcctcrcagccgccatgccatctaaaactcgcmtgtgggggtttatccagttgaaacacagataaatgtgaaacaggatcacttggagatatgacagatgaggttgtcgggacccagcagcttcctttgtcaataccccaggtctcagcgtaggacaaaagggggggacctcaggtagggtgtggccagacccccagtgacaccctggggtgggggctggccgtggagaggctggaggtgacctctccccgggtgtccttcctgggttgtaccgggggccgtggagaggctggaggtgactcctccccgggtgtccttcctgggttgtactgggggccgtggagaggctggaggtgacctctccccgggtgtccttcctgggttgtaccrggggccrtggatggccgtgaggaaggtggtgccaggagctgcctatctcatggtgtggggtctgtggctccgggccaacattgccacctccctaaagagtgcactttgttatagcttatggytcttctgtgattctttattgctttccaggttctcacaggtttaagagcagttacccacacttcccccgaggacgtaagttttgctgagtccaggagagacggcttgaaggccattgcgaggtgagtcccaacagttcctccctaaagtcgtaagtctctgaaaggccagcagatgaacgctaaggggratgtttttgctcagaggcaggacttatgattcttcacttcctaggtttcctctcttccagaggatcgtcagtcccagctgctggaggctctttcattctcttgctgtcatagtcgtagtgaatgttaaacttctttagggacactgggccccttggagaattggagaatgtgtcctggcccaaggttggcaaagaggagctgaccctgccagccagtgtttggaatgatctctgcactcgttgacagacacgcacctggggccacgccatatgccctctcctccctgcaggcacacaagaggagcagtcccgcgggggccacgcacgcccccttctctcctatgccagcatccgttccctctagtcagggtgggaagtgggagggaccagccgcagggggcgtccccatccacctttcaaccggagagacggcagagcgtgacctcggggaagcacgtcccacgttccatacatgtggaaggagctctgtgtttctgatctacccgagggtcctggactgttctgagcgtgtcttctcaggatcaggaacacacatcagccctctgcgatgtggaagatgaggctcaccgatgtttgtttgttagctcacacmttttaaatttcaggatttgccagactgttggtgtgaaagcaggagccccagacgaagctgtgtgcggagagaatgtttcccagatttactgtgcgctgctgggctgcatggacgactacaccacggacagcagaggggacgtgggcacctggtacgtacgtagcagtgggtgagcgcttcttctgagaagcccatctattccgtggaaactcggaggccccgggcttttctgcagggagaaatctttgtagatttgtgccgtgttttgcgttttaaaggctctggggaagatgacctgttctctgctcccgggtgagcctgcgtggcagggctttgcaggtgcttgtccagcccgtcctcaggtgttgggcctgtgtcgtcctcgttgacagggtgtgagggaggacgcgtcttcaatgaaaggctgccggctgcttacattgggttttgccaacatttcttgctgtagtgggattgataacccctgaaacgcctgtgtgtgtaggatgcctcggggccccggtgtgtgtggctgtgggtggctccctgcacacgtccctgtagcgcacagggaacctctgcaggccccgtgactccctggcagcgtgcctgggctctgtgtggggttagtcacgggtgtcgaattcacacaggctgccggcgtggtgggcagaaccagggttggaacccccctctcaagctgggtgtctctgcctctccttgtcccatcagggtccgcaaggcygccatgaccagtctgatggatctgacacttctgctggctcggagccagcctgagctgatcgaggcccatacgtgagtgtcacgtcgcagctcttctgcatcctagagggcagccccgagcttggggaggctggcggggcgggcggtcctggtgctcagtggcatttgcactgctgggcacacaccctcctcccagagagcctctctggtccctgaccccaggtttgtgcaggcccctcctcctgcccccatagccatggcgtgagctggggcccatcctcctctgcccagtgcccccaggacgaggctctgctccccagcctgggcctccaacggtgctctggccagtttgatgacagccagcttcccggggtagggccgggcaggaggtggggacttctcagcttaggaccctgaacctgggggtctgctcctgccaggaccagctgagccatcactcagttccctgcacctgaggctgccattggggcctgcccttgctgtgtgtctctgtcgggggcackgggttgtgggtacccccaggccctgccctttctgtcggtctctctgtcgggggcactgagtcatggaggtccaggccctgcccttgcggatctctgtcaggggcactcagtcagggggtccaggccctgcccttgcgggtctctgtcgggggcactgagtcatgggggtccaggccctgcccttgctgtcagtctctctgtcagggacactyggccgtggggatcccagggcctgatttccttagttctcacctctttctctttccccctccccatctcttccccagccccagcttctctctccccatccccggcctctctgtccccatcactcttctccacccgctcctgtaatcctatttgttgtccctgcttcaaccctaagacctcatcagcacgcatgtaacacgtagcacatgtgtaacaagtacrtagcatgtatttgctgcgcacctgtagggttgggctcctgggatgtgaaggtaacggagtgtggttcttccgagccagtgtcctggtgtcagctgccaactcagccaccatgtcccgaggagcccgcatgtcctcgtggtgcttgggctggagtcacggctcggaccgcctgtgctcagtttaccgcccgctcttaatttaccgcccgcccttggtttacctcctgctctcggtttgcagctgtgagcgcatcatgtgctgtgtggcccagcaggccagtgagaagattgaccgtttccgtgctcacgccgccarcgtgttcctgacgctcctgcactttgacagccctcccatcccccacgtgccccaccgaggagaactggaaaagctgtttcccaggtactgtcggggtgtaggccccccgtgctggccccgcagccatggcragatcattggcrgcccggccttgtctcactcactctcttgcaggtccgaygtggcctccgtgaactggagtgcaccttcccaggccttcccacgcatcacccagctccttgggctgcccacctaccgctaccacgtcctgctggggctagtcgtgtccctgggcggcttgacggagtcgacggtgaggaggcgtcgggctggctggggcaggaggtggctccaggagtgcctggtgcttccctgtctcttgggagcrtgtatggagctgggccttttcttccattgctttctatctctctcgggcatatttggttagggggtcaggggcccagtgtcttcctcatgacccaggaggcttagggcctgtgggatggttgagtctgatgaaggtgggacagggccagcgccactctcttcctgcggccgcagccttggagctcccagcgtcccctcggggttcaatcctccaggacctgtgtctgatgcctgcatgtgggtacctgggctccatcaggttctagatmggcctccgccctccactttcagggctccaggcccagcttctcatgtctgtggggagggtctccagagccttggtctgtggctgagctgtggaacttgaaggcctctctgcatcttgtcactcgtggcccctgcaccttgggtcatgacctgctttatgtggcaaccctgtgacagctgctaagtcctagaaaacacgtaacaggacgtgaggtgccctctgcgccgtgtgggcgcgtgcggggagacccgggccccaggacgtgaggtgccctctgcgccgtgcgggcgcgtgcggggagacccgggccacatgcgagcggggccccgagacattctgcactcgggaattgcggggattatcaaatcccgcttcagtgggaaaygtgagcgaaacccaaggtgagtggccgcagcctttcgtcacgtgctctcccgcatgtcctragtgagggctcaggctgagctgccgttgccgagagccttgtgtctgcttcgggtgtctgcactgtgagtggctccgtgctggcrtccgcaycagccgcttggggccaraccttcgcgtctctgcagctcggagcagttctgctcttcagcagatgcttgaccggctrtagccaagcctgaggggtggcaggctcgggggtcccactgccttctgaggtgtctccgtgttgcagatccggcactccacccagagcctctttgagtacatgaagggcattcagagcgacccgcaggccctgggcagcttyagcgggacccttctgcagatctttgaggacaaccttctgaatgagaggtgagtggtgtctcttggggcctcagaggcgtgagtggtgctggtgcctctcaccacgttcccacagattcccggggtctcgcagggtctgtctggggtctgaagggagaagcgagacacacgctgtaccagttggtggctcagcgaggaagatgtgcctgcagcatatggttctccgggcggccaggcctcagcccctgcgcctcctcttctagcctccacatgaggcagggaaatgaccgttgtgtgtacaatggacgtaaaggtagtatgagtacaaggtggtccctgtgtgtaggaaggcgttgtgggagctcctccagcttggtgctcccacggacgtgcttgcggacgctcatcagccacccggcaagtgagagctctgygttcctgaggatggaatgtcaagtgagaaacatcgctgctttctagaagtttctggctttacatggaggcagagtatagaccctgtgggccttgacctcagaattgggaacatcctctggaagggttgttcccagcatgtgcgaggacgaggacacgggcctggtgtcccctcgggcggggcytcggcagcctctcccatgagagcacagatgccgctctcggcaaacaggaactyggcccagccatgttttcttttctcgttacgactataatcagctgcacataaaggggcagttcgatcgattttgataggtgtccacccttaaaatcttccccagtcaggacggtgggctccagcccaaggtttcctcccagcccttcgagtccgtgcccctgacctgcgtcaccatagcctcagcccatggtcacttgaggcgctgggccgcgtgccggtcgctcattcctccgtgccggtcgctcattccgccttgccgttcgctcattcctccttgctgaccagtcgtgtctgttggtggaggcaccacagtgcatctgtctgtgggcattttggttgttgccgcatcggggctgttgctggtagagctgcaggcagtctgtgtgtgcgagcctgtgggtaggtgtgcacagctgggcctccctctctgtgggctgcggagcccagctctcctgtgtgttagtcggcctgtgctaaagctctcctgatgctcctgtcgcccagaggggacctccccagcctccttttctgtggggtaaataccgaggcgccgcaggctggctcacacagaggcgaatgtctagctttggaaagctgctggagggtttccagaacgcccacgtgtcatgtctttctgctgatgctgtctgaggtcactctcactggcgcgttgctgttttatattctctttggagaagtgtcttcatttttttctgttctccttccctgactgttgtggtctgatcctcccttgtcacacatgtgacttgagggtgttttctccctgcctgtcctttcacgcaccgagcgggggcctcacactttcctcacgtcccagcatctccccttgttctctgaggcacagatttttctggtgtgtctaagacagcttgcctaatccgtggtcactgagattttctgttttgtcctagaagatttatagttttgggttgtgtatttagacctgggacgcgtcttgagtgaggtttcttacatggtatagcgtcggcacaggcaccttgacgcccagcggtgcccaccccaattgctgggagggctcccctctccgctgcattgccgttgcagctttgtaagaaactgtgggtttactttggactctyctgtgcccgacgtgtttgcttcactttgcaccagggccgtgctgtttctatcccttccactttaccatcattttcgaagttcagcgtcagcctccagccttgtttcttctttccacagttgttttgtcttttcctgaagctttgcgtttccacgtaaattataaagggggcttgtcgctttccactgggatcctgctgactctcagccattcagggagttgggcgtccttgttgctggtgtccagggtctcacagctccttctcccctcagggtgtccgtgccgctgctgaagacgctggaccacgtgctcacccacggctgcttcgacatcttcaccacggaggaggagtgaggctctgcttttcatgacttccyttccgattaagcctaagtagctcatgtattaaagaaaaagtcatcagacacagagatcagarttccaggaaatgatcttccagtgcgttctgggtcagttatggtgactgtaaataccgtcatcacagctggccctcaaaataacgcaataataacatatttacataatgacatattatgactgtaagtgcagtcagccccatctggggctgaggcgggggccctgctgtgcactctccccccagctatcccaccgggccaggggtgggcctcagggttgtgctgggagccgcagggcctgaaggggcctcggctgtacggggatgagactcgcaggggagagggcagaggccggtgacctggcgaggacttgcccaggagattggagctccttgcttctgcgccacgcggatgccccaggctggtctcagctgggttgttggctctgagtggtcatctcgttgctgccatattttcttgcttcattgaatttcactgtgttgggccagtcttttttttttttttttttttttgagacagggtctagctctgtttcccaggctggagtgcagtggcacaatcacagctcactgcagcctctacctcagcctcccaagtatctgggactacaggcatgcgctgtagtctaatgtacggctaatgtttgtatttttagtagagacaggatttcactatgtttcccaggctggtcttgaactcctggccccaagtgcctgccttggcctcctaaagtgctgggattacaggtgtgagccactgcgtctggcctggatatatttgtatctggggcacgttgggtcatctggagacagcgtggtctgtttttgggggcactgcttttttttttgtttgttttgagatggagtcttgctctgttgcccagggtgtagtgcagtggctcgatttcagctcaccgcaaccccgtcccgggttcaagcagttctctcgcagacttctgagtagctgagattacagctgtgcaccatcacacctggctgattgtttgtatttttagtagagacggggtttcaccacattggtcaggctggtctcgaactcctgacctcaagtgacctgcccacctcggcctcccaaagtgctgggattacaggcgtgagccactgagcctggcttgggcgctactcttaagctgtcaggtggacccagagctgtgctggtctccagggttttctgcccctttaaggtctctgctccctggcgcttcccttcccaccgctgctggggcagtgccggggcttctggccatcttttgggtggttcgtccccagccttggacagcgtcctcgtactcaggtactggctgacccaggcccaggttagtcctcagcggcccccaggaagccccctctggtgctcagaacctgagcgagctctgcagacttggaatttcccgcttctcaccacgggcttcccgctggagtctgccacctgctggacttggctctgccttaaccttcgggcgggaggcagatctggtctctgttgctccatctttgctggacgctgcacatgtttttaaatctaacagcattgaagggtttccccttttaatttcttaatggggcatcactgactgaccttcttacacctgctgttggaacagcctccatgttcacaggtgcacccagctcggttgtggcgtattatcctttaatacaatgctaaatactccatttaaattttttttttgagatggagttttgctgttgttgcccagactggagtgaattggtgcgatctcagctcactgcaacctctgcctcctgggttcaagtgattctcctgcctcagcctccctagtagctgggattacaggcatgtgctaccatgcccaggtaattttgtatttttagtagagatggggtttcaccatgttggtcaggctggtctcgaactcccgacctgaggtgatctgcccacttctgcctcccaaagtgctgggattataggcgtgagccaccgtacctggcctaaaatattgacatatatttttctggcttaaaaatttcaaaataagcnnnnnnnnnnnnnnnnnnnnnnnnnnnnnnnnnnnnnnnnnnnnnnnnnnnnnnnnnnnnnnnnnnnnnnnnnnnnnnnnnnnnnnnnnnnnnnnnnnnnnnnnnnnnnnnnnnnnnnnnnnnnnnnnnnnnnnnnnnnnnnnnnnnnnnnnnnnnnnnnnnnnnnnnnnnnnnnnnnnnnnnnnnnnnnnnnnnnnnnnnnnnnnnnnnnnnnnnnnnnnnnnnnnnnnnnnnnnnnnnnnnnnnnnnnnnnnnnnnnnnnnnnnnnnnnnnnnnnnnnnnnnnnnnnnnnnnnnnnnnnnnnnnnnnnnnnnnnnnnnnnnnnnnnnnnnnnnnnnnnnnnnnnnnnnnnnnnnnnnnnnnnnnnnnnnnnnnnnnnnnnnnnnnnnnnnnnnnnnnnnnnnnnnnnnnnnnnnnnnnnnnnnnnnnnnnnnnnnnnnnnnnnnnnnnnnnnnnnnnnnnnnnnnnnnnnnnnnnnnnnnnnnnnnnnnnnnnnnnnnnnnnnnnnnnnnnnnnnnnnnnnnnnnnnnnnnnnnnnnnnnnnnnnnnnnnnnnnnnnnnnnnnnnnnnnnnnnnnnnnnnnnnnnnnnnnnnnnnnnnnnnnnnnnnnnnnnnnnnnnnnnnnnnnnnnnnnnnnnnnnnnnnnnnnnnnnnnnnnnnnnnnnnnnnnnnnnnnnnnnnnnnnnnnnnnnnnnnnnnnnnnnnnnnnnnnnnnnnnnnnnnnnnnnnnnnnnnnnnnnnnnnnnnnnnnnnnnnnnnnnnnnnnnnnnnnnnnnnnnnnnnnnnnnnnnnnnnnnnnnnnnnnnnnnnnnnnnnnnnnnnnnnnnnnnnnnnnnnnnnnnnnnnnnnnnnnnnnnnnnnnnnnnnnnnnnnnnnnnnnnnnnnnnnnnnnnnnnnnnnnnnnnnnnnnnnnnnnnnnnnnnnnnnnnnnnnnnnnnnnnnnnnnnnnnnnnnnnnnnnnnnnnnnnnnnnnnnnnnnnnnnnnnnnnnnnnnnnnnnnnnnnnnnnnnnnnnnnnnnnnnnnnnnnnnnnnnnnnnnnnnnnnnnnnnnnnnnnnnnnnnnnnnnnnnnnnnnnnnnnnnnnnnnnnnnnnnnnnnnnnnnnnnnnnnnnnnnnnnnnnnnnnnnnnnnnnnnnnnnnnnnnnnnnnnnnnnnnnnnnnnnnnnnnnnnnnnnnnnnnnnnnnnnnnnnnnnnnnnnnnnnnnnnnnnnnnnnnnnnnnnnnnnnnnnnnnnnnnnnnnnnnnnnnnnnnnnnnnnnnnnnnnnnnnnnnnnnnnnnnnnnnnnnnnnnnnnnnnnnnnnnnnnnnnnnnnnnnnnnnnnnnnnnnnnnnnnnnnnnnnnnnnnnnnnnnnnnnnnnnnnnnnnnnnnnnnnnnnnnnnnnnnnnnnnnnnnnnnnnnnnnnnnnnnnnnnnnnnnnnnnnnnnnnnnnnnnnnnnnnnnnnnnnnnnnnnnnnnnnnnnnnnnnnnnnnnnnnnnnnnnnnnnnnnnnnnnnnnnnnnnnnnnnnnnnnnnnnnnnnnnnnnnnnnnnnnnnnnnnnnnnnnnnnnnnnnnnnnnnnnnnnnnnnnnnnnnnnnnnnnnnnnnnnnnnnnnnnnnnnnnnnnnnnnnnnnnnnnnnnnnnnnnnnnnnnnnnnnnnnnnnnnnnnnnnnnnnnnnnnnnnnnnnnnnnnnnnnnnnnnnnnnnnnnnnnnnnnnnnnnnnnnnnnnnnnnnnnnnnnnnnnnnnnnnnnnnnnnnnnnnnnnnnnnnnnnnnnnnnnnnnnnnnnnnnnnnnnnnnnnnnnnnnnnnnnnnnnnnnnnnnnnnnnnnnnnnnnnnnnnnnnnnnnnnnnnnnnnnnnnnnnnnnnnnnnnnnnnnnnnnnnnnnnnnnnnnnnnnnnnnnnnnnnnnnnnnnnnnnnnnnnnnnnnnnnnnnnnnnnnnnnnnnnnnnnnnnnnnnnnnnnnnnnnnnnnnnnnnnnnnnnnnnnnnnnnnnnnnnnnnnnnnnnnnnnnnnnnnnnnnnnnnnnnnnnnnnnnnnnnnnnnnnnnnnnnnnnnnnnnnnnnnnnnnnnnnnnnnnnnnnnnnnnnnnnnnnnnnnnnnnnnnnnnnnnnnnnnnnnnnnnnnnnnnnnnnnnnnnnnnnnnnnnnnnnnnnnnnnnnnnnnnnnnnnnnnnnnnnnnnnnnnnnnnnnnnnnnnnnnnnnnnnnnnnnnnnnnnnnnnnnnnnnnnnnnnnnnnnnnnnnnnnnnnnnnnnnnnnnnnnnnnnnnnnnnnnnnnnnnnnnnnnnnnnnnnnnnnnnnnnnnnnnnnnnnnnnnnnnnnnnnnnnnnnnnnnnnnnnnnnnnnnnnnnnnnnnnnnnnnnnnnnnnnnnnnnnnnnnnnnnnnnnnnnnnnnnnnnnnnnnnnnnnnnnnnnnnnnnnnnnnnnnnnnnnnnnnnnnnnnnnnnnnnnnnnnnnnnnnnnnnnnnnnnnnnnnnnnnnnnnnnnnnnnnnnnnnnnnnnnnnnnnnnnnnnnnnnnnnnnnnnnnnnnnnnnnnnnnnnnnnnnnnnnnnnnnnnnnnnnnnnnnnnnnnnnnnnnnnnnnnnnnnnnnnnnnnnnnnnnnnnnnnnnnnnnnnnnnnnnnnnnnnnnnnnnnnnnnnnnnnnnnnnnnnnnnnnnnnnnnnnnnnnnnnnnnnnnnnnnnnnnnnnnnnnnnnnnnnnnnnnnnnnnnnnnnnnnnnnnnnnnnnnnnnnnnnnnnnnnnnnnnnnnnnnnnnnnnnnnnnnnnnnnnnnnnnnnnnnnnnnnnnnnnnnnnnnnnnnnnnnnnnnnnnnnnnnnnnnnnnnnnnnnnnnnnnnnnnnnnnnnnnnnnnnnnnnnnnnnnnnnnnnnnnnnnnnnnnnnnnnnnnnnnnnnnnnnnnnnnnnnnnnnnnnnnnnnnnnnnnnnnnnnnnnnnnnnnnnnnnnnnnnnnnnnnnnnnnnnnnnnnnnnnnnnnnnnnnnnnnnnnnnnnnnnnnnnnnnnnnnnnnnnnnnnnnnnnnnnnnnnnnnnnnnnnnnnnnnnnnnnnnnnnnnnnnnnnnnnnnnnnnnnnnnnnnnnnnnnnnnnnnnnnnnnnnnnnnnnnnnnnnnnnnnnnnnnnnnnnnnnnnnnnnnnnnnnnnnnnnnnnnnnnnnnnnnnnnnnnnnnnnnnnnnnnnnnnnnnnnnnnnnnnnnnnnnnnnnnnnnnnnnnnnnnnnnnnnnnnnnnnnnnnnnnnnnnnnnnnnnnnnnnnnnnnnnnnnnnnnnnnnnnnnnnnnnnnnnnnnnnnnnnnnnnnnnnnnnnnnnnnnnnnnnnnnnnnnnnnnnnnnnnnnnnnnnnnnnnnnnnnnnnnnnnnnnnnnnnnnnnnnnnnnnnnnnnnnnnnnnnnnnnnnnnnnnnnnnnnnnnnnnnnnnnnnnnnnnnnnnnnnnnnnnnnnnnnnnnnnnnnnnnnnnnnnnnnnnnnnnnnnnnnnnnnnnnnnnnnnnnnnnnnnnnnnnnnnnnnnnnnnnnnnnnnnnnnnnnnnnnnnnnnnnnnnnnnnnnnnnnnnnnnnnnnnnnnnnnnnnnnnnnnnnnnnnnnnnnnnnnnnnnnnnnnnnnnnnnnnnnnnnnnnnnnnnnnnnnnnnnnnnnnnnnnnnnnnnnnnnnnnnnnnnnnnnnnnnnnnnnnnnnnnnnnnnnnnnnnnnnnnnnnnnnnnnnnnnnnnnnnnnnnnnnnnnnnnnnnnnnnnnnnnnnnnnnnnnnnnnnnnnnnnnnnnnnnnnnnnnnnnnnnnnnnnnnnnnnnnnnnnnnnnnnnnnnnnnnnnnnnnnnnnnnnnnnnnnnnnnnnnnnnnnnnnnnnnnnnnnnnnnnnnnnnnnnnnnnnnnnnnnnnnnnnnnnnnnnnnnnnnnnnnnnnnnnnnnnnnnnnnnnnnnnnnnnnnnnnnnnnnnnnnnnnnnnnnnnnnnnnnnnnnnnnnnnnnnnnnnnnnnnnnnnnnnnnnnnnnnnnnnnnnnnnnnnnnnnnnnnnnnnnnnnnnnnnnnnnnnnnnnnnnnnnnnnnnnnnnnnnnnnnnnnnnnnnnnnnnnnnnnnnnnnnnnnnnnnnnnnnnnnnnnnnnnnnnnnnnnnnnnnnnnnnnnnnnnnnnnnnnnnnnnnnnnnnnnnnnnnnnnnnnnnnnnnnnnnnnnnnnnnnnnnnnnnnnnnnnnnnnnnnnnnnnnnnnnnnnnnnnnnnnnnnnnnnnnnnnnnnnnnnnnnnnnnnnnnnnnnnnnnnnnnnnnnnnnnnnnnnnnnnnnnnnnnnnnnnnnnnnnnnnnnnnnnnnnnnnnnnnnnnnnnnnnnnnnnnnnnnnnnnnnnnnnnnnnnnnnnnnnnnnnnnnnnnnnnnnnnnnnnnnnnnnnnnnnnnnnnnnnnnnnnnnnnnnnnnnnnnnnnnnnnnnnnnnnnnnnnnnnnnnnnnnnnnnnnnnnnnnnnnnnnnnnnnnnnnnnnnnnnnnnnnnnnnnnnnnnnnnnnnnnnnnnnnnnnnnnnnnnnnnnnnnnnnnnnnnnnnnnnnnnnnnnnnnnnnnnnnnnnnnnnnnnnnnnnnnnnnnnnnnnnnnnnnnnnnnnnnnnnnnnnnnncaggcgagattgcttcccctggtgaaaagagagcaggtgagattgcttctctggtgagggagcaggttggttaatagcaggtgagattgcttctctggtgaaaacagagcaggcgagattgcttctctggtgagggagcaggttggttaatagatagcgggcgagattgcttctctggtgagggagcaggttggttaatagatagcgggcgagattgcttctctggtgaggtagcaggttggttaatagagagcaggtgagagtgcttctctgatgaaaagagagcaggcgagattgcttctctggtgagggagcaggttggttaatagcaggcgagattgcttctctggtgagggagcaggttagttaatagagagcaggcgagattgcttctctggtgagggagcaggttggttaataaagcatttaaacaagaatgatgtcatcttcactgctgggatcctgcagctagctgtgtgtctgtggagggaggaggtggttaatgggcctggaaggcacctcctcttggttgcagccctgctgtggctgggatgggatgcagggtcagcgtcctcctcctgacgccttccactgacggggctccctggcctgggtcctgtcgtctctccggggtggggcggtggcgcttccctcyggcaaatgcactgcatccctgtcccagatccggaagaccacggccagccaggtgtacgagacattgctcacctacagtgacgtcgtgggcgcggatgtgctggacgaggtggtgactgtgctcagtgacactgcgtggtgagtgaaggcccttcctgcacggccacctgggcctggcaccgcccctcttcctgtccccaccgtgtctactcgtctctcccaaaaccctctgataggaggaggaaagagggttcccaggtctccacatcctctgcttrggttttacaaggcagccgtgctgctgtagccgaaacctcttctcaaccgcyctgtccccaaacagtgtcaggtgtcaggaacacagcaaagccatccatcccaccaggggagcgggcacctgtaccacaaggctgtgtctggtggcctgtggagcagagggcactgaaggcctggcaggtgctgctgccccagacctctctaaagttctcttggaataggccgtgtgagcacctgttggaaatcaagaggcacaggcggaaataagaaaagctctccccacgcctctgctctgatgtccacccccttcctcagggccatgaggccctcaggaggccatagtgccactctccacgtttactttggcaggcacagtttctgcaacatgggctggcttctttaccatgggtggagtagaatggcggttttgaaagatgtgtgtattgagttgggggtgggagggtctgaatgagagcagagtggggaaagtgcaggctcaggtgtcctgggccaaccggtatgttcctgggaacagcagtgatggtgtcttacacatatgggcatgggcacccatgctggctcacacacatgctcactcgmgcgmacacacacacacacaywcacacacacacacacttctaaaaggggagcagtctcgtcaccccgtgttggagatcaggactgaagcaaccagaggctgtgtgggtgtccacatggcatacccggggtggtggagtcccaggtgtcctgcctgtggacgctgctctgttttgagtgccgactgtgagggcctccgtgctgatcccggtgcgttgctacaggtctgtggggtccacgccccttgttgaatccagcaaggacgtaggtgacgttccctaggtgtctcctcggaacagtgaccttccaacagggctgggttcccatagagctcacgcaccaggcagccgctgtggcctcggaggacagaggtggcctctccagggcttccgcgaggttttctggtttggggaggagtgtgtgtctgctcctaaacaaacacgtggtcccaggagaggaaccgggagcagctgggctgtcttctcaacatgcgttgagagaatggccatcttaactactgctctggagacccgtttttacaatgatttttttwaaaaaaaacacyaaggtgcattctggaccagattctaaaataattggctttaggactgaagaagccaggtgtcccgagcggggcgaggcctcctccagcgaggctgggtcggggtggcctcctttcctcacatcagggagggaggaactagcagggtgggcctgggggcttctcctatcgtttaatcccctttctgttaaaaaaaaaaatccttagaatttaaagagaatattttaaattagaaacgaaaaacatgccccagatatctccacagcattgctagaatttttatttcgcatcaacagctaaattaaaacctggaaaacccttgtcagcccctccttggcctcgcttggtctgtcctcccgcagtccctgcgctgggcgtggtccttcccgaggggcaccccttgttgggaaggaaccgtcctcctgcgattccggaaagggctcaggctcgaggctctgctggagaacgtgctcctgtgacgtcttttctgccctcagcctggctatggatgtcgggggtgaggtctcctttccctgactgcggccatggaagcttgacgcgggacctccgcacacctgaggttctccggtgggcactcgagagactcacggctctccctctcctcacagggacgcrgagcttgcagtggtgagagagcagcgcaaccgtctgtgtgaccttctgggcgtacccaggccccagcyggtgccccaggtaaccctgtcaccttcacagcatgaggtgcctgtgcttccctgagctctggaatgttctggggccagcggctgtgcttagcttctgccagcacgtccacacggcccgttccctcgtctcatgtcaggacccctgggattacgggacyagcagagctgccttctctggccactgcccacacctgtgggcccctgtggcatccaggccacttgctctggggcgtttggggggccggggagtgggtggagctggcaccagcttgatccaggctcctcatgcctggccctggggtctgtttgtgctccaagtgccaagagtgccaccctacccctcctcatctgcttcccatgagtggggccggggctgggtgagaggcccccagaagctgcccctgtgcacctcaccagcccgtcactcttcttctaaagtaacaaaaacaagtacctcagttctcacgggggctggggcccagggttgctgtgctgtctctctagttaccagggttggctccttcctctcagcctccttccggcaggaggttatatctgagagggaggaggagaaccatgtccagatacatgggggcagtggggatgggctgagcatcaggacacagcctcccccatttctgtgtgtgtaaaggctgaactcaacagcagactttggaattaaatgtgctttttacatttttattaggaaaaatttcaaacgtgtgaatgcaggttaagagcagtgcagtgaacctcccttcccgctccccagatggggtgcccttccgaggacacgttagtcatgagcacctgtcagccacatagctcaggctgccgggtgtgtgggaaacggcacaaatggtttcctgcaggaaccgtgtcagtccccacacagggcccagaggggtgagggtcccctggctgggaatggtgtgtgttggagctgaccagcctgagcttgtcttgtctcttcttcagcctggtgcctgctgaagccagtcctggagcccatacctcacccctgcctggtgaggatgtcttgttcctgagggaggcyggtgtggaaagcctcrcacagtggtgcctccagctgttgaagggtagcgctggcccttggaggctggcactagctgacagcttttcctctctgcacctgcgctctggtgacttggggtggacgcctctgccttcacttgaacacaaatgtgcttcctataaaatcatgtaccaagaagttcctgccttttgtctctgagcctgatgtgtgtaggggtgatggaaaggctcactgcccagggrtcagccagaggggaggtgggctgcactcctcctgcctggagaccaggcccccttcttgcctggtgctgtccctgctgtgggagacgtctggccacaggcagtgccccacccagtcttggagagagatgaatgttaaatcagaggttcaaatgctagagaactgagaagccctggtggcaggcatggtctggagtgctgggcagatgctgtttctgggcccgtctgcctggtgggggtgctgtcctcccccctgtgcacacgtgagcatcgtgcatgtggcccctctgcagtgcaggagtcactgattgatgggtgtgccgaccagcagcttcacaaatgtctgctgcaaggggaatygtcagagtccaatgtgtgcctctacagtaatgtsggaaataaataccattcttgaaataattacactgtcttaggagagcctgggcagagtccacacttgggtttttaggcaaagggcaggaggctacctttgtctctgtgtctgagctcgtgctgatccatcccaaagctggtgaggggaacgtgtataaaaatttcactgtggtagcaacccacacccatctctgggacctgtgctgtgctcatagggcttgaggtgcagaaccacggccagcagcaccaaagcagccccaggtgtggccactcagaggcccaagggcttgggtgagcaaccctttccctatgtgaggagcccaggggtgccatgtgcgtggtgtagattagggtggctccctggcctgctctcaggtggggatggggcctggacacaggaacatgggcaggccgagaactgggaggtgccaccgcatctgtgaggcttgtgaggtcaccaggaccacaagaccaggactgtgacagtccgtgctgtgtgtttagcagacagctcttcacgggatgtgtgtgacgacctggccacacaggagtgtggggttaacacactactgttgttgtgtttgacctggtggccaatggtctttataccctaaaagagccttgggttacatttttacgagatttaaatattttattccaacctgtgtaataggggtctcctcctccttgaactgtcccgattggctggggtcacgtggtgagggtcctgggtgaccaggcctagccttggccacatgagtccacacagtggaaaaggcttggctcctgtggtcggcacacacgagactctggttgcgcctgctgggtgtggaacaggcgcaccatcgccatgcctgcagctcacaaagctcctgctggcctgggatgcactgaggatggaaggaacaagtggcttctgagaaaaacatgatgaactgttcttagtgcaattaaaagaagattccagataaatggcattttaagacatggaggcaggtcgattacccacccagacccatcagtgacactatgtggcaaagcagttcttcttttaatgtcggtctaacttagcaacccgaggaaagtggatcactccactggccactgcctctttctttcccactggatcccatccatcactggggcacttgtgctcaccagacacctggtggcctggaaagccctctttcagcagccgtttctggagcccaccagggtccaggtgatagagtttggcaaggaaccccttgctcacatgatagctggggcagacaatagcaaatgaacaagcaagcaccatcaaggcaggcaacactgagtgctatgaacaaagataaagtgggcaatggaatggcatgttgggtgttgactccgagaaggtgttcagaaaacctctctgaaggggcagcatttgggcagaggtccagactgtgtccaatggcagaaaagagaatgcttgtggtcccagaagtggagcaagctttgtgagtttagagagcagcaagaagccagtatccctgggaccggggagctgatgtgggatttgtgtacccacaaacacgttctaggtgctaaccagaaaccctccatgtgagagcagagaccttggagatcctgagggtttctgctgagccctggaatctagtcacgctattttgatagcagaatggatgagagaatttaaggcccagggccagatctaatggaccgctatataaagctgggaccctaaataagtctttttcaaaggaacagcagcaagactcttatctcaatctatctcccctgaagtggcctgaattaatactacctgtatgatccccaaaactcctaaagtggaaaatttgattgacttggccctgaccagtggtattcccagacaagggcagaagatgcaaatacaaaacctctctggtagaatgtaggctataatatgagtacatttttgaaaagggctagaaatgatcaagaagagattagaaaaaaacagagcccctagaaatgtaagaagtgaaatgaaaagctcaatggatagcttagacacagctgaagagagaattagaaaactggaagatctgaaaacattatccagagaactggaagatatgacagcaacatcaagagacattgaagaatgtctaacctttgggtaattggggtctcagaatgaaatgaaatgatgcagatattccatactgacatgcaacagtccccagatacagaagcctaacagtctcacatttagacctgccacagtgaaactgcagaactgtaagaaggacagagtgatataaacgactaccaatttcccagcagcagcactggagttgagcagtgagtagaccaaggtcttcattatgctgagagaaaatagctgtcaagttgcttgaattgtgcccacagcataacattaaagaagagaacaaaattaagtcatttagataaaaatatgccattcttatctgtttggttttttaatcttggcttaatatttggggttgagtcatttgttttgagagctgtcctgtttattgcagggtgttcagcaacatcccagatggaagcagcatccccctacccagctgtgacaaaaagaaaaaaaaatgtctccagacactgccaaatatcttctgggggtgcccctggttgagaaccactgctttagtggataaactttaggcaggagggaaatgatcgcagttggatagttggaggaatgtggagcaagggaagcaataaactgtgaccataaaaacatagaaagatggcttatatgtggatttttttttaaagcacgtagaattgcttaaaatggacaacagcagcatataaatcagtggcagagttggtggctgaatttagagcatcttaagtctatgttctcctggaacagagtgcagataattcagttatcagcttggctaggtgcatgttgaagtatttagtcacacacaaacagttaatgtatggggaagataacttctatactagtaggagagaaatggaacaagaataaaaaatacactatcaaaatatgcaagaatggcaagaggaaaaggcagaacaagctgcaaaacacacacacaattagaaataaatattttgggacacaataaatgtgaatggattaaaacctctgttaatgacaaagttctccagttaaaggaaggcaaatagtgttattaggaatagattactatatgatgattaaaggctcagttcaacaggaagatgattgatagaactttcctacatttgtaacacagtcttagaagatattaaagcaaacattcaagaagaaattgatcacctactaccatagtgtattttattgaattggtacatttcaataaagtgtcataaggcacggttgaaggagaaaaacttgacccaatggacagttacagaacccaagtgtgtgtgtgtgtgtgtgtgtgtgtgtgtgtgtacacagaaattttaaaaatgtttttaaaaacatctctttaaaagaaataatgaaaattataaaatatataatgaaagataaaagttaatcaaaacagatagaattcacctaaagtggtgcttaagcgattctgaagtcgtgaattatacattacagaagaaaggctggaaattaatgagctgaacataagcagaggactaactgtaaagaaaattagaataagagcagaatgaaaaggaaatgaaacataataaagaaacaaacccagatggttcttcggtgaaaagacccacctgggagcagctgccatgggtccgtcagctgaagtgaaggaagtcctggccctcctgcaagtgcagtgacctcaggttgtcctcaaaggcgccccctgtgaggtcctgtcaggagcagcagattcagctcagtccggtctcctggctctaggaggccactgtggagcctcctccagggccaggggttgggggtggcctgtgtccacctgtcaagtgttctgctcctctgctaatagcggagaggctggaaggagacaaaggccagagagggcagcagccggcactgcttgtaccacaggccctgttggtcaccagaggggaggccccccctgccttctggccttgcctctctacataaggtggctgactctccctgggggcactcggaatggaatgagactaacaggcaatgcctctgctgtttgaccagggcagacccaccttccctccacacacccacccctctgcacaggccaggagtgggaggaggcccctcagacagaaactgcatctcagaaccatcaacagctgcccctgtctgatcccctctggcctctgtcatccccacccctgcaatggagtgagggctgtgaccccgggtccctggatgcttaatcttgtcctgtgtgctggccttggccaggtcacctactctcctgtatgaggccacagcaggtgtccagaaatgcctttcagacgtgccctgcaccccagcacctcctgaacaagttcctgaagacagcccggcagagtggtggacacaagtctctggcctctggcaggacagaggagggactatgcattcctgtcacagtccttggtccttgggcccagcaggaggaatcggagcttggctgcgccccttacccccaccacatcagaatccattacaccacctaccactgctgtcactcaaatgatgctgtcactcaaagccatccttcctggaaaacatttccacacactctgccgctatctgtccttcctcccttgtctctctgctctagagtttgcaaaggaaacacacctgagttcagggaccaggccagcccagtgcgtgttgacaccgtcttaaacaagactctgttaaaactagatgcttctgtaaagcaacatgttccattaggagaatgaaaaggcaaaccacaaaatggaggaagacatttgcaaaacattaaaccaacaaagtcgagcagccagaggtgtaggggactcctacaggtcaggagagacgcagcgtgcagtaggccggtggggaaccctgatgagaaacaccgccagagaggaaggaactccagtgtccagcgggcacggggggttgttggtcagactcacacctgaaaccaccatgagaacacactccccaaacggctggcgaccaagtgcccagcccagtgtgagggagccgagcagctgggccctctggctctgggcatgttcctgggcatcatccagagaagctgaggatgcagccacacccacgacctgccttccactcccaggattagacccgaggcagggatgctcacgcaggaggacacagcgtccttgcaagggcaaaccgggaaccactgcccacaggcctgggtcctggcgtggcctctgggtggggtggcgtttgcacacgggacgtggagaaagtccacaccatgcacagcgatacgcacacaccccaaacacgtggagtgaaaaccagatgcgagaacacagacactggattctgctcacatgaactacaaaaataggataaattagactatggtttagggatgtgttcacgcacacgccatgagggttggccctgccaggtgccaaatgcacgttcacaaccaacatagacggcatttcgttcctggaaaagcagtgatgtaaacgatgttgggacaattatccaaatagaaaaattggcatctgtaatcaaaagaaattccagttgtatcaaagatgtaattaaaaactagaaatcccagaagcaaaatgggacaatgttgttttttaaatttcacaaccaggagtgattgtcttagaatgaatcagactccataaatgaaagtcacttaatttgattatatcacaatggcaaaaatacaaaaatatcaaatggcaggaaaatttgcagcatgtcggagagttttccttatgaaaaatactgaccaatagaaaaatgggctaatgaaaataataatttactgaaggggaaataaagcagtttataaatatgtgagaagatgctttccctccctttaagggcacgaggcaggtgctccatcgctggtgggttgggr

SEQ ID NO: 97943 - DNA, 62499 bp, Homo sapiens
  misc_feature (1)...(62499): n = A,T,C or G
gggtaaactgagtcagggtctgcctgttccttcctatccccaggaagggctgggctcaggagaacaatggctcagactcaatttgtctcagcttgattcatgtgtgtcccctgaacccaggtggtgggtggaggccaaaacccctcaggccggcccatgcggttcattccacgccatccttggcaaaaaggaggaattatgatctgacaagcaggacctgctgcttcctgctcagcgctgcccagcatgaaagactacagctcaggcctcccctctctccaggggacagagttcctcaaaaccaacaggaaactcctatggggcagagccaggagttggctgaccttatcccataaacaggagagtcgacacaatcacacaccaggcacttccgacctccctctgctgctgtaaatgcccaaacagctcaaaactcccagcatgtgagggggaggggccaggggggctcaagggtgtgcattctgccaggaccacacacagctctatctacctcttgcatgggaaagaggtccaggggagccgggcgcggtggctcatgcctataatcccagcactttgggaggccaaggcggcggatcacaaggtcaggagatcaagaccatcctggctaacatggtgaaaccccgtctctactaaaaatacaaaaaaaattagccgggcgtggtggcgggcgcctgtagtcccagctactcgggaggctgaggcaggagaatggagtgaacccgggaggcagagcttgcagtgagctgagattgtgccactgcactccagcctgggtgacaaagactccatctcaaaaaaaaaagaggtccgggggatatcattatatgaaacaaaagcaaactgtgaatcagcaactcaaacatgaccagatttttataaaaataagcaaatggtaacaatagatgtggaagaatataccccttcccattcacacctctgaagatgagaatcagcagagactcatttcctagatgacattaaagatccaaacaggtctggcatggtggctcacacccataatcccagcactttaggaggccaaggcaggagcatctcttgaacccaggagttcgagaccagcctgggcaatgtagagaggctctatctccataataaataaataaataaaattagctgggcacagtagtgcacacctgcagtcccagctagttgggaggctgaggcaggaggatcgctggagccttggagatcgaggctgcagtgagtcatgatggtgccactgcactccagcctgggcaacagagtgagaccctgtcccccaaaaatagccaaacagtataaaaccatataatgaatatacaactatgttggtaattacaaaaaaaaaaaattactatttcttttaaaatccaggctgggagactcaggccttccttcacacaaaaaactgaggtgagagataaaggcaggaaggcctcagggcagacaacagaagaccctggcccaggattccagggtctggattcaagccgcatgtccttgccttctttacagatgagtctgggcaagctgcttcctcactctgattctcagtttccacatctgtaaactggagataatggccactgcctaagcatcctcaaatggtcaaatgagatcaccgacctgagtatgtttggcaaattacacagccgtctatacacacaccagctatgactcgggaccaccttctaggacatgcactctgccaactgcctgctctatgtcaacatatttaatcctccaaatgttctaaagggactctcctgcctctgggaactgttttccaaagcacaggccaaggaatcccagtccccaaagatgtctacacgatcaaataagtgtggggaaacacgagtcgctagctcccttatcgtgatcagctcaatcctgatgacggctctgattcaagactctgataagtcctgcagcaaggataacaagaagtctttgtttcctggaattatcaaaccactgtgaccgaagaaactggtgtctcatggaacacacttgggaaacgtggtccacgctttttgggaaatgtggtcatgaggctgcattagcaagacccagactgataagatctggggtgaaggagaaaaaacagaggtttgcaatgaaacaactcagcattcaatgagtgcggcaagcacacattactcagcgggagaaggaggaagagagtaattctgctgtctgccactctaccctggacctacagcaagaaaagcaaaggactgtggggatggagatgctaccctttgctccccaggctgggaagggcacttgactggagctggagctggctgagaaggagaggggcccagtccttaccccaaggatggctctgctatctgcgcgtcggctgtcggtgctgaggctggcccgcgtctgcctgtgcaggatcctggcattccttttgctccatggacgctgcctccctacaaggaagcgagagctgccgtcagcaggcacatgtgtgactgtcgcagttacctgccacaccgccagcacttcctgagagcctgcttggtagcaggcccttggctgggctctggggtgacaaaagaggttttttttgtatagtggtgcaatctcggttcactgcaacctccgcctcccgcattcaagtgattctcctgcctcagcctctcgagtagatgggatttcaggtgcgcaccaccaagcctggctaattttttgtatttttagtagagacagcgtttccccatgttagccaggctgctctcaaactcctaacctccagggatctgcccgcctcggcctcccaaagtattgggattacaggcatgagccaccgcgcctggcagacaaaagaggttctgacagagcacctccctccagaacctggtctactgaggaggtgccaagtcagtagcgacggtctgagagctcagagctctgctgcgggggagccaggagaagcactagacccagactagtggggtcagggaaggctttctggaggaggagttgtctgagttgactcctaagagtaggagctggaaaaagagcattccaggcaggaggaacagcacatgtttacctggaggagagagtacatggcatctggagaaggcttgcgggctcggcatggcgagatccagagccagagaggggaagtggcaagagatgagccacagtggggtggctgggtcaggcagagaccagccagtgcccagactccaacttaaacaccaaatccacccatcatctccgacagtcaaccagcctctggtgagcatctactccatatgcgccagacactgtgcagaactgtgcatgggagtggcagggtagggaaagctgtgatcactacgacacgggtttcggggagccaggagctgggagagtggcccagccaccagagagagccaaaggatcagcaggagttacccaggaaggaggagggcgggggtagacaaagacacctggactgatctaggagggatggctgtttttccatcatttctaccactgggtatttactatattgactaagttccaggccctgtgctgggagggcagacatggaagatggtctccgccgtcatgggaggtaggtcaataaccctgcaattccatacggggtggtggtgactaggcagtaaagtacctacagctatataggcacggaggccatccaagccaacctctacctcactctaccctccttgtcaaggatggggcacccactgaggctgggtggtccaatcacctgcccatggcagagccaggtccagaacttgggcccctggactccctgtcactaattattctagtccctcctcttccagaaagcataccctgaccaccccctacataaccacccagagctaattccttcttcctctgggctgcctctgtaatatttctattaatatggtggccacagtatatcagaacttatgtgtcttctggtttgcctgtcctcccagactgcagctctcaggaggccagggatgttttcccagccatcccaggcccaagacaggcactttctaaagaatggctgaatgaatgaatgaatgaatgaatgagtcaaggcatggagagacactgtgctgggctctaagagccccacatccatcccacctgaatctccaagaggtcttggcccatcagtgtgtgcctcagtttctccatgtgaaaacctggaatcagctctactctaagacgaggcagtcaggaaccaggctgatttccctccaactcctacaggcaaggtccaggccaagccaggcagcaacccagggtccggccacttccctgagttctgacccacggcagtgatccccaggattccctacagtccagaaaggtcattcaagagtttgcaaaggaaacggcttcctggtgggtgtgcctaagggatggagaaccaccacatctagtcaagttctggggggaagtcatgaacatttcctgtgcccccgctctgtttttttttttgtttttttgagatggaattttgctcttcttgcccaagctggagtgcaatggcgcgatcttggctcactgcaacctctgcctgctgggttcaagcaattctcctgcctcagcctcccgaatagctgggattacgggtgcgcagccccatgcctggctaattttttgtatttttagtagagacaaggtttcactatgttggccaggctggtctcgaactcctgacctcgtgatctgcccgcttcagcctcccaacgtgctgggattacaggcgtgagccaccacgcccggccctgcaccccctgctctgtaccctatggtccctagaacgcagagggcatcagaccccatgccaaagccctgagaccaggaaaacaaggaagcagagaccagccacccagtcactcatccctggcatgtccacaacagcctcctccagcacaggtcatctgtccttgcctcacttcatgagccagaggaagacttgaccttcatggaagcaacaccagtgagactgagcaatcagcactgcccagtctctctgaacaaactcccactcccacatcccctccacaggaagtatcagcaacagccgatctcctcccccttcttacagcctgtctgtctgccaggttgtctgctccaaagggcagaatacagtttggcaggggttaagagtactactaacagaagaggtggaagaggtccttgggaacttcgggctcccccagttcccttcctcttaccaggtgctctccctccacacctcattctcaaaaggcttcctgaggtagggcaggggaagaggagtcagtggaagtgtggctcacccaggaaccgcccacccttccagccaagtctccatcaggaggcggctaccagacaacccccgacccatccctccttcccaaaaaaggcaacaatcgcaacagctgagaaccggcagacctcggttcaccccggtccagatcaaggggaagaagcagtcagcgaaagcagcagaatcatcatgaactccatgaccccagctatgccccttcagcctgggagctcagtttgctgggtatccagctcacctagggctgcaccaggcctggacctcactggatctcgcctcgccctcgggcccacctgaatgcacaggactgggacagggtctgggttcttagattccggaccggtcttcccaaatatcccatcccagaaaggccccaagagcctagccggggatcctgcccccaagtcagggcactgcccccatcggaacgataggaaggaggggtgcaagggaagagaaggggaccaggaactcaggagaagacagctaaggaaatctttgaaaaagaaatggcaaggagagagcccagaggtggaacctctaggaacgggagagtgtgtgtggaggggtgaggatctggggggacccaggggatgacaaggggacatgggggagccgaggcggaaactcctggtttctgaagcacaaggaggcacaggggtgcctgggagggggctcgcgcgccgcggagccggcgagaaggtggtgccccggagactccgggcactggggagcccataggtaggccgaacaccgcgggaggtccccagggggccggcccggagacagagccccagatgccccgggcgccccgggccgggcagctggccgagggcgtgtgtaagtgggtttcgagaggtgacagctcgcgcccctttccccaccccgtccactcacctgggctcgccgcgcccggccgcccggcaggcagccccaggccccggccgctccgtcccgccgccggccgcagcgctgctccggcgcctccttttgtttgtccctcactgcaccactcagcctcctccgccccggaagtgacgtcaccgccgggcgcgaacgcggcggccagggcgtcgccatctttatgaggagaattctagcggcgctttctcccgctctmgcctccgcgctagcgccctgctgcttcggggcggaagtagcggagccgggctcggcccccttaaagggacagggactgctgcaacctacggggtgtacttgggaacgaggggtgaagcggcccaggtgagggtgagtagctgtgtcggagcgccacttccccaaggtcaggtgccgaggctgggagggtcggctaacggttccgagcttggttgtgctagagtgcttaatgagtttgatgctactaagtataacggagtggctgcacagaatgattgagccgcccgcgggaatcaactgcgcgtgctgctcgctgattctcgctcggacactggggctggtcctgtctgcacccaaatccccctcccacgmccgcgccggtggagatgatacccgagacaacrgaattctggacagatctggggttggaattgggtccccagactccaactctgcagctccataaatcccgctgggtcctcgcaaattccctggctgataacagtaccggcaaccaaattaaaaaataatccatacagtggaatactgtgcagccattaagacgaacaatgtttaatatgcactaatgtagggtgacttctaagataccttaggttaaaaaaggaaacaacagtaaaaacagcgttgggccggttgcggtggctcacgtctgtaatcccagcactttgggaggccgaggcgggcggatcacgaggtcaggagatcgagaccatcctggctaacttggtgaaacctcatctctactaaaaatacaaaaaaatcagccgggcgtggtggtgggcgcctgtagtcccagctactctggaggctgaggcaggagaatggcatgaactcgggaggtggagcttgcagtgagccgagatcgcgccgctgcactccagcctgggcgacagagcgagactccgtctaaaaaaagaaaaaacagcgttgatgggtgctatccatctttgcgtagaaggacgcctgagggtgggcgtatctgcgggtgtgcgcgccagctgtctgataagatgcacaagaagttgttaattgcggttgtctccgacagaattggggtcttgggtacctgggccagggcgagaaatttactaccatgtgcacagatagataattaaaaataagatgatgaagatagtcgtggctcccatccatcacgtgttaagccaatgcctagtttcacttctgttgggaggtcttatttttcccttttaatagaagagaaaagaaccttagagaggttaggaaacttagcaatatcatagccagggccgggcgcggtggttcacacctgtaatcccagcactttgggaggctgaggcgggcggatcacgaggtcagtagatcgagaccatcctggctaacacggtgaaaccccgtctctactaaaaatacaaaaaaattagccgggtgtggtggcgagcgcctgtggtcccagctactcgggaggctgaggcaggagaatggcatgaacctgggaggcagagcttgcagtgagctgagattgggccactgcacttcagcctgggcaacagagcaagactccgtctaaaaaaaaaaaaaaatcatagccaggaagtggagaagctggaatttgaaccctgggagatttacactaatgcccatgatctagcttatccctcgccactgagatgctttttctgttgtcagtcacgcaacacccgtcttggggcctggcacacaacaggcatccagtaactatttattgacatgatgtgtggtgtgaaaagcaaacgttgaaggtcagagcccaggcttaaagtccagggcttgggcacctctttccaacctgtggactgtgggcctgccaggtactccgtgggcctccatgtccccgcctgtaaaatgaacaaccagaaccacagttgtagacagtgaatgttcccacgtattatactttgtattttacacgcagataagtctcattttacagataagtgaggcacagagagattaagaaagttgccagaagggggttcctacaggtctccctccctccctaggaaggctgctgggctcccaggcctctcccttagcttcccaggatcatctgtgctaatgcctgggggacctactctgtgctgggtgagctgccagaggctgaggatctggtggagaacaggtcaagcacatagttcctgtccttggagttgagcgcccccgtgctgagtactttgagggcggaagcccaggtcttgggaccacctgggaggggacatgtggcttagcctgggtggagtcagaaggggcttctccaaggaagggactttcaatgtgactggaaactaggatgtccagaaggagaaatgatgaggctggagactcaaggagagatgggctcctaccctggacttggccttggtgtccactaagaaactgagggtgaccaacaggattggagaatatacaagttagacccattcagtctggcttcagcaggaatctttcctcccggagaatgcctccattaggtgccaaccaccagaacgccacactaacctctccaagctccaaagagtagggcgcctgattttataatccaggtgggggcgataaaggaatgcaggagccttcacagccatgaggcagtcactgtaactcctgccagaacagacctggggccacatcccactcctggatggcactgccagttccctgcataattcctttttttttttttgagacggagtctcactctgtcgcccaggctggagtgcagtggtgcaatctcggctcactgcaagctccacctcccgggttcactccattctcctgcctcagcctcccaagtagctgggactacaggcacccgccaccacgcctggctaattttttgtatttttagtagagacggggtttcaccgtgttagccaggatggtctctatctcctgaccttgtgatccgcccacctcggcctcccaaagtgctgggattacaggcgtgagccaccgcgcccggcctcccggcataatttttaaaatgctcatcctatgccctcattccccagcttgcagctgggggcctcctggtgcttttctgggacttcgagtaagtcatttcccctctctaagcctcagtttccccacctgtaaagctgatgccacctcctccaaggctcccgcgaggctatctgcctatctgttgtgtgttcctttaatgtatgggagtgagattgtggtttttgaatctgggtcctgtgccaggaggaataagtggtgagatacctactgtttgtstcactcaggtcttccaccaacccctccagcctgtaaacctgccgtctggactccagaagtcatttctctctcctctgccaattcctaagcccagggggactgtgtctgagtgacgcaattgttagatctcctcagacaggctgttctctccaggaaaacattggctcaacaaattgtcaccaaacatttgtcttcagggaattctgttttttttctatcaaaaaaaatttggattcattatataataagagatttttcattttgcttggttactaattttatggaaagcctggtaggtttaaatgttaatagcttgttgactgggtgtggtggttcatgcctataatcccagtaatttggaaggctgaggtgggactatcgcttgagctcaggagttcgagaccaacctgggcaacgtggtaaaaccccatctctatcaaaaatacaaaaattagctgggtgtggtggcacgtgcctgtggtcccagctactctggaggctgaggtacaagaatcgcttgaaactgggaggcagaggttgcagtgagccgagattgtgccactgcactccagcctgggcgatagagcaagactgtctcaaaaaaaaaaaaaagttaatagcttgttgtcattgacaagtggctgtgagccaggacccacagtatattctctgtggattcttgtcaccttcattgtacagatgaggaagctgagcccccaagaggctgcggcctggcatgaccaaggtcccatagctagtttatggtggagctgggactatttgatccaagtccaaggtttggtcttctgtggttattcatgcactagactggtcttcctgggcatggtatccccagttctgtacccyttctctagaggtgccacgatgtgtgttgtctcagtaactgggagtctcctggcattttaagcccagggatgctaaacatccttcaaggctccagatagctctccccagtgaagaactgactcatctcaaattctaagtgtgcccctattgagaagctccaaaaccgaatgtcataattgacttgagtgatgtgacgtggggccaccctgggaaggcatggtcacctcgcctgcccttgtaagcagccatgcaaggtgaagttggacaagacatggctcctgtccccaaggggctggtsgtctcctgtcagccctagcacccgcctgagaggagatttcacgggacagaatttggactttggaaataggcaaaccagggtttgaatcacagctggagctctctaggctgagtgagttttccttgttctccttttgagcaaaatagagtaaataataccatcctaatcagctgtgatgaggattagagaatttagcatggggttgggggagagggtcaggcacaggtaggtgctttctgagttcagcaaagggcctgggtggacacagaagcttcagagaggaggtacaggtggggctaggccctgctagggattttggattggagggtatgccaggcaggggaaacagcttgagtgaagatgggcaacatttattcaaaagcaaagggtggctgggcacagtggttcacacctgtaattccagcaatttgggaggtcaaggcaggcagatcaccagaggccagaagttcaagaccagcctggccaacatggtgaaaccccatctctacaaaaatacaaaaattagccgagcatgatggtgggtgcctgtaatcccagctactcgggaggctgaggtgggagaatcacttgaacccgggaggcagaggttgcagtgagccgagatcgtgccattacactccagcctgggtgaaagagtgagactccatctcaaaaaaataaaaataaaaataaattagctgggcgtggtggcgtgcacctgtaatcccggctacttgggaggctgaggcaggagaatcacttgaacccggcaggtgggggttgcagtgagccaagattgtgccactgcactccagcctgggtgacagagtgaagagagaggctctatctcaagaaaaaaaaaaaaaaaaggccgggtgccgtggctcatgcctgtaatctcagcactttgggaggccgaggcaggcggatcacgaggtcaggagattgagaccatcctggctaacatggtgaaaccctgtctctactaaaaatacaaaaaaaattagcagggcgtggtggcgggcgcctgtagtcccagctactcgggaggctgaggcaggagagtggcgtgaacccgggaggtggagcttccagttagctgagatcacgccactgcactccagcctgggcgacagagccagactctgtctcaaaaacagaaaaaaaaaaaaaaaaaaagamcaaaggatgactgggtgtggtgtctcatgcctataatccaagctgtaatcccaggactttaggaggccaagaccagaggatcacttgagcccaggagttcaagaccagcctgggtaacatagggagaccctgtctctatttttttttttttttwaaagcaaagaatttgagctgggggttggggcatgcacttatagtcccagatactcaggcggctgaggcaggaggatcacttgagctcaggagttcaaggctcctaggtgacaaagcgagaccctatctctaaaataaaaaaagagtaaagggagggaaggtggaggctgccaagcctggattccagccggctccaaacgccaggctgaggaggctttggactttgtccagtgtcaccacaggcttctgggcagagctggtccaatgggggttgggggacagtggcatagctgacatcagcccctgggttattgacatcagcccctggaatgcatcagtgatgcattccacgggcccaggggtcatccactgccttcgggtcaagcaaatggccagtagctgcccaggctgatagaggtgtgtgttggaggggggcacaggccactggccctcggcccctggcctggcagcagggaggcctcagatcttagatgcctgagagctaccccagaagggtcctcggcacagctatggtccccatgcctagtggtgctgggcctcctcggtgctgccagatcacctgagctgcctccattgcagcagttatcccacacatttttttttttttttgaagcggagtcttgctctgtcacctggacagctgtcaggctggagtgcaatggtgcgatcttggctcacttcaacctccggttcccgggttcaagtgattcttctgcctcagccttccaagtagctgggactacaggcccctaccaccacacccgactaacttttgtatttttagtgaagacagagtttcaccatgttggccaggctggtctcaaactcctgacctcaggtgatccgcccacctcggcctcccaaagtgctgggattacaggcgtgagccaccacacctggccggttgtccagtttttctaaacaggccgaagtccaggtcaccatggagggctgggctggtgctgattctccatttgttacccagggtggagtttgtgaaactggccagtgagcatgacgtcgtgaacttgggccagggcttcccggatttcccaccaccagactttgccgtggaagcctttcagcacgctgtcagtggagacttcatgcttaaccagtacaccaagacatttgtgagtctccccatctctcgtggaggcactgggggagnnnnnnnnnnnnnnnnnnnnggtcatccctttggggaactggactcaggctaagggtggggatggtcatccctttggggaacttcgtacaggctgaatggtggaagaaggtggtcacaaggaggctgacttgggctcatgcaaggaaggaaagggcttcctgggaggggatgagctccctgtcaccagaggtattgagcagaagtagataatcacctactagggaggctgtaaagggtggctgcatggtgtagggtgtggaactaagatcagcaatttctatgctgaattcgtcctccaggcaacttgttaaaaatacagattccagggctgagcgcagtggctcatgcctgtaatcccagcactttgggaggctgaggcgggcggatcacttgaggtcaggagttcgagaccagcctggccaacatggtgaaaccccatccctactaaaaatacaaaaataagtcgggcatggtggtgcgtgcctgtaatcccagctactcaggaggctgaggcaggagaatcgtttgaacctgggaggcagagattggagtgagccgagatcacgccactgcactccagcctgagtgacagagcgagactccgtctcaaaaaaaaaaaaaaaaaaaaggcaggattatctcaccacaaaatgtacagaacaggaactcccagagatatttcacaacattgaaaacaaaggatgactaaggatgactcgtattcatcaagacatagaagatgtcaggtgcagtggcttacacctgtaatcccagcactttgggaggctaaggcaggatgattgcttgatgccaggagttcaacatcagcctaagcaacatagtaaaacccccatctttacaaaaaaaaaaaaatagctgagcatggtggttcgtgcttattgtctcagcaactcaggagaatgaggtgggaggatttcctgagcccggtaggttgaggctgcagtgagccgagatcacaccactgcactccagccttggcaacaaacatagaagaaatgctcattctgtatcctaaattaaaccactggaagactgcagcactgttcagttcagaatattctttttttttttttgnnnnnnnnnnnnnnnnnnnnnnnnnnnnnnnnnnnnnnnnnnnnnnnnnnnnnnnnnnnnnnnnnnnnnnnnnnnnnnnnnnnnnnnnnnnnnnnnnnnnnnnnnnnnnnnnnnnnnnnnnnnnnnnnnnnnnnnnnnnnnnnnnnnnnnnnnnnnnnnnnnncctcctgagtagctgggatcacaggcgcccgccaccacgcctggctaatttttgtgtatttaatagagacggggtttcaccatgttgaccaggctggtcttgaacttctgacctcaggtgatccacccgcctcggcttcccaaagtgctggggttacaggtgtgaaccaccacgcccggcctcagaatattcttttttttttttttttgagacggagatttgctctgtcacccgggctggagtgcagtggtgcaatctctgctcactgcaacctctgcctcccaggttgaagcgattctcctgcctcagccttccgtgtagctgggattacaggtgtgcatcaccaygcccggctaattttttgtatttgtatttaattttttttttctttttgagatggagtctcgctctgtggagtgcagtgccgctcactgcaacctctatctctcgggttcaagcgattctcctgcctcagcctcccaagtagctgggatgggattacaggcacctgccactacacccagctaattttttttgtaattttagtagagacgggatttcaccatgttggccagcctggtctcaaactcctgacctcaaatgatctgcctgcctaccggcctcccaaagtgctgggattacaggagtgagccatcgcgcctggcccaagctatttgcaataaaattttttccttgataaacttttataacgaaagaaaacgtcttaattttcagtgttgctaatattaaattacagtgtactaagttcttattagttttttttttttttcattttctatacttttttatttttaaatgacagagtctcactttgttgcccaggctagtctccaattcccgggctccagtcatcctcttgccttggcctcccaaagtcctgggactacaggcatgagccaccacacctgggctacatttttaacagatggtaagagagttttaaaaggtcacagaacaattgtcttattaattattattatccaataataattttctcgattattaagttctctttgcacaatttaagtttacatggtcttttttttttttttttttttaaatggagtctcactctgtcacccaggctggagtgcagtagtgcgatcctggctcactagaatctttgcctcccgggttcaagcaattctcctgcctcagcctccgaagtagctgcgattacaggcacatgccaccatgcccggctaattttttttgtattttcagtagggacggggtttcatcatgttgaccaggctggtttcaaactcctgacctcaagtgatctgccygcctcggcctcccaaagttctaggattacaggcctgagccaccacgtctggccaacatggtctttttttttcttttgagacggagtctcgctctgtcacccaggctagagtgcaaacggtgcgatcttggctcactgcaacctccgcctcccgagttcaagctggtctcctgtctcagcctcccgagtagccgggattacaggtgtgtgccaccattcctagctactttttgtattttattagagacgggctttcaccatgttagccaggctggtctcgaactcctgacctcaggtgatccgcccacctcggcctcccaaagtgctgggattacaggcatgagccactgcgcctggcctcaacatggtctttttctgttttgctttgttttgttttttttgagtcggagtctcgctctgtcacccaggctggagtgcagtggcacaatcttggctcactgcagtctccacctcccaggttcatgccattctcctgcctcagcctcccgagtagctgggactacaggtgcacgccaccacgcctggctaattttttgtatttttagtagagacagggtttcaccgtgttagccaggatggtctcaatctcctgacctcgtgatccacccacctcagcctcccaaagtgctgggattacaggtgtgagccaccatgcccagccaattcaacatggtcttttttttttttttttttttgagacagagtttcgctcttgttgcccaggctgccgtgcagtggcacgatctcagctcactgcaacctccgcctcccagttcaagtgattctcctgccccagcctccggagtagctgggactacaggcgtgtgccactatgcccagctaatttttgtattttttttagtagagacaggctttcaccatgttggccaggatggtcttgatctcttgacctcatgatccacccgcctcagcctcccaaagtgctgggattacaggcatgagccaccacgcccagccaacatggtcatttttataatgccacactactgtggaaagtaaagactacctgaatatgtatgtgtatgtgtatatgtatatatatgtatgcatcctcacatatgtatctccacaattgattttgtttattttttgagacaggatctcactctgtcacccaggctggaatgcagtgctgtgattatggctcactgctgcctcgactgcctgggctcaagcaatactcccagctgagcctcctgagtagctgggaccacaggcatgcaccaccacacccagctaatttttaaaaaattatttgtagagacaaggtcttgttatgttgcccaggctggtctggaaatcctgagctccagtcctcctgcctcggcctctcaaagtgctgatattacaggtgtgagccacctttccaggtgtgagccaccacatccagctttctctacaattaaaaaaaatgcaaatagagttatattgttcttcaacctgccctttttgtttgtttttgtttgttttgttttgttttgttttaagacaaggtctcactctgtctcccaagctggagtacagtggcacaatcttggctcactgcagcctcaaccttctgggctcaagcaatcctcccacytcagcttcccgagtagctgggactacagacacgtaccaccgtggccagctaattttttgcattttttgtagagatgggatttcaccatgttgcccaggctgatctcgaactcctgagctcaagcaatctacccgcctttgcctcctgaagtgctgagattacaggtgtgagtcaccgcggccagcctgtctctacaatttaaaaaatgtaaatgggttatattgttcttcaacccttttaaaaaattaccatacttttttttttttttttgtaattgaggtgaaattcacctaacatacaagtaactattttaaggtatacaattcagtggcatttagtgcattcacaatgttgtacaaacattatgtcactgtagtttcaaaactttatcgttcccttaggaaaacactccgtacccatcaaatagtcactccccattacctcctccctgtcctctggttaccactcatctgctttctgtctctatagacttgttattctgaatatttcacagaaaaggaatcatagctatgtgaccttttttgtccggcttctttcacttagtgtgttttgtttgtttgtttgtgacagggtcttgctctgttgtccagactggagtgcagtgtcatgacctcagctcactgcaatctccacttcccaggctcaagcgatcctcccacctcagccatcttattatctgggactacaggcacacaccaccatgcctggctgatttttgtattttttgtagaaacaaggttttgccgtgtttcccaggctggtgtcaaacaatgatcctcccacgtcagccttccaaagtgcagagattatagtcatcagccatgtcgccctggcctcacttaatatatttttgaggttcatctaagttacagcatgtgtcagcacatatttcattccattttgtggctgaataatattccatggtacagatatgttacaatttatccattcatccattgatggacaatttgggtttttttcacctgttggctatgatgaatactgttgatataaacatttgtgtacatgtttctgtgtggacatatgttttcagttcttttgggtatatacctaggagtgaaattgctaggttgtaaggtacttctatatttggacttcataaaaattaaaaagttttgtgtaccaaagaacattatctgccgggcccgggtaattgcagcactttgggaggctgaggcggggggatcacctgaggtcaggatttcaagaccagcctggccaacatggcgaaaccctgtctccactaaaaatacaaaaattagctgggcgtagtggcgaacacctgtagtcccagctactcgggaggctgaggcaggagaatcgcttgaacccaggaggcagaggttgcagtgagctaagatcacgcctctgcactctagcctgggcaacagagtgagactctgtctcaaaaaaaaaaaaaaagtacattatcaagaatgtgatcaggctgggcacaatggctcacacctgtaatccaagcactttggaaggccgaaacgggaggattgctagaggccaggagttaaagcccagcctgggcaacgtggtgagaccccatctctgcaataaaaattttcgaagttgttggtttattttgagttaatttttgtagatggaacgaggtgaaactcctgcttcattcttttatatgtaaatatccagttgtcccagcaccctttgttgaagagactattctttcctctattaaatgggcttggtgccgggtacggtggctcacgccagtaatcccagcactttgggaggccgaggcgggcagatcacgaggtcaggagatcaagaccaccctggctaacacggtgaaaccccgtctctactaaaaatacaaaaaattagccgggcgtggtggctcgcgcctgtagtcccagctatgcaggaggctgaggcaggagaatggtgtgaacccgggaggcagagcttgcagtgagccgagattgtgccattgcactccagcctaggcaacagagcgagactccatctcaaaaaaaaacaggcttggtgcccttgtcaaaaatcaataaggccaggcgcagtggctcccacctgtaatcccagcactttgggaggccaaggcctttgtattgcgtgagtccagaaatttgagaccagcctgggcaacatagtgagacccccgtctctacaaaaaattaaaaaattggccaggcacagtggctcacacctgtaatcctaacactttgggaggccaaggtgggcagatcatgaggtcaggagatcgagaccatcctggccaacatggtgaaaccccgtctctactaaaaatacaaaacttagctgggcatggtggtgtgcgcctatagtcccagctactcaggaggctgaggcaggagaatcgcttgaatcccagaggcagaggttgtagtgagccaagatcgtgccacagcactctagcctggcaacagagcaagactccatctcaaaaaaaaaaaaaaaaaaaaattagccaggcatggtggcatgtgcctgtagtcccagctactcaggaaattgaggcaggaagattgcttgactctatgagaacaaggctgtagtgagccgtgatcgcaccactgcactccatcctgggtgacagagcgagaccctgtctcaaaaaaaaggaaaaaaagaaaaaaatgtccagctacttgggagactgaggtgagagaatcacctgagctcaggatgtcgaggctacagtgaaccgtgattgcacacaccactgttctccagcctgggctacagaatgagaccctgtctcaccaaagaaaaaaaggaaaaaaaaatcagtgggccaggctgggcatgatggctcacgcctgtaatcacagcactttgggaggccgaggtgggtggatcacctatagttccagctactcaggaggctgaggcacaagaatcggcagaggctgcagtgaatcaagatcgtgccattgcactgcagcctgggcaacagagtgagactctgactcaaaaaaaaaaaaattagtgggccatagatgtttgggtttattactgggctctcaattttattccatgggtctatgtctgtctttatggtaataccacactattctaattataagctttgcagggccaagcgcagtggctcacgcctgtaatcccagtactttgggaggccaaggcgggtggctcacgaggtcaggagatcgagaccatcctggctaacatggtgaaaccccgtctctactaaaaatacaaaaaaattagctgggcgtggtggtgggcacctgtagtcccagctactcaggaggctgaggcaggagaatggcgtgaacccgggaggcagagcttgcagtgagccaagatcgcgccactgcactccagcctgggcgacagagcgagactccgtctcaaacaaacaaacaaaaaaacctttgcaataagttttgaaatcaacctgcatttttcacataacctgaatatctttccacgtcagactgctaaaagcaatcttattccttttagtggttgcacaatggttcattctatggttaaaccacgcagtgatacagtgatattgtgatacagcgatactgaactagccccaggttgatggatatcagattgcctccagtttttttctctcatgctgagtgctgcgttaatcatccaagtgtatatttttgtatatacgtgtgaatattcctgtaagatcagcttttagggctgggtgcactggctcacacctgtaatcccagcactttgagaggtcaaggtaggagaactgcttgagcccagcagtacaagaccagcctgggcaatgtagtcagaccttgtctctactaaaaataaaaagttagcccagcatggtggcgtgcacatgtggtcccagctacttgggaagctgaggtgggaggatggcttgagccccagaggtgtaagctgcaatgagccataattgtgccactgcactccagactgagtgacagagcaagaccctgtctcaaaacaaacaaacaaaaaacttttaggagaggaagtgttgagtcaaagagtggtatgtgttattattaaattgccctccaaaacttacaccagtgaacactcttaacctagtgcttgcttttcaaatcacaaattctcaccttttagtacattgtaggatcagtttggtgggtctcaagtttgtcttggcccatctgagaggcaaaaaatagtacttcgctttcatttacgtatcactaattatgactaattttcagcatcctttcaaggttattgacttttttttttttttgagacagagtctcgctctgtcacccagactggagtgcagtggcacgatctcagttcaccacaacctccgcctcctgggctcaagcgattctcctgcctcagcctcccaagcagctgggattacaggcgcacatcacggctaatattttttatatttttagtagagacagggtttcaccatgttggccaggctggttttgaacactgacctcaagtgatccacccgccttagcctcccacagtgctgggattacaggcgtgagccaccatgcctggcccccatttgagtttcttagcatcttatcaaatagcaattgtgaccatttatttctggactgtcagttctattcaattgacttatatatctatctttaagcagtatcacactttcttggttcctgtatgtttgcattaagcttccaaattgtgcagtgtgatttcttcaatttttttcttctttttcaggcatttactttttttttttttttttttttgagacatatctccctctgtcgcccaggctggagtgcagtggtgggatcatggctcactgtagccttgacctctccaggatcaagtgattctcccnnnnnnnnnnnnnnnnnnnntgcttgcttttcaaatcacaaattctcaccttttagtacattgtaggatcagtttggtgggtctcaagtttgtcttggcccatctgagaggcaaaaaatagtacttcgctttcatttacggtatcactaattatgactaattttcagcatcctttcaaggttattgacttttttttttttttgagacagagtctcgctctgtcacccagactggagtgcagtggcacgatctcagttcaccrcaacctccgcctcctgggctcaagcgattctcctgcctcagcctcccaagcagctgggattacaggcgcacatcacggctaatattttttatatttttagtagagacagggtttcaccatgttggccaggctggttttgaacacctggcctcaagtgatctgcccgccttagcctcctaaagtgctgggattacaggcatgagccactgcgcccggcgactattttcttttcttttcttttctttttgagacagagtctcgctctgttgcccaggctggagtgcaatggcacgatctcagctcactgcaacctccacttcccaggttcaagtgattatctcacctcagcttcccgagtagctgggattacaggtgcctgccaccacacccggctaatttttgtattttagtagagacagggtttcaccatgttggccaggctggtctcaaactcctgacctcaggtgatccgcctgcctcagcctcccaaagtgctgggattacaggcgtgagccaccacacccagcgactatttgcttttgtgaatttcccatttatatctttttcacactttttcttattgagatgctggtcttttgttgtcgatttatacaaatatttgcatattaaggctcatattatattaaaatggcccagttacttgtttgtctccttgattagattgtgcgctccttggaggaaaggaaggtatcctatcacccttgtatacatggtggctagcttagggaatgaatagcacataataggaattcactgaggagatgtacacttaccatatggcaggctctgtgcaagatgttgagaataaaaagatgaacagaagagaatctttgttctaacaaagcttacagtctggtgcaagcgatagacattcattctcattctgcaggtttattgagcagctgctctgtgccaggtgcataacgcccattggaagagccagcctattaggatgagaaaaatgtcaggactgggacttcgctaacctggtcctgggaaatctgggtgggtcagttccccatccctggttatcagtatccccatcaataaaatgtgagccactggaccaaattctctcatttcccattgagcatccatgcatctgtgctgctttggcttttggaaagtaggagtcagagtcctgagttcaaatattggctctgtgctgggtgtggtggctcacgcctgtaatcacagcactttgggaagccgaggtgggtggatcacctgacgtcaggagtttgagaccagcctggacaacgtagtgaaaccccacctctactaaaaatacaaaattagcctggtgtggtggtgcatgcctgtaatcccagctacttgggaggctgaggcacgagaatcgcttgaacccgggaggcagaggttgcagtgagccaagatcgcaccattgcactccagcctgggcaacaagagcgaaactctgtctcaaaaaaaaaaaaaaaaaaaatatatatatatatatatatatatatatatatatatatatatatatatatatgtaggctctgctacttgttagctgtggccttgggtgtgtgacttagcctttttttttttttttggtgtgggagggatgtggggagggacatggtcttgctttgtcactcaggctgcagtgcagtagtgcaattatggctcacttcagccccaacctccaggctcaagtgatcctcccacctcagcctcccgagtagctgggactacagacgtgcaccaccactcccagataatttattattttttgtagagattgagtctcactacgttgcccaggctggtctcgaactcctgggctcaagggatcctcctgccttggcctctcttgcaggcataagccactgtacctgaccacttagcctcttgaaggaatctttcttataggattaaaagtgatgggaagccaggagcagtgactcacacctctaatcccagcactttgggaggcctaggcaggcggatcacttgaggtcaggagttctagaccagcctggtcaacatggtgaaaccctgtctctactaaaaatacaaagattagctggacatggtggtgcacaactgtagtcccagctactcgggaggctgaggcacaagaatcacttgaacatgggaggcggaggttgcagagagctgagatcgcgctgctgcacttcagcctgggcgacagagcacgactttgtcccccaaaaaataagtaaataaataataaaagtgatgggacctgatttcaagtagtcaaaatcgcagasacagcaaatgggctgggctatgggccagagggtaaagggatgtaattgtttaatgggtacagagttgtcagttttacaagatgaaaacagttcccaaaactgtatacctgtacatagttaagatggtaaagtttatgatatgtgtattttaccaaaattttttaaatgaaaaactttttttttttttttttttttgagacagagtctcgctctgtcgcccaggctggagtgcaatggcgcaatctcggctcactacaatcttcgcctcccgggttcacaacattctcctgcctcagccttccaagcagctgggactataggcacccgccaccatgcctggctaatttttttttcgtatttttagtagagacggggtttcactgtgttagccaggacagtctcgatctcctgacattgtgatccacctgcctcggcctcccaaagtgctgggattacaggtgtgagccaccgcgcccggcctgaaaaacatttttaagtggtgggacgtgtagggctccacggggcacctagcacaggaaagcgtgtggtaaataaaaggtgactgccagggctgttgaggagctgactagggaaggcctgcttcctagaaaaggggtgaggcgcagggcattggagggaggtgtgcctgggaggtcaggagtcctgccttatgcgggaacctggagcagcaccctccctgctttgggcctcctctgtgaagtgaggcgtagtcccctcctggggccagcaggttgctctgtgacctgggccagcaacctcaaagccacgaggggcctggctccttgcgccccctgctggccgactcgggaataacacacccacaagcccccaagttgctcccaaccaacctggccaagttgctgggttaaggcagcctacgtgccccctgtacccttctgctcttggctgagaaccccttatggcttctccctccctccctccctcctaagttcctggaacctaccttcaccacacccataagctcacagacacagacacagagatgtgtgcacatgctcaggtgcaagctcttgtatttggatccttttgttgttttggtttttttttttgtagagaaagggtgttgttatgttgcccaggctagtcttgaacttctgagctcaagcgatctgcccacctcagcctcccaaaatgctgggattacaggtgtgagccaccatgcccagcctccatgaattattattatttatttcatgcatagaaaattgatgttcagagaggtaaaatggcttgcctcatgtcacactgccaaggtcatcaaagcctgtgttctaatccttcccccgtctctcagcactgccctcctccttgtgtgtctacttggggcctgatcctgggtgtggtaatagaacagacctaccctgtggagggtgcaacataacattcacttctggccgggcatggtggctcatgcctgtaatctcagcactttgggaggccgaggcgggcggatcatgaggtcaggagttcaagaccatcctggccaacatggtgaaaccccatctctactaaagacacacaaaaaaattagccgggcatggtagcgcgcgtctgtaatcccagccactcgggaggctgaggcatgagaatcacttgaacctgggaggcggaggttgcagggagccgagatcatgccattgcactccatcctgggtgataaaaagatagggcgagactctgtgtcaaaaaacaaacaaaccaacattgactcctatgcccagtcttacccggccacacataggcccgatgcactgccagtcccctgcaatggaagccgatcctggtttccagccccacccccaaggctgcaagattgtttaagcatatccgtgtgcagcacaggtgccacccagcttcttgacccccatggagccagtgatctggacacacagaaggcaccgcctttcctgagaactggcagtgcccagagaaggcaaggggccaaggctggggcagggcagagaagagggccacagctgggatctgtttctcctgagtttctgccctgtgctggcaccaggtgtacaatctgctataaggcctgcaggagctcaatgtaagtgttgttattttagtatgttaggaatttcctcacctgttaatgagggtgaggatagcacttgctttacagagttgttgaaaggatccagtgacaaaagtattgggacagagtgagtcctagtaaattaaagctggttgtattattaatattattcttggccaagtacagtggctcacatttgtaatcccagcactgggacgctgcggcaggaggatgccttgagcccaggagtttgagacaagcctgggcaacacagtgagaccacatctctacaaaaaatacaaaaattagctcaattcacttgagatgatgaagacatgacttagaatgttgtcacttcaggaaaaaaagactgatttgatggacacagagtccgatgtgggggagagtgtcagagagagaattgacctaccaggcaactgtgggtttttaactcagtggtcagaaagcagtagagtgggtcccggtagggtgaaatccagctcctcctgtagtcctagaagaagtagcaagatgttgggtctaggacaggaaatggctaacctaaagagaccctttggcccaggatggttcccatcccaagacacccctcagtcctgggccagcagatagttggtcttcatagaacaggcagagggcacagagtgcctcccatgaccagccctgggcttgggcctgcccttgggccgctcatccstttagctgagttacctgagctaaagcaccagactccctcccttgaggtgacaccaaggaatgtccctcctgggatggcagtaacactaccctttgttgctcaaggcacaggtacttagtttcaggggtcagagtacatacttcaggcctctcctgggaaccgctctcaaatctaaggaacgagagggtgagctctggcatcgccttgtgtgttagcccattctcccactgctataaagaactgcgcaagactgggtcatttataaaggaaagagatttaattgactcacagttcctcatggctggggaggcctcaggaaacttaaaatcatggcagaaggggaagcaaacacgttcttcacatggcggcaggagagagaactgctgagcaaagggggaaaagctctttataaaaccatcagctctcatgagaactcactcattatcgccagcacagcagcatgggggtaactgcccccatgattcaattacctcccactgggtccctcccaggacacgtgggaattatgagaactgcaattcaagatgagatttgggtggggacacagctcaaccccatcaccttggatttgattcctaaggctgttgtaacaaactagccacacttcattgtattgcgtttggcagatatcacggtctttgcaaattgaagctttgtgagaaccttgcaccaagcaartctattgttcccattgttccaacagaatgtgttcccttagggtctgtgtgtaattcccacaatagttcaaactttatcattattattatgtctgacacggtgatctgtgatcagtgatctttgatattactattgtgcttgttttggggaaccacaaaccatgcccatataagatggtaaacttaataaatgcgtgtgggccggaggcagtggctcacaactgtaatcccagcactttgggaggccgaggtgggcagatcacctaaggtcaggagttcgagaccagtctgaccaacatagtgaaaccccatctctactaaaaatacaaaaattagccaggcatggtggaatgcgactgtaatcccagttacttaggctgaggcaggagaatcgcttgaacccaggaggcggagcttgcagtgagccgagattgcgcaactgcactccaccctgggcgacaaagcaagactccgtttcaaaaaaaaaaaaaaaaggctgaacaaactgaaaaaccagcggctctttttcagttcatcagaaaattaggtcacagggtaacctgctgcccccaaactggagaggcagaaaggtagatacagagaatcatgatttgccagagcagaaaccttccctggaatcagcacctgggtgggaaaacctgaactgcaactgacgaatgtctggcagcgtggatgtgtgctgctggttaatgttaggtggcagctggactggagtaaggaatacctagagaatggtgaaacatgacttctgggtgtgtctgtgagggtgtttccagaggagattggcgtgggagtcagtggactgagtggggaagatccgctctcaatgtgggtggcagtatgcaattggttcacggcttgaataaaaacaaaagaggagaaaattttcctctttctgtctctgtctctcctggagctggaagattctccttctcctgccctttggatatcaaaactctaggctcttcagccttggactgagaattatcccagtggcgtccctggttctgaggcttgcagacttggactgagccacgctactggcacctcttgcaaatagtctctcaggggacttctcagcctccattaattgcgtgagtcaatttccctataaatcccctctcatgcactttgggaggccgaggcgggtgggtcacgaggtcaggagatcgagatcatcctggctaacacggtgaaaccctgtctctactaaaaatacaaaaaattagctgggtgtgatggcgggcacctgtagtcccagctacttaggaggctgaggcaggagaatggtgtgaacctgggaggcagagcttgcagtgagccgagatcgcgccactgcgctccagcctgggcaacagagcgagattctgtctcaaaaaaaaaaaaaaatggctgggcaaggtggctcaccagcacgatctcggctcactgcaacctccacctcctgggttcaagcaattctcctgtctcagcctcctgagtagctgggagattacaggcatgcgccaccacacccagctaatttttgtatttttagtagagatggggtttcaccatgttgaccaggctggtctcaaactcctgacctcaggtgatccacccacctcagcctcccaaagtgctgggattacaggcaggagccactgcacccagctgagagtaacttttttttttgttgttgagacggagtctccctctgttgcccaggctggagtgcagtggcgcgatctcagctcactgcaggttcagcctcctgggttcacgacattctcctgcctcagcctcccgagtagctgggactacaggtgcccaccaccacacctggctaatttctgtatttttagtagagacagggtttcgccgtgttagccaggatggtctcgatctcctgacctcrtgatccgcctgccttggcctcccaaaatgctgggattacaggcgtgagtcaccgtgcctggccaagggtaactatttttaagtatgccagagcattcctccaaaatactctttttctttcttttcttttctttgctttttttttttttttgagatggagtcttgttctgtcacccaggctggagtgcaacgcacaatctcagctcactttagcctccaagcaattcccttgcctcagcctcccgagtagctgggattacaggtatgagccaccatgtccagctaatttttgtgttgttagtacagacaggatttcaccgtgttggccagtctggtctcaaactcctgacctcaagtgatctgcccacctcagcctcccgaagtgctggaattataagcgtgagccaccgggcctggcctaaaacattctttttctttttttgttttttgagatggaatttcacttttgttgcccaggctggagtgcaatggtgcagtggctcactgcaacctccgactctcggattcaagtgattctccagtctcagccttccaagtagctgggattacaggtgcatgccatcacgcctggctaatttttgtagttttagtagagatggggtttcatcatattggtcaggctggtctcagactcctgaccttaggtgatctgcccgccttggcctcccaaagtgctgggattacaggtatgagccaccatgcccgggcttttttttttttttttttttatacatggtctcactctgttgcccaggctggagtgcagtggagcaattttggctcattgcaacctctgcctcctgagctcaagcgattctcgtacctcagcctcctaagtagctgggactacaggtgcatgtgacttcgcccagctaatttttgtatttttggtagagatggggttttgtcgtgttggccaggctggtctcaaactcctgacctcaggtgacccacccacctcagcctcccaaagtgctgggattacagacgtgagccaccgtgcccagccttggctgtttgtgtatcttttttggaaacattcagatttatgatttgcagatatttccttccattccatgggctgtcttttcattttcttaatgggtatccttgaagcacaaaagttcttaattttgatgaggtccagtttattttttcttttgttgtgtatgctttggatgttatgtctagaaccccaaggtcacagagatttattcctatgttttcttctagttttcttgttttagttcatacatttagttttgtttttygtttgtttgtttgttttgagacggagtctcgctgtgtcgcccaggctggagtgcagtggcgtgatctctgctcactgcaagctccgcctcccgggttcacgccattctcctgcctcagcctccagagcagctgggactgcaggtgcccaccaccacgcccagctaattttttgtatttttagtagagacggggtttcactgtgttagccaggatggtcttgatctcctgaccttatgatccgcctgccctggcctcccaaagtgctgggattacaggcgtgagacaccgtccccagcccatacatttagttatgtgattcactttgaattaatttttgtgtatggggcagggcacatggctcacgcatgtaatttcagcactttgggaagctgagtgaagcggtggcctgtccctccacacctgtgggtatctcatcaggtgggacgagagactgagaaaagaagtaagacacagagatgaagtatagagacaacagtgggcccaggagactggcaagcagcatatcaaggacctgcaccagcatcggtttctgagtttcctcactttttattgattattatttttattatctcagcaagaggaatgcagtaggagagcagggtgataataaggagaaggtcagcaaaaaaacatgtgagcaaaagaatctatgtcataattaagttcaaggggaggtactatgcctgcatgtgcacgtaggccggatttatgtttctccccgcccaaacatctcagtggagtaaagaataacaaggcagcattgctgccaacatgtctcgcctcccgccatagggcggtttttctcctatctcagaattgaacaaatgtataatcaggttttataccgagacattcagttcccaggggcaggcaggagacagtggccttcctctatttcaacttcaagaggctttcctcttttactaatctacctcagcacagaccctwtacgggtgttgggctgggggacagtcaggtctttctcatcccacaaggccatatttcagattatcacatggggagaaaccttggacaatacgtggctttccaaggcagaggtccgtgcggctttccgcagtgcgttgtgcccctggtttattgagattagagaatggcgatgacttttaccaagcatactgcttgtaaacattttgttaacaaggcatatcctgcacagccctagatcccttaaaccttgattccagacaacacatgtttttgtgagctcaaagttggggcaaagtggctggggcaaagttacaaattaacaacatctcagcaaagcaattgttcaaggtacaggtcaaaatggaatttcttatgtcttccctttctacatagacacagtaacagtctgatctctctttctttgccgtacatatcccccttttctttttgacaaaaccgccatagtcattatggcctgttttcgctggttgctgtctctcyggagctgctggatacacctgtagaccagcaacagagaacagacatacaaggattaatacaaaatttgcaatagtggaacttccagtggttttaacccaagtgatggggttaagatttgtgaggccatcagcagctttcaccattgcctcagtttctggcaccagattgaactgggcttttgatgcctcaaaaatttgttattttaatttwaaaatatctaaagtaaggttatcttctcttccttgtagatggcgtctaaccatgtcccagtgatgttcagattcattataggctcgaggtgtaatacaaaaatctgacatattccagtcacactgtaactgaaaaagatattctaagctcatgagcctatctctcattcaaatgacagtttgtctacgatcattaatttggtttgccaatttttggtctatttgagtctgagaattccacaattttgaggagttcttttgccaattatttatatattttgtagtttgaacagaggagtgtaaagcaattccagcagccgcagcagtagctgtgactgcaataagacccataatcactgcaattaaagtaaaaaatgaatcttttggatctagttagaactccttttaatacttctgktaaaatatggatggatggggaagcctcccacggtcggtccatggacacagggatccacacaccctctcttgccctcactggcagaatatggtgctgccaatcaaaagttgaatcaatgcaagtaaacaatctacaattttcacaggttatagtttgggaatctggtttaataactatgtttcctacaactagcatataagagggttttacacaactttgcaaaggaattgtcggattggaatttaggttaatagtataatgtggcttatgatttcttgttccgataacttgatttccagaccaaattctaatgtggtgcgaggccacagtaagctttcataatgctggatgttcaggagcagtaacaggactaactaactttggttgaggtgatgaaatccccttttcaccccatttccatggatagggtgattctagccttctataaacctggtctagcctttcagttaaatcactatcataggccggattagtgggccagacagatggggtctgtgaacatgagtgagtctggcccatacaaccataatataattggttttgaggggcccagtctataatagttccaaatttattgttttgtaataccaccacagtatcagccacatatttttcccaaactaagacttctgggtcttttgattctttgggaatttccttgaggcaaggtccccttaggcctaaattttaatgatctttgataagaagagtcctgtaaattattcatttgtgacccaagtgacattccacttaccatatgataagtaaatttattggtggcactgacagtagatacttctaccaaccaattttgggttgtaggcattaagcatcctggtgctttcyccaggcaaataggaggataatgatacccagtggaaatgtttatcatcattccttcttcttcaggttgggcagggccgcggtcatctgtgggtcctggtacccatgcactaatattaacacatacttcaatagaatattatccatccaagtgactgcctgaattaagggcgggaaaggcacataggcccagtaagtataattagctgcagctgctcctgcagacatagtgagacttaccaccattgatacaatcattaaagctgcaagcagcatattctctggagtttgtgttacccttgtgtactttaggcttttttcagctaactgtgtcagcttctttagctgggcccaggtcggcggcttcgcttttttggtggatggcaactttttctgtaagttgtaggtacccaaactggaagctgattttctcctggtgaaacacragcaaaacctctcccccacgttatcaccttctctattttttatgttttatttttgttgtctttttaccaaatcagtttttcctcatgtgggctgttctttttaccagtaaaatgttgttctgcagaagtagcggtctgatttctataaatgttaaaaaaatttaaagtatagagtgctagattaagttgcatctggggagtgttatattccttactgtccttttcctttttttgtttaaccaattgagctttgagtgttctattacttctttcaattatggcctgtccttgggaattataagggatttctgttgtgtgtgtaattttccactgatttaagaatttttgaaatgctttactacagtatcctggcccattatctgttttaattttttatggaactcccatgacagcaaaacaagataataaatgtcttttaacatgggaagtattttctcctgtctggcaggttgcccatatgaaatgtgaataagtatcaactgtcacatggacaaatgacaattttccaaatgaaggtacatgtgtgacatccatttgccataatgcattgggacataaacctctgggattaactcctgcctcctgagtgggcacatgtaggacttgacactgagtacaatgttgtacaacattttttgcctgttttcatatgatatcaaatttattttttagtcctgatgcatttacatgagtcaaggcacgaagtttttatgcttttatgaatgcagatgatactagcaagtcagcttgttcatttgccttagttaaaggccctggtaaattagtatgtgttcgaatatgagtaatataaaatgggaaatttctttttcttacagtttgttgtaacgaattaaacagctgatttaactgatcatccatactatatttgattagggctgtctcaacatcctttgtagcctgtactacatatgcagaatctgaaacaatgttaataggctgattaaaaccttgtaacactgaaatgacagcaaccaactctgctctttgagctgagtgatattgagtttcaatgacttgttcttttggcccagtttaagccacttttccattgctggaacaatcagtaaacgccatcagagcattttctaaaggtttatatctggtaattttaggtaaaatccaagtaatcaattttaagaactggaagatttttgtttttgggtaatgattgtcaataattcccacaaaatcagcaagascaatctggcatgcagcagaattgataaaagcttgtctaacctgttccttgtttaaaggaacaatgattttatctgggtcacttccacacaattttactatatgtagtcttgcctgaccaattaatgtagccatttgatctaagtacaatgtaaaagtcttagttgtactgtgaggaaggaatgaccactctgcaagatcagtattttgaacaataatgcctgttggagaatgtgcagtagcaaaaatcaaaagttggagtggggctaaatgatctattctatttacttgtgctgaccgaattttttcttcaactaattcaatttctttagttgcttctggagttaatggttttttactgtttaagtctggatcccctctcaagatagaaaacaaatttgacatggcataagtagggatgcctagagttggccgaatccaattaatatgtcttagcaatttttgaaagtcatttaatgttttttaatgtgtcttttcttatttttattttttgtggtttaattttcctttcctctacctgcattcccaaataatggaaaggagtagaggtctgaatcttatcagatgctattgtcagtcctgcgtttgcaacatctgtctgcagaaatgtgtaacagtcaattaatttgtctcttgtttctgcagcacacaaaatatcatcaacataatgaatgacataacaatctgaaaacttgtctctaactggttgaagaacttgagctacaaaagtctgacaaatagttggactgaggcaacactttccactaaaacctggctggttctttattatttacggctggtatagtaaaagcaaatttttcaaaatcctgttttgccagaggaatggtaaaaaagcagtccttcagatcaattataattaaaggccagtctttggggatcatggccagagagggcatcccgggttggagagcacccatgggttgtattatggcattaacagctcttaagtcagtcagcatgcgccatctgcctgattttttctgaattacaaacacaggagaattctaaagagagaaagtgggtgaaacatgtccttttttaaatagttttttaactattttatgtagcgcccccaacttttccttagagagtggccactgtttgacccatacaggacactgcagggcgagtctgaattgctccttcactgtagtgaactgtaggttgggcaataatgagtgccacgagccaagtcgcagtgtgcctagtttcaggctgcctcccccagcactcactcggctgaggaggaggtggccattgtggttgtagccccaatggccccaatgattctggactttttccttttaattttaatgtttcaggatatattacctcctgtaattgattgtagtcaacacttkgcgttgactgagccattaccggctctgctacatatttacaatgtgaactttccgttcctttcttgaactctgtctctgcctcttcttcacaatctatcacacagctttcaggggcatcagaaactgaaatgctatcttcttctatttgaaatggttctaaagttgctttaataatggcccaatcattccatactgtaagtgggatgattttaccttccctacttgcttgttttaattccttgccaattttttcccaatcttttaaatctaaagttccttgttctggaaaccatgggcagaattgttctattgtttgaaatagcgtaattagattttctgtagaagctttaactccccctcttcttaagagaattttaatgaagctgagataagaggcatatttactttcagtttgccccattgttaccctggattcctccgagcrcacaagcatactgcaaggctgaccgtggacgtactcgggaatctctcatcagctgtcctcaatactcacgttctcagcataacttcaccctggagaaaggccccatattgggcgtcagatgaaggggtggcctgcccctccatacctgtgggatatctcgtcaggtgggatgagagactgagaaaagaaataagacacagagacaaagtgtagagaaacaacagtgggcccaggagaccggcatgcagcatatcaaggacctgcaccagtaccggtctctgagtttcctcactttttattgattattatttttattatctcagcaagaggaatgcagtaggagagcagggtgataataaggagaagttcagcaaaaaacrtgagcaaaagaatctgtcataattaagttcaaggggaggtactatgcctgcatgtgcatgtaggccggatttatgtttctctccacccaaacatctcagtggagtaaagaatagcaggcagcattgctgccaatgtgtctcgcctcccgccatagggtggtttttctcctatctcagaattgaacaaatgtataatcaggttttatactgagacattcagttcccaggggcaggcaggagacagtggccttcctctatctcaacttcatgaggctttcctcttttactaatccacctcagcacagaccctttacaggtgttgggctgggggacggtcaggtctttctcatcccacgaggccatatttcagactatcacatggggagaaacctcggacaatacgcggctttccaaggcagaggtccctgtggctttctgcagtgcattgtgcccctggtttattgagactagagaatggcgatgacttttaccaagcatactgcttgtaaacattttgttaacaaggcatatcctgcacagccctagatcccttaaaccctggttccctacaacacatgtttttgtgagctcaaagttagggcaaagtggctggggcaaagttacaaattaacaacatctcagcaaagcaattgttcaaggtacaggtcaaaatggaatttcttatgtcttccmtttctacatagacacagtaacagtctgatctctctttcttttccctacactgaagaaggaggatcgcttgaagtcaggggttcaagaacagcctgggctggccaggcatggtggctcatgcctgcaatcctaacactgtgggaggccgtcatgagcagaacaacttcaggccaggagttcaagaccagcctggccagtatagcaaaaccccatctctaattaaaatacaaaaattagccaggcatggtggcacacacgtataatcccagctactcaggaggctgaggcaggagaatcacttgaacccaggaagtcgaggctgcagtgagctgagaaggcaccactgcactccagcctgggtaacaacgtgagaccctatctcaaaaaaaaaaaaaaaaaaagaagaaaataaaaaatttatatgtgtgtattctgtgagatagaggtccaaattcattcttttcttttctttttttttttttttgagacagagtctcactttgtctcccaggctggagtgcagtggcgtgatctcggctcactgcaacctccatctcccaagttgaagcaattctctgcctcagcctcctgagtagctgggattacaggtgccaaccaccatgcctggctaattttttgtatttttagtagagacagggtttcaccatcttggccaggctggtcttgagctcctaacctcatgatcagcctgcctcggcctcccaaagtgctgggattacaggcatragctgccacgcctggccccaaattcattcatttacatgtggatatttagttgtctcagcaccatttgttcatttgttgaaaagattattatttcccaccccccacccccgctttttttttgagccggtgacttgctctgtcacccagcctggagtgcagtggtgtgatctcggctcactgcaacctccgcctcctgggttccagcgattctcctgcctcagcctcctgggtagctgggactacaggcatgtgccaccatgccctgctaattttgtatttttcgtagaaatggggtttcaccatgttgaccaggctggtatcgaactcctgacctcaggtgatccrtccacctcagcctcccaaattgctggaattacaggcatgagccaccatgcctggcctccccacctttttttttgagacagtctcattttgtcgcttaggctggagtacagtggcacgatcttggctcactgcaacctttgcctcccaggttcaagcagttctcctgcctcagcctcacaagtagctgggactacagtcatgtgccaccacacccagctaattttttgtatttttattagagatggggtttcgctggtctcaaactcctgacctyaaatgatcctcccgccttggcctcccaaagtgttcgtgttacaggcatgagccacacccagcctcccaattttttttttttttttttttttgagacagagtctcactctgtcacccaggctggagtgcagtgagtggcgtgatctcggctcactgcatcctccacctcctaagttcaagtgattcttctgcctcagcctcccagtaactgggattacaggtgcacaccaccatgcctggctaatttttgtatttttagtagagacgaggttttagcatgttggccaggctggtcacaaacttctgacctgaagtgatccactcgcctcagcctcccacagtgctgggattacaggcgtgagccaccatgcctggcccccatttgagtttcttagcatcttatcaaatagcaattgtgaccatttatttctggactgtcagttctattcaattgacttatatatctatctttaagcagtatcacactttcttggttcctgtatgtttgcattaagcttccaaattgtgcagtgtgatttcttcaatttttttcttctttttcaggcatttactttttttttttttttttttttgagacatatctccctctgtcgcccaggctggagtgcagtggtgggatcatggctcactgtagccttgacctctccaggatcaagtgattctcccactttagcttccccagtagctgggactacaggtgtgcaccatcacacctggtcaatttttgtatttttgtagagacggtgtttcagtatgttgcccaggctggtctcaaactcctgggctcaagagatcctcctgctttggcctcccaaagtgctgagtttacaggtgtgagacacattgccctgcttgaatttgttgattgcatctccatggtgttatttaacatgttcttctgtccctgtattttagtcattcaacagtgtgatctaatttagggccacttttacagcaggaataatttgcaggtggtgtrtgtgtttccagagtcagaacatgtttggtttatgctcttggtgatattcagggctatcagtgatcctctcctggatcattttttaattagaggtgatttgtgttttgaaagggtcacttgggttgctggggggtgtattgtatatgagtaacagggttcttataaggacggagtcggataatcatgcaacagagcacttggtgctattcctggcacrcaatgaccatattgttgttgttgttgttgttgttgttgttgtkattgttagagctgtgtgtgggggacccaagtcctgagctcggaggcattttctggccagggctgtttyctcccttctcccctgcctctggaaaagtctgcagtgccccaaggctctgggaggcatgttcaggactgcagcagccatctctgtgcacctggtggggccccttcagggaaggaaggctggagccccactcacttggttcttgcaccagactgtaagtgccctaaccccaatactctgccacctgcatggcctggggcttctggggtctggctcgttcctggcttcaaagctgtgcatgagccttctctttcagggagccctctttaactgcagcctgtatgtgggcttctcccttgcccctgcttctctagtctagaacttgtagctctgcatctgaatagtcagcttgggcgctgtagggtgctgcttcccatgatcccctgtgcccatcccagaacccagtacctggtagggactcaataaatgtcaactgagccaggcgcggtggggttcctgggccatggaagacctggcacttactcaaatggtcccaaggcccctccaggacaggggggcctggtgttgagattactgtggctgccaccctgaccaggtccttgccagcttctcttctgaccctgggcaggtacctgagcctcttcaagcctcagtgtcctcatctgttagatggagactattgtggcacctctagtgagagtgcagtgggaactgagcgaggtggaactgagcaaaatcctgagccagggttcactattgaccacagcaggtggctgagaagaatgttggatccccagctccacggcccaccagccatctgggactggcaaacccacaggaacggaaggttcctcagggaccacaaagcccatgtgaggtccctgctgctgaagggattctgaggacaggaggagccaaattacctatccagggtcacccagccaaggtgggttaggacctgagtttggtggctctcaggtctggccaatttctttctttctttttttttttttttttttttttttggtagagtcttgctcgttgggtcgggcaggagtgcagtggctggcacgatcttggcccactgcaatctccatctcccaggttcaagtgattctyaggcctcagcctcctgagtagctgggattacaggcatgtgtcatgacgcccagataagtttctttgtttgtttttcccagactgagtttcactctaatgctcaggctggagtgcagtggtgtgctcttgcctcactgcaatgtctgcctcccaggttcaagtgattcttgtgcctcagcctcccaagtagctgggataacaggtgcgtgctaccacgcccagctaatttttgtatttttagtagagatgggggtttcaccatgttggccaggctggtctcgaactcctgacctcaggtgatctgcccgcctcagcctcccaaagtgctgggattacaggcgtgagccactgtgcccagcccctggccagtttctgcacaccagtggctgaggagggagctggcctgggaggaacaccgggaggggaggggcgagccaggagccaggaccccgggaccctccgaggagcggattagtgcctccctcagagttaggacatggccttgggtccaacaggcctaagtctgagtgtgtgtgttgtgtggccttaaacacatcactccccctcctgcaccctccagcctctgttttccaccttctgttttctcattgataagataggcctgaccaggtcattcagggaatgaaatggaagtgcttagcaagacctctgtaagtggaggctgctgctgtcactgttgccattatcctccctctccgctccacccacctcctgctcctcttctttaaccctcagcccttcctgagtcagactttaacctggccaagtcagggctctgtctcaggacgcatggagccagggctggaagtctccactgggcaggcgccaggcagcccctgcaggytggggaggtggaggctgctggagtcaagaggaaccaggtgagggtgttggagcataacaggcttgggaggcaggcagaaacctgcccttctgcaaactctatmtcttccccctcctgggagcagacaggatggcgctgtggcctgaaagcagctgtccctcctgtgtgcaagctcggactgctgcacccagacagattccatctctgaccttccacttgttcgtctccagctcgccatggccaaacagctgcaggcccgaaggctagacgggatcgactacaacccctggtgagccagctgggctggggaggtgtgtgggtgtcccctcrggcatgggttggccatccctgggtttacagcaactcagtagtactccagatggtggcrgtacacagactgccagattccagccatagctcaggagagacagggcccgagggagtaggcttggttcaaatctcagctttcttctgcatgactgtgccactaggacaggtgacatacctgctctgagcctcatctccccagctgcaaaatgaagagttatacccacctggagagcgttggggaggaaaaagtaaaatgctgtccaaagccattctacccaggcaccaagctaaggcctttccagggatgactctttctcacttggtatagagtyagataaactaagataagtaaaataagcaagtaagatacagtcagctcttcaccagacatttgcagaggttgatattgttttcttttttgacttgttttattttcattttatttttgagacggagttttgcccttgtcgcccaggctggagtgcaatggtgcggtctcggctcactgcaacctctgcctcctgggttcaaatgattctcctgcttcagcctccaagtagctgggattacaggcgtgcaacacaacgcccagctaattttttttctttttcttttcccccgcaagacagaatcttactctgtcacccaggctggagtgcagtggcatgatctcggctcactgcaacctccccctcacaggttcaagcaattctcctgcctcagcctcccaagtagctgggattacaggcgtgcgccaccacgcccagctaattttttttttttttttgtatttttagtagagatgagatttcaccatgtttgccaggctggtctcgaactcctgacctcgtgatccacccgcctcagcctcccaaagtactgggattacaggcatgagccactgtgcctggccctaatttttatatctttagagaaaatggggtttcagcatgttgtccaggctggtctcaaactcctgacctcaagggatctgccctcctcggccttccaaagtgctggggaatacaggcataagccaccgggcccagccaaaaatgacacattttagacatatttattggtatgcaaattcaactcagccaggtcttcactctgctccaaactagccccaaaccacataccagcctcttcatccagcttcccagcctttctcccacctggagaggtggcccccaggcagggccagaacagaggattatgggtccagagatgatgtgtgcctgggctggtggggccctgttctgcccagagtagggtcaagagcatcaaactttgcttgagatggaagtagaaaggctggctggctgtgccttgtactagctgggaggctttaggcaagtcactccactccttatccccacagtggtccaggaacaagaygtgcctcacaggccattgtgaaggctatatgagcagagcgtttaactgtggtgttgacgaatccaaggaggagtcatgcaatctgtacagggggtctcaactagtatttggaaagaatagagtaggataggacaggacagaaaatactgcagtagattgcaccaagaaggatgaagcttccattccatgtttgtgctccacagggttgatgatgcaaaggtgatttcttggccggtagtggtggctcacgcctgtactgctagcactttgrgaggccaaggggggcggtggatcacctgaggtcaggagttsgagaccagcctggccaacatagcaaaaccccatctgtactaaaaatacaaaaattagctgggygtggtggcgggtgcctgtaatcccagctactcaggaggctgaggcatgagaatcgcttgacctcgggaggcggaggttgcagtgagttgagattgcaccactgcactccagcctaggggatagagcgaaactctgtcaaaaaaaaaaaaaaaagatgatttcttcctatgggtcatggtggaagaacttggaaagcccctgggctgattcctgcgattaacaatgtgcctgactgacctaatctcaatgtaggggaccagctgtgacacttaggcagatcttcaggccaggacagttgctgattgtctagtttttgtttttcttgtgtgtgtatgtgtgtgttttttgttttttgtttttgtttttttaagacagaatctcactcttrttatccaggctgcagtgcaatggtgygatctcggctcacttcaacctccggttcccgggttcaagtgattcttctgcctcagccttccaagtagctgggattacaggcccctgccaccrtgcctgactaacttttgtatttttagtgaagacagagtttcaccatgttggccaggctggtctcaaactcctgacctcaggtgatccgcccacctyggcctcccaaagtgctgggattacaggcgtgagccaccacacctggccggttgtccagtttttctaaacaggccgaagtccaggtcaccatggagggctgggctggtgctgattctccatttgttacccagggtggagtttgtgaaactggccagtgagcatgacgtcgtgaacttgggccagggcttcccggatttcccaccaccagactttgccgtggaagcctttcagcacgctgtcagtggagacttcatgcttaaccagtacaccaagacatttgtgagtctccccatctctcgtggaggcactgggggaggaaggggacagggctttctggacttcaagcccacacagctgtcaggcttcaggggacagagccaggggattctgtatgaccatagttcagtgtttactgagcgtatcctctgtcccagagccttcgcctcgtggtctagtggggatggcagacaagaagccagtaacgacaggcagttgatacatgatgtgatggaggaggatgggatatcgtgcgagtaagaaagagggaatgaaacctggggagggggctggagagatgcacgaagacttcctggaggaggtgacacttaaaccaagtcctgaaagatgagctactggttggattacacaataaatccaaacgttttccggaaaggaccacatagtaaatatgtgacactgcttggattagaacagtggttctttttttctttttcttttttgagacaaggtctcactctgttatccaggctggagtgcaatggtgcgatcatggtccactgcagccttgaccctgccagtctcaagtggtcctcccacctcagcctctggagtaactgggactacaggtgtgcatcaccatgcccagctaattttatttatatatttatttatttatttttgagtcagggtctcactcctgtcacctaggctagagtgtagtgacatgatcacggctcactgcagcctgtacctcatggggctcacatgatatgccatttcctggggctcatgtgatcctcccacctcagcctctagagttgctgggacaacaggggcatgccacctcacccagctaatttagagacagggtttcaccatgttgctcagactggtctgaaactcctgggctcaagtgatcctgccacctcggcctccaaaagtgctgggattacaggcgtgagccactgaaccctcattcttttttttttttttttttttgagatggagtctccctctgtcgccaggctggagtgcaggggcgcaatctcggctcactgcaacctccccctcccaggttcaagagattctcctgcctcagcctcccgagtagctgggactataggggtgcgcccccacgcccagctaatttttgttttgttttttttttaagacagtctcgcactgtcgccccggctggagtctggagtgcagcggcacgatctcggctcactgcaacctccgcctccgcctccgcctccgcctcctgggttcaagccattctcctgcctcagcctcttgagtagttgggattacaggcgcccgccaccatgcccagctaatttttgtatttttagtagagacggggtttcaccatgttggccaggctggtctcaaactcccgacctcgtgattcgcctgcctcggcctcccaaagtgctgggattacaggcgtgagccaccgcacctggccattttttgtatttttagtggatactgggtttcaccatgttagtccggttggtctcgatctcttgacctcgtgatccacccacctcagcctcccagagtgctgggattacaggcgtgagccaccgcacccgaccgcactcgttctttttaatggctgcatactgttctgttgcctggatgtgccataatttatttaagcagttctgcastgatggactgcttctgctatctcaatatcataagcaatgccacagcaaatatccctgtgtggacatctttgtatacatatgtatttctctaagataaattcctggaggtaaaactagcaaaagaaagactataaatatttataaatacaataggtggatattgttaagaaacagtgtgtgcctataatcccagctacttgggagtctgaggcaggaagattgtttgagcccaggagtttgaggccagtgcaacatagtgagatcctgtctgaaaaataaacaaacaactaagtaaataattgccctccagtaaggtttactcatttacatccctgccaataggctggtctcagagctggttggaaagttccttctttgatccaaaaaaaaaaaaaatcatttgggtatgtatctttttcttttctttctttctttcttttttttttcttttaactagagacaaaagctgggtatggtggctcacgcctataatcccagcattctgggaggctaaggctggcagatcacctgaggtcaggagttcaagaccagcctgcccaacatggtgagatcccatctctaataaaaattagctgggcgtggtggtgggtgcctgtaatcccaactacttgggaggctgaggcacaagaatcgcttgaacccgggaggcggaggttgcagtgggccgaggtggtgccattgcactccagcctgggtgacaacaacaacaacaacaaaatagagacagggtctccttatgttacccaggctggtctcaaactcctgggctcaagcaatcctcccaccttagcctcccaaagtgctgggttacaggcatgagccactgtgcccagcctcattaaatattttacctctttcttgtatgttgcaatatttttctcttcctgttttgaccttgctcatggtgccttttatttttatttaattaattaatttattgtctaagacagagtctcagttttattacccagactggtgtgatcataactcacttcagccttgatctcctgggctcaagcaatcctcctgcctcagcctcccgagtacctgggactacaggcacgtgatactacacctggataatttttttgattttccatcagtagagacagagtccctctgtgttgcccaggctgttctcaaactcctggcctcaagcaaccctcccgcctcatactcccaaatgctaggattacaggcgtgagccacggtgcctggcctgtgcctcttgttgtacagaaaatttttatatttgtgtggccaaatctggtttagtgagttactgagttgagttctagataaagtttcaatcacttggcttagccttgagtatttttgttttgttttgtttgtttttgttttttttgagacggagtctcgctctgtcgcccaggctggagtgcagtggcgcgatctcggctcactgcaagctccgcctcccgggttcacgccattcttctgcctcagcctcccgagtagagctgggactacaggtgcccgccaccatgccagctaattttttgtatttttagtagagacggggtttcaccttgagtattttataagtgtcctcagcaaacaagtttctggatctaatcttcctctcaaaaaggggtgcttacaaagctgcaacatgaggttcctgactgtcaactgtgtgtgactttagacaagtaatttcttctctctgggtctctatttttctacctgtcaaatagtgggcatcaggccaggcacggtggctcacatctgtaatcccagcactttgggaggccaaagcaggcagattacccaaggtcagaagttcgaaaccagtctggccaacatggtgaaaccccgtctccactaaaaatacaaaaattaaccaggcatggtggtgcgtgcctgtagtcccagctacttgggaggctgaggcaggagaatcacttgaacccaggaggcggaggttgcagggagccgcgattgtgccactgcactccagcctgggtgacatgagtgagaccctgtctcaaaataaatamataaataaataaataaataaataaataaataaaagcctctcccgcaaagctgctgggaggatcaagtgggcacaaacatgcttcttaaacttacagatgtggaaagtggggagtttctactgccttgtgggctcttggactgaggttcatggaggcaagcacttcctctggttctctgctaaatccccgccctgggcttcgggcctggcacagaacaggccctgtggcaaatgctggtggaggagatggaagagcttagcactggatatctgagtcagtgcaggcctggtggttggcaccctggagtctgggaccatatagattgtgtgacctttacctcccagagtacacaggatcacaatagcacctgcctctgggttgttgagaggatgagatcaaagaaatcccacaaatagcttggtgtgtagaggaatccagagtgttgaaagctgatctattccacgtcccctggggcccaggctaccagtacctgactttgcccccaggcctgctgctggaaggtgctagaattgcctggatacagctgggccggaggatgggcccaggctgagctggacagttaacccctgctgtcctggcagggttacccaccactgacgaagatcctggcaagtttctttggggagctgctgggtcaggagatagacccgctcaggaatgtgctggtgactgttggtggctatggggccctgttcacagccttccaggccctggtggacgaaggagacgaggtgagtgggcaagacttgggctgagtgggactgagaggtcagggccatgctgactccagctgatttgacccttatatcaggtcatcatcatcgaacccttttttgactgctacgagcccatgacaatgatggcagggggtcgtcctgtgtttgtgtccctgaagccggtaaggaygctaggtagaggatggatgggcagagggatccaaggcgtgggctgagttggaccctgggagttggaaaaggaggaaagaagtgaaggaagccagttcctctaagctgggagggcagaggggaggtgtgtgtgttgggatcccaggggagagaaggtggggatagatgctggggaagacctgcatgtcaggtgkttaagtggtaccaccccrtgccacctgctcttgcagggtcccatccagaatggagaactgggttccagcagcaactggcagctggaccccatggagctggccggcaaattcacatcacgcaccaaagccctggtcctcaacacccccaacaaccccctgggcaaggtactggagggacctccttccctggccccctgcggacctggtcatgtctcctgcactgttactgagttgctgctgtggggcctccgtttcttcgtttgtgtgtgggagggccacacacaatgagcactgaggaccaagactccagaggtcccaggacaggggcaagaatccccagggaaggcctgagggctgggacagtgaactgggctgggagccaccatcacttcccagtgaccctggaatagtgactatgcctctcgaagtatctcatctgtaatgtgggaacctgagggaactgacctcatggtcagtgttgcagggatccaatgtgatggtgcagaacagcccttagcactgggcttggctgtattcgccatttatttatttttttgagacggagtctcgctctgtctcccaggctggagtgcagtggtgtgatcttggctcattgcaacctctgcctcctgggttcaagcaattctcctgcctcagcctcccgagtagctgggattacaggcacccgccaccatgcccagctaatttttgtgtttttagtagagacggggtttctccatgttggccaggctggtcttaaactcctgacctccagtgttccgcccgcctcggcctcccaaagtgctaggattacaggygtgagccaccgcacctggccgcagctgtgttctttaacctctctgagtaggcctctgtgtttggggacggtcccagctgcaggtctgtgctctccttgggcatctgcaggtgttctccagggaagagctggagctggtggccagcctttgccagcagcatgacgtggtgtgtatcactgatgaagtctaccagtggatggtctacgacgggcaccagcacatcagcattggtgagccaagccagcctggggcccctcccctgcacattggtgggagggccttgaccccacctgagagtcagcrcaggcctggtagttagaacccagggttatggagccctgcagatcctgtgacctttgcctcccagagtacacagtgtcacagtagcacctgcctccctggttgtcgaaaggwtgaggtcaaagaaatcctatgccgagcatggtgggtcacacctgtaatcccagcactttgggaggctgaggctggcagatcacttgaggtcaggagtttgagaccagcctggccaacatggtgaaacccygtctgtactaaaagtacaaaaattagctgggcatggtggcacgtgcctgtagtcccagctactcaggaagctgaggtaggaggatcactggaacctgggaggcggaggttgcagtgaggcaagatggcgccattgcattcctgcctgggcaacagagcgagactccatctcaaaaaaaaaaaaacaaagaaagaaatggggggtggagggagggagggagagagagagagagagaaagaaggaaggaaggaaggaaaggaaaggaagaaagaaagaaaaaaaattgtgcaaataacttagtatgtagaggaatccagggtgtcaaaagcctatgcgtgtcccctggggcccagaccaccatcctcccccgtccccctcaccccagtctcagcagctgttctgttcggccttgggcagccagcctccctggcatgtgggaacggaccctgaccatcggcagcgccggcaagaccttcagcgccactggctggaaggtgagttgctgagggtgggaggtcaccaccccctgcaagatccttggcaagtgaggtgggcctgagaatgaagaaggctttagccaggtctggaaggacctctccccctacctgcgcccctgctgcaggtgggctgggtcctgggtccagatcacatcatgaagcacctgcggaccgtgcaccagaactccgtcttccactgccccacgcagagccaggtgaagaggggcaggacgtcacgggggagtggggggacaacaaaagagcccaggctggcccccgcgtcagggaacagctgatctatctgtgtgtccatctgccctgcccaggctgcagtagccgagagctttgaacgggagcagctgctcttccgccaacccagcagctactttgtgcagttcccgcaggccatgcagcgctgccgtgaccacatgatacgtagcctacagtcagtgggcctgaagcccatcatccctcagggcagctacttcctcatcacagacatctcagacttcagtgagtgagacttgccggtctgggcagggcgcaggggctggaggctgcagggggctcagtgtggcctctgtctcccagagaggaagatgcctgacttgcctggagctgtggatgagccctatgacagacgcttcgtcaagtggatgatcaagaacaaggtgggctgggcctctgccaggcagccatgtatggtttcacaggttgtgtgctgctcaagggtgcccaggcaagaggctcctgggctagatcttagtccagcctctgccgtcaaccttggggcagggttgtatccacttcagagaatgaggaggctgtttctttttttctttcttttttttttttggttgagatggagtctcactcttgcccaggctggagtgcagtggcgcgatcttggctcactgcaagctctgccccccaggttcacgccattctcctgcctcagcctcccgagtagctgggaccacaggctacttttttttgcccggctaattttttttgtatttttggtagagacggggtttcaccatgttagccaggttggtcttgatctcctgaccttgtaatccgcctgcctcggcctcccaaagtgctgggattacaggcgtgagccactgctcctggcctttttttttttttttttttttttgagacagagtctcactctgtcgcctaggtgggagtgcagtggcgcaatctcagcacactgcaacctccacctccagggttcaagcgattctcctcccttagcctcctgagtagttgggtaactgggattacaggcatgtacaaccacgcctggctaatttttgtatttttagtagagacggggtttcaccatgttggtcaggctagtctccaactcctgacctcagatgatccactccccttggcctcccaaagtgctgggattacaggcgtgagccaccgtgcctggcctgaggaacctgtttctaacttgcacagagatgctgtgtgggctggcaggatttcctgcctctttggatctccatcttcccatctgtacagtgaggagttggcccattaactcttgagttcatccaggtttgatctgtgactctaaggctttgttcttctctggctctgccctgacctgctccatgatcctccctctgtcagcctccctctgccctctatacccagggagggacttggaatgatgttctgggattcttttcttctgactttgtgtttgtttttgttttggatggattttctctctttcgcccaggctgcggtgaagtggcgcaatctggctcactgcaacctccacccccgggttcaagcaattctcctgcctcagcctcccaagtagctgggattacaggcatgcgccaccacacccggccaatttttgtatttttggtagagacggggtttagccatgttggccaggctggtcttgaactcctgacctcaggtgatccacccgtctcagcctcccaaagtgctgggattataggcgtgagccaccgcacctggccttgttcctctgactttgatgcagctctaggtgctggattggagctaactctccttccccgcctggtcgtgggaacctctctgtcccctccggagccaaggcctgctgggccacgaggccgtgttgagacatgtccttcctcctccccagggcttggtggccatccctgtctccatcttctatagtgtgccacatcagaagcactttgaccactatatccgcttctgttttgtgaaggtaaagggcagggctgggggaggaaagacctcacagagcttcccaaggccggctgggcacatggggagagtgtaggactaatctgtgctggcgcaggatgaagccacgctccaggccatggacgagaagctgcggaagtggaaggtggaactctagccctgaagtcacgccttggccctgacatccccacatgcccgcagagatcctctttgagtgtctgtctttgtccaggtttcagacatttctaggttggggaagatgctattgggaaacctcttctccgtgacacagaatgttctgggtgggagccgcccttcttcatcttagagaaccaagtgcctcctgtctgaaaggtgagggtggcctgacctgggcctctccctgcccctccataggtgggtttgtagggtcttgtgttgcttctggtctctccaggcttggctgagacggacggtagacttccaccatgtaccgatcacatcccagctctgcatggcccctgctaaggctcaggtataacctcaccttccctggctcatcttggccttggggagttgcctttaggcttgagtcctcaagcctctccttttcgtccataataaaatgtttaarttattaagatccttattgacggcttctctctgcttcacactcatgctgatggctgatctaacttgtgaagaatgcccagaagaacctcagacacccccacaactttgtacaaatggttactgtagtcacatagtggcacaaccaggcctagcacccaaggccctcaaatgaattcctcactattaatctttgttgttgttgttgttgttgttgtttttgaaacagagtctcgctctgtcccccaggctggagtgcagtggcatgatcttggctcattgcaacctccacctcctgggttcaagcaattctcctgcctcagcctcctgagtagctgggactacaggcacctgccaccatgcccggctaatttttgtgtttttgtagagatggggtttcaccatgttggctgggctggactcaaactcctgacctcaggtcatctgctcgcctcggcctcccaaagtgctgggattacagacgtgagccaccatagctggcctctcatattaatctgatggtagcagttattggtgctgggtgtggtggctggggtgggggtgtcatatgtgtttgtgtgtgtgtgtgtgtgtgtgtggagaggattggggttcgtgacaaggaagacatggacattcccacaggggtgagagaacagcacagtgggggccaggaggaccagggacttaaataattctcaggaggaggactgaatgttgatcgtgcaagccctacctgcgaggcactcagacgcacatcatcttacacaaccctctgagactgagacctgagttatctccagttcacaagagaggaaagcactctggaggtgaggtgaagtggtgtgcccaggccttctagctggccccgattgagtctcactggatagcaatagtagctcctgaatttctttggaaggtggtgttaggggcctggtcttgaagttgcatttgcatagcaagcgcatgggtttggctcatatcatatgtttaactgggggagctgataggaatatatcatataataaaatacatatttggtgtttgcccctggtccttagtaaagaattcctaaaatccttggagtttctggaagataggcatgtcttgttagtcacatggaatccctctgcactgtacgattacggggtcagaacttttagcccatcgggccccctccatctctgcctccatggaggtgtgagggactagactttgagcccaatcacatggtccatgtctgtttgttattgttgttttggggggatttttgtgtttgttttttcaaatggccaatgtcttaatcagtcatgcctacaaaataaacctgtcaaaaatcacaacaaatttagtataagatctaagttcgagaccaggcacggtggctcacacctgtaatcccggcactttgggaggccgaggcgggtggatcacgaggtcaggagatcgagaccatcctggctaacacggtgaaaccctgtctctactaaaaatataaaaaattagccgggtgcagtggcgggcacctgtagtcccagctactcgggaagctgaggcaggagaatggcatgaacccaggaggcggagcttgcagtgagcggagatcacgccactgcactctagcctgggcgacagagcagagcgagactgtctcaaaaaaaaaaaaatctaagttcgagaccgggcacggtggctgacacctgtaattccagcactttgggaggccgaggcgggtggatcacctgaggtcgggagttcaagaccaacctgaccaacatggagaatcccgtctctactaaaaatacaaaaattagccgggcttggtggcaggcgcctgtaatcccagctacttgggagcttgaggcaggagaattgcttgaacctgggaggcagaggttgcagtgagccgagatcatgccactgcacttcagcctgagcaacagagtgagactagatctcaaaaaataaaaggcattaatggctcaagtctataatctcagccctttgggaagccaagttgggaggattgcttgaaccctggagtctgagaccagccctggcaacatagtgagacactatctgtacaaaaagaaaaaaaaaaattagtcgggcatggtggctcacacttgtagtcccaactaatatagtctgttaattaaaagagaacgaggccgggcgtggtggctcatgcctgtaatcccagcattttgggaagccgaggtgggcggatcacctgaggtcaagagttcgagaccagcctgaccaacatagagaaactccatctctactaaaaatacaaaatcagccaggcgtggtggtgcatgcctgtaatcccagctactcgggaggctaaggcaggagaatcgcttgaacccaggagttggaggttcctgtgagctgagatcgagccattgcactccagcctgggcaagaaaagcgaaactctgtctcaaaaaaaaaaaaaaaaaaaaaaggccgggtgcagtgggtcacgcctgtaatcccagccctttgggaggccgaggctggaggatcacttacggtcaggagttcaaccaggctggccaacacggggccaacatcaacaccatctctactaaaaacacacacaaaaaaatttgctgggcatggtggcacgctcctgtaatcccagcttcttgaaaggctgaggcaggagaattgcttgaacccaggaggtggaggttgcagtgagccgagatcgcgccattgcactccagcctgggcaatgaatcgagactctgtctcaaaaaaaagaaagagtacgtgaacgaatctataagaaacctggagtaaattatctcattttcagctctgaatcacactacagctcaaggccccagggtccccatgtataaagccttccaggagctaggcgtggtgctgcgcacctgtggttccagctactcgggaggctaaggtgggaggatcccttgagcccaggagctcaagcctgcagtgagctagaattgctccactgcactccagcctcggcaacatagcgagaccctgtctcaaaaaaaattatttttaaacaagtgaactactcagaggtctgagtgttgtatttgtcccaactcagaggggggctccgagccatccaaaattcagcacagtacccgcgatgccgcctatttggacacctactctgcccaacctactccagcccgcgtgcccctgcagcccgtcgggcgcccaggccacgcccctgggcgatattggctctccgattggacagcttaatggaggtgtggccggaagaggcgagtctcattggcagaggcgggaccgacggtgtgtgcggaacatggcggagcgcggcaggaagcggccgtgcggcccggtaagtgcgggcggcgggaccccgtgcagggcagcatggtggaggcgtgagaaccagtggcgtgggggccttcgccggggccgggccgcgcctcctgctgcctgcttcccgctgatcccaggccggaagcccccgaaggtgccgcgtgagcctcagcaggatgggaacagcgcccgtgtcctctccggaactccctgcggctccctggcccccgctggattacggaggcgggaccctgctcgcctccggatgctgaatccggagccctttcgtggcttctggagcccttttctgacttccagggcgactgtgggcagtgctgtaccctgagcctcagttttctcttctgttttgtgggaactcattcgacagtttcttgagtgctttctgtgtgccaggctgggtcccaggcgctggggatacagcgggtccctgccctcctgccgctttctggggcagcagttcgcagaggttccttggcttccttgccgccccgtgtggaggggctggctatggtgcagcaaacggaccccctccaggtgtgaccatcagcctcacactcataatcctcctaccactccttctccagggtgaacacggccaaaggattgagtggcgaaaatggaagcaacagagtaagtaagggtgggtaagagtatcttcccataggccactccaccagtgctcagtcaaaccctggagaaagacaccaactttgttccctctgggtcctgcagcacacaaagtggggaggcaggggccgggagccctggggaggctcccttgctgccctctggctgctcacccagcagctctccagagtccaggctgacccaatgagtgggaactgtctccttggccaattaggatgttcttttatccagagaaagaggagaaaaaaaaatggaaggatctcaagctgatgaaaaaactggagcggcagcgggcacaggaggaacaggcaaagcgcctggaagaggaggaggcagcggcagagaaggaggaccgcggtgagctggggtcttggggagggccacaggttgtggcccacggtagttgtcctgcaggcagagcagagatgtcttatctgaaagggcctttacagaccagtaggtccaaacatcttgtcctgatggagaaactgaggcccagagaagggagggagccagcaaactgagttctgacctcctgcttaggtaaatttcaagcctatggaaggcaagccttatctctcttttttttttttttttgagatggagtcttgctctgttgcccaggctggagtgcaacggcgccatctctgctcactgcaacctccactgcccaagttcaagcaattttcctccctcggccccccgagtagttgggattacagaagtgtgccaccacacctggctaattttcgtatttttagtagagacgtggttgcaccatgttggggaggccggtctcgaactcctgacctcaggtgatctgcccacttcagcctcccaaagtgctgggattacaggcatgagccaccgtgcccggcccaagcctcatatctcttaacttagacctctagaacttcatgatcttcctgattttttgacttttttattgagcattttctgtgtgctttaatttcatttttcaattattttgatttcataataaaaatgaaagaaaactacaaagaagacaggaacaatcccagcaaacattgtagcaaaagcttgtccaaacaattatagctacttatccatgtgtagcaaagtacagatacaatgttacaacagtgaaaccatgttatctatgtgcttcttgggcttttttgtttgtttttgagacacagtctcgctctgttgcccaggctggagtgcagtggctcgatctccgctcactgcaatctccacttcccagttcaatcgattctcctgccccagcctccggagtagctgggattacaggcatgcgccaccatgcccagctaatttttgtatttttagtagagacggggtttcgccatgttggccaggctggtcttgaactcctgacctcactcaggtgatccgcccgccttggcctcccaaagtgctgggattacaggcatgagccaccttttgtgtgaccttgggccatgtatttgacttcccggggctgaaggcccctggtctgtaaatggggataatggcagtatcctcactagggatcaggttaatggctatcgggttaatgtgcacacactaaagacttattagatatcagctttcattttatccccatttgatagctggagaactgaggcagtaagtgggagagccaggatgtgaacttaggccattgctactaaccgctccacagcctcgcccagtggtttgccctgctcagaggagccatggagactgctgggagactgaggcccagagaggggagctggatctattttgctcatctcaaaattcctcccacttgggaaattctcaaaccatgggcgctagggacagaggaagggagagaaaggtagggggcccttgcctctcacactggctgggaacatccctcccctgctcagggcggccctacacactgagcgtagccctgccgggctccatcctggacaatgctcagtcgccggagcttcgcacctacttggccggtcagattgccagagcctg

SEQ ID NO: 97944 - DNA, 49940 bp, Homo sapiens
cctgcctcagcctcctgagtagctgggactacaggcgcccgccactgtgcccggctaatttttttttttgtagttttagtagagacggggtttcaccgtgttagccaggatggtctcgatctcctgacctcgtgatcctcccgcctcggcctcccaaagtgctgggattacaggcgtgagccaccgcgcccggcaaggtgaacaaattctcatcttacacattctctgtcaatgactgtcatatgttaaattaaaatgtatgcctgaatagatagaaaggaaaaaagggaagggtctacaaaaacaaagtccaatgagtgactttttttttgagacagggtctcactgtcacccaggctaaagtgccacggtgctatctcagctcactgcaacctccacctcctgcattcaagcgattctcttgcctcagcctcttgagtagctgggactataggtgcgcaccaccatgcctggctcatttttgtattttttgctgcagacaggttttcaccatgttggccaggctggtcttgaactcctgacctcaaatgatccacctgcctcagcttcccaaagtgctgggattccaggcgtgagccaccgcgtctggcccaataagtgagtttttgaccatccccagcagagaactgtccaaggaggcaggagactggggtatcagagcagcctgaggaacctgtggcctcggggagtagatacccactttgatctcaaggtcagggcaatcttgaggggatgctccctgcaaggatgaatccttatgctagtgacaagatgtgggtgacacatccttactctctgccctgacggtctgtcctctctctggggggtggggggtctctgggcaccagccagggatgtggtattaaaggctccatgtctggcgctgtgcacactcccaggtgactgtcaccctgtgtcctctatgctgactgcaacacccacccttcctgcacacagccagtacagctttctctggccttccacccccagagacctgggcccacctgcgccccctcaacccgtggtgaacagcagcaggatgcgcctcttcatcacacgcactcccctgcagcactgggccactagcctttggcaaggggtgagggggaggcaacttggcaaggggtgagggggaggcaacttgtccccaagttgtacaacaggtgactggtagcccctaagaactgggtccctgagtcagtcagaccttcctgtgtggccgagggcttccttgagagctgctgtgtggctctgggcttttgggccacctctctgggccttagttttcctcatctgtagatcagtgaagggcagacaggagcttccttcccttggggaaacagccaggggcctgtactccactagggatcccagagcctctggccaaagcttgggagaccagaggagaccccgcaggtatgggtactcccccagcgagaatctgccaggtggtggcggagacccttcggtggccccgtgagtggaaggaggggtgcccccacccctttaaccaggagcttctgtttgaaggagtcccaggctaaatgaagtcggaaaaccaccagcccccagacgctctaaggacctttcgggggaagcatcttggttctggagtccaaagtcctgacctgacgcgtctcagcaaatgttgacaactcccacctcctgtgtgcagccccacagcctccgccaagccccagggctagagctctacctcccctccccatggcaccccctataacacagcatttcccagggccggacccgctctggctctcccacaggtagcttctctctcaggcaaccccgacttggcaaattccacccgtgcccccacctcattggcaagtgacactggcactgcctccaaaacagtcctggacctaacgactctccctctctcccatccggtgtcagacccaggctgccacagctccttgggggtgatgtcacccctccccctcgcctctggcttccactctgcctccctcccagcagctgggtcaccttttttttttcccaagacagagtcttgctctgtcgcccaggctggagtgcagtggcacaatcttggctcactgcaacctccacctgccaggttcaagcaattctcctgcctcagcctccccagtatctgggattacaggtgcgtgccactacgcctggctaatttttgtatttttagtagagacagggtttcatcatgttggccaggctggtcccgaactcctgaccttgtgatctgcccgccttggactcccaaagtgctgggattataggtgtgagtcactgcatccagctgccactttttaaatctgtgtattgaagtatgagatgcaaatagaaaagcacaccaaacattggtgtagacatatttgccaaactgggtacacctgtgtcatagatcagatacagaacctgggcgatcggtcactgagtgacacatatcccctgcctgaggctgtcccaccaagcacaagggcatcttctatctggttgtacctgccgtgcaccccactcctgcctctgtcctggaacatgaaaccttgtccacaacctgtatcctgttcattacctttctctcctccctacttgaatgttagctccaaggagctggtgactgtgtccttcttgatcacccagcaccctgccaagtgccagacacagagtatgtgctcacgaaactctgggcagcaaacgaacggccgtgccagagcagtgggcactggagaactgtgcatgtgcagccagcagcaggtcacagtgaggatgccctcactcacccagttctccgtcttcctggcccgacgctccagccccttctgcaggcgctcccctacacctcctgaggcctgaaactcatccaccagctgcttggtgtgggcccactcctcctcactcacgatgggctgcagcgccttcaggtagtggtccagggactgctggagagggggcacgggcagccgtggcagtgcatcctggtgtgccttgaagcggctggaagccttcatcaaggagaagggcttcaggaagcccagaggcttcacctgcaggtagcagaacatcctgttcattccctccccggctctggagccctggcagccccaaagctgtagtcctgggcacttaagtgcccatccctgggggcagagacggcctcttgggtggggctggccctggcctcccagccctagagctctaggtgtccccgcctctctggggcctggagatgcaggtagggatgggggagggtggggtgtggccatggttcttagcaaggctcaggggaaccaagtcaggatgaacggcacctttggggtggcagaggtgagggggaccgcccacctgttgggttgcacaggcccctcctttctcaccctggaagaggagccagccagcagagtggtgactgtccctcttggaggtccccacgtccttttctcccaccctttccaggttgagaaacagaagggaagaagagagaatcacagagagccagacaatggcagcaccttcgggtgaggggccttgggcttcctcctgcctttgagatggggcaggggtggggtgagggcagtgctgtggcgagagagccgggtggcctggcatggagggtgagaggcggcagagagagaaagagaaagtccaggaggccctggagtgggcagagacaggagggcccgaggctgctcttgcagtgggcaggcgagtggcaggagctctgttccataccttctctctctgctgcccgtcctcctccatggcaggactgaggttctgggccctgtctgtctgccttggctggatctctaagcctaactgtgctacaaagtgggtgagcagaacctagccagaggcagccacttgcctgggctggaaagagaagacaagagccaagattcagcgggaggcaggtggcagtggcgatggctgtggtggcatcgggggttgtggcagtggcaggggaagctcctggactctagaagctgctccaccctcccgagctcccagaagtagaggaatggggagcaggtgagagggctagtgggggggcattccagtagaagggaacctggaaagttctttcctttcttctctgcatgggctcagtgccagggagtcaggccaaaaggtaataaaaaatccacctgtcagaatctgcgaagatcgttttgatgagggaaaacttggctggaggacagagactgcctggccgctgaggttacaccacagccctgggatcggtcctgaaattagggttggtgcaagggagcagacaccaggaaaaggccatcagtggatgggacagccagaagccctgcctatttcctgtttctctccaggactcctgggacccatctgagccatccctctacgaacactcattttttcctgagctgtggctcattcagctagggtccaagagcggaggacttttggtatgaaaaataaaccaaaggacactgggattgggctggatttgaatgagcaggtccaggggactctgggcaagtccctccttgcctcagtttccctgcaggaaggtaaccagtccagtcggatggtcctggaggatgatctagaggctgtttgtgggatggatgcagcttgggagacagtgacaagggtgcggtggaggctcagggtgttgcaacacctaaaagagcctctaggcctgagcctggatgcaccctccgccctctggccccgtagtgtgtgtctgagacagagtgagacaccagcaacatatgcttggatcagggacggaagggactgaaattaggctagcatccgggctgctcaccggggaggactgaggggtagatatagccagggtggggaagggggctagaggggaggatatagccagggtggggaagggggctggagggaaggatacagccagggtggggaagggggctggaggggagggagaccatggggctgccacctgccagttctgaggcctttctagcttgatgcctccgcgtgtttctctggccacacacaattccccagggaccgtctgataaaccaaaggagtgtgaccaactggacagggtcggaggagtggctctggcctaagcgtgcgacgggtgtgtcaatcggagaataactgggagagtgagctagggtctggatgctcctggtctctctcccctaccggcctgtctctgggtctaagggtgggggtgctaactgaagccggggtcccccttgtctttcctgggtcgttggaactgaatgctccaggacgtgggtttaatcccgcttctgaccttgcgccccaatctcctgctctgccaaacctgggacgcccgcctgaccccaccccatcagctggaggccgggtcgaacagcggccgcaggacgcggtctccgttcccggacgcaaccgcacggcccgcccaggccgtccagggccctcaggcccgggatccgccgcactcaccacggtcctggcagcgaaggctaacatcttcgctgcccgtccgcggacacgcagtccgctccgccccacacaccgggcaaagtccgcgccgccgcggctggggtcggtgggtccttgctagagccttcgggccaaggtcgctgagttacagccgccagccggtagaggcagccccgcgcccaccctctgggccgagcgggctgcgggcaggcacccggggaggaggactcgcgaggcggggcctgggccggtagcgggccccgggcgggcaacggtgcccgggaggttggctgtggggcgggggcggggcatcgatggggcggagtctccttgaggagggacaggaggggcggggacggaggggcggggcgtcgcccggtagcgggtcgcagtaggctggctgcgagtcgggggcgggaccacggcgggcggggacagaggggcagggccgagggcgagtcattgagacctgtggaggaggaaggaggcggtcaccgtccagctgtctctcccctgtccccacatgtcttctaagctgttggaggtagtggtgtgcacctttccaactccgtctggtgtccttgagcctaactcttagagtgataggaaaacacaaccatgttgaccggggaatgtcctctaatattccttgggttagggtcagtaccacccacaaagatgacaggtggtactccgggacaggagactgtcccggaaaaacatggctgagcacaacccaaacttgacgccccgcacaatcgtggcagtcgcggcgcccgacgttcgggcggccgtgagcggtcctagcgcttggcrgccgttggcgcgcatgcgccccgcgcgccccgcactgacatggccgtcgcccggktccgcgcgtccgccgcgcgccggccgttaataggcttgctccctgagcgccccgcaccgacatggcggccgtcttcgctgtggtgactttaactctcggttttcggttatagccggccggcgctcacttgtcttcaggaagctcggagcctttggtggagccggggagaggaagggtgggtgcaagagtgaaaggcgagaggggactgcaagcatccgggtcggctcctggccggagcaagatggctgagggcgagcggcagccgccgccaggtaaggccggcggggccaggccgggccggggtcgggtagggtgggggcggtgccaggtgtgggaggctcaggagggcgagagtcatgacacggaggaactggaggggcaaaagctgaggggccccgaggagggactgagttgaatggccttaggggagaggtgggtggtggggcgccgctggggagggaaccaggggctgcaaaggggtggtgattggggcgcaactctgggttttgtgggagtccaggctgcccgaatgctgggtgggcagcgccgtggtcataagggggccttttgcatctctgggcagcgcgtgcttaagtaagctgytgactcggtggggaagctgccagggaggggggcgaaagtgattccggaggctgccgtctttattagtcgctgcttaggggatggggtggtgctccgtgggcctgcgcccgcctcgcctccagtttcggcctccgcgtcctgctcacccctcatcctcctactctctggttccagtgcctgagaatttattgagggaaactgcccgtggtgtctaaatccctaattttaaaaggctggttgtgcaaggaggttagtctctccggcatctccttcggtaactcttatttaccttgtagcctctttttagttcwtcttaaataactgggatggaggtgctacggaaggatcttagagaccctttttgtgcagaaggagaaggctgtttgccgacctaccttgractaagaaggactggccatagataacttttacattcccgacagaggcaaataggttggccgaccaaacacagctaatgttttgaaagcatttgatattcttgctatcctgtctccaatgttggggtccctgggaaggtctcaggagggagaaatgttgaaaatcagaaaaggcatccyctccatgccccacaaaagaggtgaacaaagagctgggttccgtttcttaggacattcaaaaccagacatttattttgtacaaaacctctgggtgtgtgcccttagaacaaggatgtccaggccaggcgcggtggctcatgcccgtaatcccagcactttgggaggccgaggcgggctgatcacctgaggtcgggagttcgagaccagcctgaccaacatggagaaactccgtctcttctaaaaatacaaaattagccgggcgtggtgacacacgcccgtaatcccaactactagggaggatgaggcaggagaatcgcttgaacctgggaagcagaggttgcggtgagctgagatcgcggcattgcactccagcctggacaacaagagtgaaactccgtcacccccccaaaaaaaaaaccggggtgtccactcttttggcttctctaagccacattggaagcagaattgtcttgggtcacacataaaatacactaacactaacgatggctgatgagctaaaaaaaaagtcacaaaaaaaaaaatctcataatggttttgtgtttcttttttttgagacagtgtctcactctgtcccccaggctgaagtgcagtggcatggtctcggctgactgcaccctctgcctcccgggttcaagcgattctcctgcctcagcctcctgagtagctgggactacaggtgcgccaccatgcctggctaatttttgtatttttaatagggacagggtttcaccatattggccaggctggtctcgaactcctgacctcgtgatcctcctgcctcggccttccaaagtgctgggattacaggcatgagccaccgtgcctggcctatgttttaagaaagtttacaaatttgtgtccggctacattcaaagctgtcctgggctgtgggttgracaagctagccttagaagttctggtgatgactccgggcacagtggctcacacctgtaatcccagcactttgggaggccgacacaggcggatcacttgaggtcaggagttcgagaccagccatggccaacatggcaaaaccccgtctgtattcaaaatacaaaaattagctgggtgtggtggcacacgtctgtaatcgcagctactcgggaggctgaggcaggagaatcacttgaacccaggaggcrgaggttgcagtgagccgagattgctccactgcactccagccactgcaccccagcctgggcgagagagctagactccatctcaaaaaagaaaaagttctggtaaggacatcaggagataggagatataaggcaaccactgttatcagtgagatgaatgtgtccctgaagatgagtgggggtggggagtgggaggagagagaacctgtgccctgaaagagagctgtgctcagggaggttatccgtggctggaaacagccaggtccctggttgtggtccttttttgaaatttgaaacaraacttttgggaacagctggaaagaacttcttctttttagtttttttttgagacagagtttcactttgtctcccaggccagggtgcagtggtgcaatctcagctcactgcaacctccgcctcctgagttcatgcgattctcgtgcctcagcctcccgagttgctgaggcgcccaccactgtgccgggctaattttttgtatttttagtagagatgggatttcgccgtgtgggccaggctggtctcgaactcctggcctcaagtaattcacccgccttggccacccagagtgctgggattacaggcgtgagccaccgcgcccggcgagaagttcttaatgtaatgatgaaaactttggattttggagtcatacatatctggctctgcctggcaagtcacagctctgtgagcctcagttacttctctcttttttaaaatttctttttttttccctaagaaaaagcctcagttatttcttaaaataactataggctactatactttcttcatagaattgtagtatgtgttttataagatgtgtgcaaagcatgggacatagtaggcgatcagtaaatgctgattgcccttatctttttcaaagtttcaaagttgtacaggttgaacatgtagacragtttcaaatggccaatgataatgctatatattatagtctttgttggggggcttaggaaggaacatttctaaaattctgaatgttgattttatactgtgaggttgttgggaatccactgtcccttggaacctatgtctctataacctgaggctggagagactgtgggcgtgacctcatttatcaccatcctgcctttgaaggcttgtttctttgatttgggattgtgtgttctggcaacttgtgtgtgtttcatcagtaatttgttatagtgcttcctggtaaggtagccttttcccaaacatggactggcctgaaggctctcttcctgtgaaatatcccggttaaataatgtcaggagtgccatccctttttttatttttattttttgagacagagtctcactctgtcacccaggctggagtgcagtagcatgatcttggctcagtgcaacctccgaggagagctgtccctttgcagagaatggtgatctcacacrtataaaagggctgtatgttcccaaagattatttccaagttgattatttggaatgtgggacacattttcycataaaagcaatgtggttgggttactagtctgacctacaaagctttttatttggcatcttagttgaagtgccaatttactaatagcagttttgggttctgggaacagagcttgcaggacaggtgggaggaggaagagagcttctgatctctttctggggccttggtttgagttaggcagagatttgtctttctctaaactcaggttctctatccttctccttaggtctccaagtcccctggcacttttcttttcttcagttcctctccagacaggctctatttctccaaatgttatatgttccagaaacttcttaggtccctgtccctttttctccatgtagctgatgtcagccaggttttaggaggaaggcagggggacaaatttataccaggttgtgagtgattgatgatagtcctttactcttccactttagggagagtttgcatttttttttttttgagatggagtttcactcttgttgcccaggctggagtacagtggcgtgatcttggctcactgtaacctctgcctcctgggttcaagtgattctcctgcctcagcctcccgagtagctgggattacaggtgcccaccaccacgcctggctaatttttttgtatttttagtagatatggggcttcaccatgttggccaggcttggtctcaaactcctgacctcaggtgatccaccagcctccgtctcccaaagtgctgcgattacaggcctgagccaccgcgcctggccaactgcctcctgggttcaagtgattcttctgcctcagcttcgcgagtagctgggactacaggtgtgcgctaccatgcccggctaattttttttttttgagacgagtctcgctctgtcgcctggtctggagtgcagtggcgcgacctcggctcactgcaacctctgcctcctgggttcaagcgattctgcctgcctcagcctcctgagtagctgggattacaggcactcgycaccacgcctgactaatttattttttatttgaggcggagtctcgctctgttgcccaggctggagtgcagtggcgcgatctcggctcactgcaagctctgcctcctgggttcacgccattctctcacctcagcctcccaagtagctgggattacaggcatgcgtcacctcgcccagctaattttttttgtatttttagtagagacagggtttctttttttttttttttttttttgagacggagtctcgctctgttgaccaggctggagtgcagtggcacgatcttggctcactgcaagctccgagttccatgttctcgccattctcctgcctcagcctcccaagtagctgggactaaagcacccgccaccatgcccggctaattttttgtatttttagtagagacggggtttcaccgtgttagccaggatggtctcgatctcctgaccttgtgatccgcccgcctcggcctcccaaagtgctgggattacaggcgtgagccactgtgcccggccacacccggctaatttttgttatttttagtagagacagggtttcgccatgttgaccaggctggtcttgaactcctgagcccaggtgatctgcccacctctgcctaccaaagtgctgggattacggacatgagccacttcacctggctaatttttaaattgtttgtagagatgggggtctccctgtgttgcctgggctggtcttgaattcctgggctcaagcgatcctgccgcctgggcctcccaaagtgctgggattacaagtgttagccactgtgcctggtctagattttcttctttctacaagttatgaaaatttccattatgtgggcatataattaattacacatcatcttatcaactgatatttgggttgtttctaatttttttttgttttcaagacagggtcttgctctgtcacccaggctggagtgcagctcacttcagcctcagcctcctgggctcaagtgatcctcccgcctcagcccccgaatagctaggactacaggtgtgcaccactacacctggctaatttttgtattttttgtagagatggggtttggccatgtggtccaggctggtttcaaactcctggactcaagcaatctgcctgcctcggcctcccgaagttttgggattataggcgggaggcactgtgcctggcctagattttattcattttataagctatgaaaatttttattatgtgggcctatcttttttttctcttttttaaatttgagacggagtcttgctgtgttgcccaggctggagtgcagtggygtgatcttggctcactgcaacctctgcctcctgggttcaagcggttcttctgcctcagcctcccgagtagctgggattacaggtgtgcgccaccatgcctggctaattttttgtatttttagtagaggtggaatttcgctatgttggccaggctggtcttgaactcctggcctcaagtgatccacccgcctcggattcccaaagtgttgggattacaggtgtgagccaccacacccagcctctttttttttttaagacagtctcactctgtcacccaggctggagtgcagtggaacggtccagctcactgcaagctctgcctccccagttcaagcgattctcctgcttcagcctcccaagtagctgggattacaggtgtgtgccgtcatgtcaggctaatttttgtattttttagtagagatggggtttcaatatgtttcccaggcctggtctggaactcctgacctcaaatgatccacctacctcagcctcccaaagttctgggattacaggtgtgagtcaccatgccggacctgggcatatcattatttacccattgtcttatcaactgatatttgagttgtttcttttttttttttttcccccgagatggagtcttgctctgtcaaccagagctggagcgcaatggcacgatctcagctcactgtaacctctgcctcctgggttcaggcaattctcctgcctcagcctcctgagtagctaggattacaggtgtgcgccaccacacttggctaatttttgtatttttagtagagatggggtttcaccttgttggccaggctggtttcgaactcctgatctcgtgatctgcctgtcttggcctcccaaagtgctgggattacaggtgtgagccaccacgcccagcstatttgggttgtttctaattaataaaaaatttttttatttgagtcagagtttcactcttgttgcctaggctggagtgcgatggcacgatcttggctcactgcaacctctgcctcctggttcaagcaattctccttcctcagcctcccaagtagctgggattataggcatgcgccaccacacctgaataattttatatttttagtagaaatggggtttcactatgttggtcaggcgcatctccaactcctgacctcaggtgtgatccacccactttggcctcccaaagtgctgggattgtaggcatgagccaccgcrccccgcctaaaatttttttttttttaaagtagagatggggtctcgctgtgttgcccaggttggtgtcaaactcctggactcaagtgatcctcccacctggggctcccaaagtgctgagattacaggtgtgagccactatgcccagcttttttttttttttttgatgcattaaacacctttgtgtttccgtgagcacatctgaaagatagattcctgtaagtagacctgttgactcattgtgtatatgcagttttttattccaaaagattgtccccttaggaggtccttcccacccacagagcgggagaattcttgtttcctcttcctggaatcttgttttgtttttattgagacagagtctcgttctgttgtccaggctggagtgcagtggtatgatctcagctcactgcaacccccacctcctggactcaggtgatcctcctgcttcagcctcccaagtagctgggactacaggtatgcaaccacacccagctaatttttaaattttttttgtaaagatggcgttttgccaagttggccagcctsgtcttgaacccctggcctcaagtgatctgcctgccttggcctcccaaattgctgggattaggtatgagccaccacacctagccagatgtttttaatttgccaaccttatccagaaagagaaatcacatataatttacgtgtccgtgcttattcaggaggttggcaatttattccaaatgtttactgcaattaggttttttttttttttttgagacgaagtctcgctctgttgcctgggttggagtgcagtggtgcaatctcggctcaccacaagctccgcctcccrggttcacgccattcttctgcctcagcctcccaagtagcygggaccgcaggcgcccgccaccacgcctggctaatttttttgtacttttttagtagagatgggatttcaccatgttagccaggatggtctcgatctccttaccttgtgatctgcctgccttggcctcccaaagtgctgggattacaggcgtgagccaccgcacctgacctgtttttttttcttctgtgaattgcctgtgtatgtctgaaacatcaacttggttttatttttctaacggttctgctctgggggggagagggaagggagggcatggttattgaagggattgtcagtattgcccttctctttcctccccagagtgagggagggcaggaggctgtgggtttggcttaacaagcccttactctgtcctggaagtatgtgtctggtttattctaaggctcaggtgttggagtcctggtttaaaagtgagagagaggccgggcgctttggctcatacctgtaatcccaacactttggaggccaaggcgggtggatcacctgaggtcaggagtttgcgatcagcctggccaacatggtgaaaccccgtctctactaaaaatgcaaaaattagctaggcatggtgacatacgtctgtaatcccagctactcagaacactgaggcaggagaatcgcttgaacccgggaggcagaggttgcagtgagctgagatcgcgccactgcactccagcctgggcgacagagcgagactctgtctcaaagaaaaaaaaaaaaattagctgggtgtggtggcacgtgcctgtaatctcagctactcaggagactgaggcaggagaatcgcttgaaccctggaggtggaggttgcattgagccaagatcgtgtcactggactccagcctgggcaacaagagcaaaactccgtctcaaaaaaaaaaaaaaaggtgaaagggagtgtgtgtgttgtaggggaggattctatttacctgtttgttttttcatttttttttgtcaagattcttcagaggaggcccctccagccactcagaacttcatcattccaaaaaaggagatccacacagttccagacatgggcaaatggaagcgttctcaggtaccatttggaactgtggtgagaaacttgggcttttcaaagacagtggttttcctagcatgacgggcggtragttcctggcccttcttgctcttggagcctgacttttcagaagctagggagaaaggtgacaggggagctggctgtctcttcccttcagaggcagtactcagagatgctttatcaggaaggttgcctactttttcaggctgctgccagggtagcccgggagagttccgctcctggttctcttaagccattgccccttgagtgttgctgtattggctgaacatgagtgtttgaaatgatggagcgagtcactttgattcttggctgcaagtaacagcaagtgtggcagccagtgcctcaaggggagaagaggctatctcatggaaactttggccagggatatggctaagcctgcaaatacctgggagctgggacccagagcactgggcacagactggctttctctgctgctcagctgaaatgatgggcagaagataactacttgtacctcycaggcttgtggtacaggctgtggaaagacagactgagcaaaagaaagccaatttcaatttctcagggaaggcctctggcccagttctcgtcaggctcctgctcccggcctggtgagctgggctggagagtgttgctcatgcagaaggctgggcacaggggtccttgcatgctgggcagattctccaggagacccacaccctacagcttctatgccttgtcctcactggggcttggggccatctaaacctgtctgattcctttttcacaagcctgccctctcagtatttggaaatagttatcatgtcttttctgaatcttcaccaggatcaacagtcccttcagcctagggggcagcttggtcccttcagctgctcaaaggatatggtttcagtcctttcatcatcttggttgctttacctcggggcatctcaatgtcagcactatggacattgaggggcagataattcttcattgtaggaggccgtcctgtgccatgtaggacgtttactaatatctctggcttctacccactagatgttggcagcatgcctttccccagctgtcacaactaacattgtctccagatcttgtcagatcttctctgagccagattgctctagttgagaaccwgcttctttgtctgaatccaaatgtgacacttcctttgctgcttctcatccatgtgttccagtgtagctgcagtcaggacaggggctcagacttgccctggtctgagagagttgctttggagaggcctggcctgctgggggtcatcccatggctggcaggaggatcttggtataggaatacttccttctagatatcagggcttgtctcagggcttactgtggacaccccggcttggataaggagaaaggaagaaagagagaggaaaaagggatgaagaagaaacaaaaccaatcaggagtcacttgttcccagcaactgcctctctaggggcctgcacctcaatgctatttttttttttgagacagggtctcaccctggcccccaggctggagttcagtgatatgatcatggctctctgcagcctccacctcttgggctcaagcagtcctcccacctcagccacctgagtagctgggaccacaggcacgtaccaccacacctggcaaactttttaattttttgtagagatggggtctcactatgttgcccaggctggtctcaagctcctgggttcaagtgatcctcctgcmtcagcctcccaaagtgctaggattacagacttgagccacaatacctgaccctcagtgctttcttatccctgtgttgggtgtaactgcagcccagcagggaagaagagtgtctagttgaaagctgggaatggttgtgtggggagacctgtctgtggcaggcatctgcactcyaactagacagcctggcccgcctttggtcgctgattgctgggggtgagacacttggtggtactccttgaattcctggtggtagagcatcatggacaagcatgtgcccactcagctttgaagttaggctactgggtcctagctccatgtctaatgatatcttggtcttgggagaccttgggcggatcacttctcttgaaatcttggtttcctcatctgtaagatggcgccagcagtgtctaccttatagggctattgtgtaaaaaaactgctggcagcaatagtgagtacttggttcactctggctggagatcagcgtgttgctgtggtcrctgtcttgccagcttttctggagggtaggggtcggtatttggcattacgtttctgcttctcctgctattgggttgggagtcagggtcaggagaagtagaaagctcggagctctttggtaacctggtggagctcggggcaggtggggcrggggggtctgccacccctctccccatccccattctcctctctgtttggtaggcatacgctgactacatcggattcatccttaccctcaacgaaggtgtgaaggggaagaagctgaccttcgagtacagagtctccgaggtaggcccaaggaggagctgctgcagcagcctttccaaaaatagctccagagtcactgggtgcggtggctcacctctgtaatctcagcaccttgggaggccgaggcaggcggctcaygaggtcaggagaycgagaccatcctggccaacatgtgaaaccccatctctagtaaaaatacaaaaaattagccgggtgtggtgacgggcgcctgtagtcccagctactcaggaggctgaggcaggagaatggtgtgaacccaggaggyagagcttgcagtgagctgagatcgcgccactgcactccagcctgggcgacagagcgagactctgtctcaaaaaaaaaaaatagctccagagtcttgtgggctcagtgcccaccacggggccagagcagaaaataagatcgcccaaatacatgtgcacttcacattttcatatctatatttctaatttttgaaatctgtgaatagatggatatttataaaattgagatcaaggtaaatatgctgttttgtagttagtatttttgctaattggttttttctttcttttttttttattttgagacgtagttttgctcttgttgcccaggctggagtgcagtggcgcgatcttggctcaccaaaacctctgcctcctgggttcaagcgattctcctgcctcagcctcctgagtagctgggattacaggcgtgtgccaccacacctggataattttttatttttagtagagacggggtttctccatgttggtcaggctggtctcaaactcctgacttgaggtgatctgcctgcctcggcctcccaaagtgctgggattacaggcatgagccactgcgcctggcctggtgtttttatataacttgaaattaaaacagattacaaaacagtaaatgtgctcactggagagatcagtaatagacatgtgtatgacattcacagcagagctgatctctccctgtgtttctcatacccagcttccagggcagcccctcctgacagtggtcacccaggaaagcaagagcttctcttctcctgcagtgagctgtgccctcatttatttatcttattttattttttttttaaatatagagacagggtctcactatgttgcccaggttggtcttgaactcctgggctcaagcagtcctcctgccttggtctctcgaagtgctggggtgacagatgtgagccaccaagcttggcccctcatttatttaaacagccccctatcttcagacttttaggttgtcttggtaaacattgctcctcgcatatcattgcatccccgcacatagatctgtgggccttgtttccgaaggattcattcttagacgtggaaatgtggagtcaaagggcacatgcattttttttttgcgtttgggttcacactgcctggtgggtgctttttggacgttgtttcagagatagttttgtttgtgtagagagggcaagagctgaggggaggcagatactgattggcaggtgtggccttactggctgtttgcttttgctggatgctgtctcccagggctaggacctaggcctccaggagcctcttgggttcatgtcccaccttgagtctcttatctcagacaccagggcctgaagggcctccctttactttggcctacccagctctctagccacagccttggrcctgttgggtaagatgtagccctgccctggcccagtttttccacctgccccaagattaacactgtgtgcctcaccctcatacccggcccctggcagagctgcctattgctgggcctgtctggctattaggtgacctaggtcctgttctgtccacttcaggagaaccaggcctgtgcttctggtagacagccttcccttgggagccaggcccattagtggctttttgggttccttttgggctcactcagtcctttgggactgaggctctgggtgcaggatggctggggaaagagggggttcctcctggagcctgtggtgagggatgctcagctgtgctcagtgggccaggaatgtcgtggaggaaggctaattaaaggggaaggttgtaattaccccagcaaatccttagctgccaagtcccctaattgcccgtggctttgatggtagccatccacaccaagcaggtattgtcttttttttttttgagtttttcttgttacccaggctggagtgcaatggcatgatcttggctcactgcagcctccacctcccaggctcaagcgattctcctgcctcagcctcccgagtagctgggattacaggcgcccaccaccacacccggctaatttttgtatttttagtagagacggggtttcaccatgttgggcaggctggtctcaaactcctgacctcaggtgctttgtcctcccaaagtgctgggattgcaggcgtgagctgctgcgcccggcccaggtattgtcttagctcaagggctgtactttggmaggattgcagtgtggttacatgcttgggttctggagtccagctggctagtttcataacttgtgaatcatttttgaccctctgtttcctcatctgtagagtggtaagagtcagcagactagtcatggccccctggggaaaattcactgagatcccacgagtagtggttgtcttttgcatagcgcctaacacatactaaataaatacttcgattgttattagctattgttaccattaggcattagtcagttctaattttcartagtgttgttgcatagaaagctagcttttggctgggcgcggtggctcatgactgtaatcctagcaccttgggaggccaaggcgggtgaatcatgaggtcaggagttcaagaccagcctggccaacatggtggaaccccgtctctactaaagatacaaaaagttagctgggcgtggcggcaggcacctgtagtcccagctacttcggaggtggagtcaggagaatcctttgaaacccgggaggcggaggttgcagtgagccaagatggtgccactgcactccagcccaggcgacagtgcgagacttcgtctcaaaaagaaaaaaaaaactagctcttatttttttattatttatttatttttatttttatttttatttttgagatggagtcttgttccccaggctggagttcaatggtacgatctcggctcaccacaacctccgcctcccgggttcaaacgattctcctgcctcagcctcccgactagcatgtgccaccatgtccatctgattttgtatttttagtagagatggggtttttccatgttggtcaggctggtctcgaactcccgaactcaggtgatctgcccgtcttggcctccgtaagtgctgggattacagacgtgagccacygtgcctggccagctagctcttattttaaatgatgcctgtcctcctcttatgggggttaacattttcgatttttgcaaaataaatgtgataagagatttatttttgttgttgttgttctgtttgcttttttaaaacttacaagggggcaaaattcaaaaatggtcagtaaaatgttagggaagattttactggtccttgaaatccaaaaaggaaacactggcctagggagaatgggagagctggagttgttctttgtgcctcgaaggtgtttcagccccagttccctttctttcagcccttctctcccaacacagcaaacaatagaggcagcccctacaacattcaaaaagccctctcctgaagaggagctgggagcctttgaattattcattggcccagctgagctagcagctggggcctggctcctgtgactccgtcttctctgtccccttcagtgcctcgcctaagactgagatccctggggaatctggggctgactagtgcttcctggggccaagatgactgtgccatccattgtaagcccccgtttctgcatgggttaggtctggcctgtgcttatcagccattcctggtttttcacaaagccaggctctggcagcgctctcacatttcagcaaggcagctttatgccatcctagccctctgccttagccaggtgtaaagggaaatttatcctcttacaggctactttttctgtcctcccatgccccaagcctagataaaggggagataagagagagcagcactcagggccggtttcacrtatgcagctgggggcatggccagcctgtttcattagcttaagcctgcctctccccaggtacatacatagctcttggctgagtctttgcacatggcaggcctggtctgccttgccctcccaggcgcaacttctcatgtgggcatcaccctgctagttcytacccagtgccaggatttcctgtaagtttcttatgccgtttgtttccatagacacaggcaagatccacttcctggcagggactcttttctcaggactgaatggctgcagatagcctccgcgttgtattttccaccggccctggtgctgggctatttctamaagccaacctggaaggagcaccttctaactgatctttgggttggatagacagccacccgatttcttcattgagtaacattttatgtgccaatgctgcccgcacctctgactccgattctacttcttggtccctgtcttctgtgggaaaggtgtagggggatgggctctcaaactctgccaccctacaaagcattgcacacgatgatctggcatttccacaaagattgagttgcaagctgatttaccatagcattgtgtatgaaataggtagtgaaacaggtggaaataacccaaacatttaacagtgaggaattaaattaattataatgcagtggcacgatgaaatgttattcacttagtaaaagttgtcataagattatgtttatatgtagatgtggaatgaggttcatgaggaaaaggagcaggctgcaaagcagagtgtgtcctgcgatgaatgcataccattaccccgcgccgggcactgtgcaccttcggaggtatttatcatcagccccattttttagacgaagaaactgagaggctcagagttagtcacttgctcaaggtctcacagcagctaaatggtgttttagctggggtttgaatccaggcccaccatgctaaaccatgtaaaacactatgagaagataacacagaagggtatgttaaaatgtttagtgtaggccaggcacggtggctcacgcttgtaatcccagaactttgggaggccgatgcaggtggatcacttgaggtcgggagtttgagaccagcctgactaacatggagaaaccccatctctactagaagtacaaaaattagctgggcgtggtggtgtgcgcctttagtcccagctacttgggaggctgaggcaggagaatcgcttgaacctgggaggcaaaggttgcagtgagccgagattgcaccactgcactccagcctgggcaacaagagcgaaactctgtctcaaaaaaaaaaaaaaaagtttagtgtatttctgggtggcaggattactggtcattttcattttcttctgtttatatttctattttttatgatgagtaggtattgcatactgaacaaaaggcttccataaagtctttttaaaaagatgtcagggctggagttagcttctctatagcagcagcccatgggtaggctgcctacagaaaccaggtgctaaagccaccccgtccctgtcccatcagcctagtgtgcttccctctctggaaagcctatcatgctctcctgaccctccttcatattcagaacagtggggaagaaagagggatgggggagagttsccagtaggggccatgccaaggggtcattgtctggcagcagtggacttccctctgtggctaagcgggagccacttgctctgtagcttggacccctctattttgcctccacaggccattgagaaactagtcgctcttctcaacacgctggacaggtggattgatgagactcctccagtggaccagccctctcggtttgggaataaggcatacaggacctggtatgccaaacttgatgaggtgaggctgccacaggacaggccagggactgggctggcagtgagggtggttctggcaccagttggggaagggcctgcattgtatagcgcttctaggcatatacaaatctcagtttgttaaaatgtcaatttcacttagcaaaattacaaatgagtttatactctgcttggtcatcttctgggaaacacgactgtgcacatacggccctctgcactacaaggctgtttattaagtcactgtattacagcaaactggaaatgttccaagtatccatctgtaggggattatttaaataaattagtccatcaatatcatggagtactgtgcagctataaaaaggaattttttttattttttattttatctttttttttttttagacggagtctckctgtgttgcccaggctggagtgcagtggcgcagtcttggctcactgcaagctccacctcctgggttcacgccattctcctgcctcagccttccgagtagctgggactacaggcacccaccaccacgcccggctaattttttgtatttttcgtagagacggggtttcaccgtgttagccaggatggtcttgatctcctgaccttgtgatccgcccayctcggcctcccaaagtgctgggattacaggtgtgagccaccacgctcggccccaaaaaggaatttttttcatagctgggcacggtggctcatacatgtaatctcagaattcggggaggttaaggcgggaggatcacttgagcccaggagtttgtgagtaggttgggcaacatagcaagaccccgttactgcaaaaaataagaaatggtggtgcacacctttggtcccagctgcttgggtggctgaagcaggagaatgacttgagctctggagtttgaggctgcagtgagctatgatggagccattgcacacccacttggaatgctagctgcatactccatggtgtggatggactagtctattgaactgatcctctactgatgtttttatttttgaatcttacgaaggtgttacctattcaaagcaaacaaaaataaaaatgcaggatctcagaccctgtctagaaaagcagagtctacaggtctgggtagggactgggaacctggatttttactagctttccaggagatggctcatgccagttgtctacaactgagcttaaggaaatttgggtcctaattgctctggcccaatattttcacatagagcagaggggaggactcaggacccagtgaagtgctgttcccaagagacgcccgggcctgcctctggactcttaagatggtacatgatctttttttttttttttttcctgttgttcaggctggagtgcagtggcatgatctcagctccctgcagccttgacctcctgggctcaagcaatcgtcctgcctcagcctcccaagttgctgggactacagcatgcgccaccatgcttggctaatttttgtgtttttagtagagacggggtttcatcatgttggccaggctgatctcgaaatcctggcctcaggtgatccgcccaccttggcctcctaaagtgttggaattacaggtgtgagccactgctcccagccttaagttatatcttaaagctgacaaatcatagctttacagcttgatggatttttacatgtttttactcatggactcaccactcatgccaagttttttacccatggattcaccactyatgtcaagcaatagaacattctagctggagtgctccccttcccaattgatatcgcccagattattctgatttctattccataaattgatttttttccatgtttctgaacttcgtataactctctggcttcttttgctcaatgtcatgtctgagattcatccatgttttcatgtctagctataggtctttttctttgctgtgtagtattctattgtatgaatataccacaatttattcatttcactgttgatggacatttccattgcatttccaccttttggctactctaaacagtgctgttgtgaacattcttctgcacgtcttttgatggcacatgacaccagctcttgctgacctgagagtgtgaaggaaggtggcctgtgtgggaatcatagcactgaccttccagagtctctgtggggctccagtgagttaccacatgggagggttgaggcttttttccagattcctcctgttttgcccctagactcctgtgccctggaaaaatcagttgatgataagtcgcctgggtagtcttctgctgtggaagaataaatgctgtccctccccttccttctgtggcctgtcagaacaggaaccaagctggcctggcaaggcagtgtgggcccccagtcaggtgctgcccctgggcacctgcccactgggatgctgcttaatatgctgccaccactttgtgtctcttgtgttaccaggaagcagaaaacttggtggccacagtggtccctacccatctggcagctgctgtgcctgaggtggctgtttacctaaaggagtcagtggggaactccacgcgcattgactacggcacaggtatctgctgcttgtggggctctgtacttatctagcttcactgctttctgttttgggcttcaggtggtctctgggccctctgagcragtgagagcaatcaagaattcgccaagcacctgcaacctattggggccagctggggttagggtggcttcaccggcagggagggcgtaggcatgcagggaggcccggatgctgcagctctgctgtggtccaccagggggagctgatgccccgtgcatggtgcttgcgcagcgctgctttctgttcttgtgaaaatggtctctgagctcctcatcatcaccaaaataattattaattgagcacttactgtgtgtcaaggcagcagcttactgaagctttgagaaatgggaacgcttcttggtggcctttgcagtgtcgtggcacaccctctcccttgaaccccttgtctcttagccacattctctgtgctattgggctgtttggatctgtggtccatgtaagccaagggacctggactttgaggagagggagtgtgtggacactttaaaagggaagtgtagacaggtgcagtggtgcgtgcctgtaatcctagcacttttggaggctgagggggaggattgcctgagctcaggagtttaagaccagcctaggcaacgtagcaagactccatctcttttttaaaaatttattttaagttatttttatttatatatttatttttttgagacagggtcttgctttgtcacccgggctgcagtgcagtgatgtgatcttggcccactgcagccttgacctcccgggcccaagtgatcctctcacctctgcatctccccactccccagtacctgggactacaggtgtgcaccaccagcctggcaatttatttatttatttgagacagagtstcactctgttgcccaggctggagtgcagtggcatgatcttggctcactgcaacctccacctcctgggttcaagcgattattctgctgggactataggcacacaccaccatacctggctaatttartgtttttggtagagacagggtttcaccatgttggccaggctggtctcgaactcctgacctctggtgaggtcacttctccacccaccttggcctcccaaagtgctgggactgggattacaggcgtgagccactgcgcccagcygattgttttgtattttttgtagagatggggttttgccatgttgcctgggctggtcttgaactcctgagctcaagctgttctcccacctcagcctcccaaagtgctcagattacaggtgcaagccaccatgctgagaccccatctctcaaaaatataaaagggaggtgttctctaggtcagggcatggcctgtggagccaccatgctgagaccccatctctcaaaaatatagaagggaggcrttctctgtgtcagggcacggcctgtcgagccaccatgctgagaccccatctctcaaaaatagagaagggaggcgttctctaggtcagggcctggcctgtgcagctaaggaggacctctgctttggtgagggcccgccttccttccctgaggcaggcagatggggcaccgctcagccctccccttgtctggggaatgtgatccacaggagggagccccagccacagaggcaggccctggagaagggccctcttggaccgggtggggctttgactaagaccagcaggaaaagatcaaagagggaagactggccaggtcagcaggggttggtgccccagctgcatgtgaacccctgaacaatgggagcctgggccctgtctggtcataattggaaactgtggcaggggaaggaaactgagctcacaagcttccaggccctggaggggtcttcgtcctccagagacaggacagaagtattctctgacacattctcttctcacctccctccagataggttttgtgtgacattgtgaacaatgggattcaatsacagtccagtgagttgttcctacagtgcagaccattcctgtttgatatgactgggaaaggaaggaggatactttttcaccctgtaatctgatcatgtgttccctgcttagaagcctgcagtggctccctattgctcttagggtaaagtctgagctctttcctatggccaaaaggcccatgtgacctgtagcctcctgtcattacacgttctcccttgctctcactgccttcgacatactggcctccttagtgttcctcaaacagatcaaactttttcttgcctcaaggcctgtgcacatgctattccttctggctagaatgcatttcttgcttccctcactccctttgccttgccagctcacatctttcagatttcagattagatgttacttccttaggggaaaccttgaacccttacgtcagggtccttctgtgatatcctccagttagtaccctgtctktctccttcagagctggaatcatagtagtgactgtatatttataatgtctgttgtccctgatagatcataaactttctgagggcaaggacttacttgtcactgtctcctagtgcgtaacatggacagtgactgcttacatagtaggtgctcagtaaatatggtggaattgctgagtgagttaaacctacgtaatgaaatgtaaatgtccagcccgggtcttttacgagtggaattatagtactggtagttcttttttttttttttttttttttttttttkgagacagtctcactttgtcacccaggctggagtgcagtggccttatcatggctcactgcagcctcaacctcctgggctcaggagatcctccatctcagcctcctgagtagttgggaccacaggcacatgccaccatgtctggctaatttttgtattttttgtagagacagggttttgccatgttggccaggctgatctcaaactcctgagctcaagcaagctgcctgcctcagcctcctgaagtgctgggattacaggcatgagccaccatgcacggccagtactggtattatagttcttgaaaggaaagggcctagcaagtctttctgaatggggaagaggtctcattgtctccatgttgaccaccctcctcagaggggcacttatcaatgattyggattctgggagactaaaacaatcccagtcctttacctggactactgtcaacgctggttgtttttctcctccagggcatgaggcagccttcgctgctttcctctgctgtctctgcaagattggggtgctccrggtggatraccaaatagctattgtcttcaaggtgttcaatcggtgagagaaaggacaggagggttggaggagggggcgtgaggggccatytgtttcctcctcaaactgggaaatggggtgctctagggttctcctgagtagctcatggttctcttgtcctgtcctaatcaagctctggctgtggatggagtgtccaagccttttttccaacaggttcaaattaacctccaagtaaaagcaagtgaaagaattgtcacataggccgggcgcggtggctcacgcctgtaatcccaggactttgggaggcccaggcaggcggatcacraggtcaggtgttcgacaccagcctggccaacatgatgaaaccccgtctctactaaaaatacaagaattagctgggcgtggtggcactcgcctgtaattccagctactcaggaggctgaggcagaagaattgcttgaacccaggaggcggaggttgcagtgagctgagatcgtgccactgtactccagcctgggtgacagagtgagactctgtcttaaaaaaaaaaagaattgtcacataatgtctgccagtattgacacagtgttgaccatatggaggaagaattctaagcactttatgtataactcattaattctaacaacaaccctatgaaatagcaactgttatttccattttacatatgaggaaactgaggcacagagatatccggtgtcttcactgggttcacgccagctgaacccaggtagtcagactctgacctgctgccccacaccacccaagccagtcgctgggcagcactgatgtggatcagttacccagagctcttaaaatccccattgcgggccccagtctagcagtgctgctgcagcaggcctgtgacggagcccaggagcagtgctcgatgcttcacaggtggttgatatgcagcctctgataatatagaaggttggaaccagaagaacctaggagataacctgctgggacttgtgttagctttcagacaggccaactgaggctggagaggctgaggccctgcccagggttttacaagttgtcaggagttgatggcaccaaaacccaccttcctaatcagtgattttttatttatttatttgtttattttttttgagacagggtcttgctctgtcgcccaggctggagtgcagtggagagatctcggctcactgcaagctctgcctcctgggttcatgccattctcctgcctcagcctccagagtagctgggaccacaggcgcccaccaccacacctggctgattttttggatttttagtagagacggggtttcaccgtgttggccaggatggtctcgatctcctgaccttgtgatccgcctgcctcggcctcccaaagtgctgggattacaggcgtgagccaccgtgcccgggcccttaatcagtgatttttatgcctttcctgagccaaaagatggctgagtgtttgttgggggaaataaagctacattattgaaattgagaccagttaacactcttcagtggttattttggggtctccttgtgctcccagtggccgaaagggtgagactgtctttttactttttgctaccttccctttccctgtcctcctgtgcaggtaccttgaggttatgcggaaactccaraaaacatacaggatggagccagccggcagccagggagtgtggggtctggatgacttccagtttctgcccttcatctggggcagttcgcagctgataggtactrgagcgggaggtgcctatccctccacccccaaccaaggctgcgttctgtggccctcccctgcccctcctgcgctccctccttcccttcttcctgcccagggcagacagtgacagcttggaaagcagggcattagaccagctattgagggaggctgtttactgtcgaccttctgctgtgagagcccgtgtggtgggctggaggaggcggaggccaagcgccaccaagataatgggaagtgacatgggctggagcaagggcgcacgcctggtgcataatggactggtgtgaaatgcgccccagctcctggcagcagctgtggggttttatgttgaaaatgagggacccttttgatttggtgaccagtgtcatccactgttattatcgagctgtgtgcaaaggggcccgttagggagcagccrccaagtgctgggyggtgggcctgcttcctgtggggctcagagaggcctgctctggtgactccccaactcttgaagctagttttcaggatgggcgtrggtgatcatctctattttgatgaagaatgaactgcctacagactgatattcataaatgaccattagttgtggcctcgggtgcattgcctccccgaatcttctcagtgacactgcgaagggtctgccagcatgaagccggctctgctgactggcacctgcaccaggcaccatactgagtgctgtaggtgtggtaattgttgtcatggcccctaggaggaggtgctcttcttgtccccagtgtccaggtgaggaaactgaaccttggcaggctgaagtcatgcgtccaacgccatgyagctagagcttagcacattagaatacacaaacccagagttacttattgctccttcaaggtgaggtgttgagggcaccacgggcaggactgaggcccctgggggggtgtgactgctgggccgggttgcccaggtagtcgtggggcctggttctgaacgctggggcccattccttttcccagaccacccatacctggagcccagacactttgtggatgagaaggccgtgaatgagaaccacaaggactacatgttcctggagtgtatcctgtttattaccgaggtgaggaggaggggtgagagagaagcccatggctgcctccaggctcagatgaaccaaggctggtggccttacagtggatcagaagagccagagctgctgcccaaaatggcagggccggccggagcgggttattgaaaaggaagcaccactgggcctcttccgaaagagccgctgctgactgtcaggtcctccgcccagttctccttcartttctcctgaacaccacaggagtcttgagatgagggtctaagacttggtcactaactggccttggtgactgctgcagcaggtctgaaagggtcggggcgggcggaggtttgtgggggagggtcagcatctttcggtggggccccacaagggtctgtagaaccatgtgctgtggatgtgtaaaatgaaaccaccagaggagatggagcgaacttctggtgcagacagcttttctgtcgaagggacacgtctctgtcagtgcctgaggacgtgggcccgagcaaagtgctggagtgggagtgcgcaggcctggcctgtggtggcagtcactggatagccagccccacggctgggttctggaactggaagttattgtctcaccaaggcaggattccttgcagtgggccctggaccacttgtgcgagatctcctagtgtgtttgttaaaacgcacattcctgggccctccatcccagcttattgcatcagaatcttaggggacaagagccaggaacctgcatctaaacacacgtgccaggcgactgcacaggaaagctggggaccctctgctctctggacctctcttgagggasgtgttaggacttctcatcctctctgccatccccatgccccagtttccaaagggcgccctcgctcagctatctggagagggtttgagagttctatccctcctcagtccctttcccgacaccagcacggatgtctgctgcctcagtgaggtycctagcaggcctgtggatgctggccacgggggctgctctccgtccgggctgtgtattctgagcccccgacgaggtggagaaagctgggttataaccagcagccttggctccaggctcttcctggtcaacattcggctcaggcttctgccaaactccagaggccagaggggaatgacacattttttccaagtcagcaaatggagccgggactgacggctgggcggccaccacttcattcccggagatctgctgccctcagcagtgtggcaggcccaaggtcgggaggacttgggggcagcctggctcactgccttgaaagccagtcacgcgctgctctctgtggagtggaatgtgggggtctgcrgagccctgggggacctcaggataagctggaggagcagggtgggaagaagggtgcagatgccacactgagttcttgggtgtggctgaaaggctgagctgtttgggctcccccggcggytggccaggcctctgggtccctgtcggtattctaactaggaggcatgccaggcctggyctccaggattttgggaattgattccatggtaaaattttgtctttagttggttggttgattttgttggtataaacaccccaaaagcttttccaaagtttgggacccagttcctccagtagaggaaatctcaaagtagccactaggtggcaggagaggcacactgaacttggagagggtttggtgacatttatttgaggcagcagaaggaacagggaggggagggcgtgcctagagttgttggctgttccgcaccttctccacaggtcygggttttcactttgggtctaggctcttgggcatggtgttcaacagtagaccctaggaggagtgtgcccaggagccggggtggctgcagcaagggcccatcttgccacgtggccgctggttgcagcacacgttgtgttggttctccagagcgcccaccctcttccacctcggagcagtgagcagcattttgcagtccctagttggtgagtggcctggcctagctcactggggacctggaggcttgcatggagttctgtacgccttgcttgggaaggaggcagtgtttcctctggagaccctggattcaccatggtgctcttttaactgggagattaactaaaacaccgagaacttgggagtggaatcaggcagccctttcagggtctcatgccaagactgccctgatacccgtgggcatcctaggtgagggaccccaccttgcagggcctctacagcctctgtaaatgcagccctggcgcctttaagagcccagggcaggcaggaaaagaatttcagtttcaatctggcttctaaatttggagttttgggaagggagggatcagatttcagctggaagggaaggagctgacaggaaggcgctgtgcagagcctccccacccccgcccatccccccagttactgacagaggagccatttacaaaaggccgattctctggggagtggagaggcaggaacgcagcgtctgtgagtaatttcctgctcaatatggctgctctgactcacacgattcccctggggtcactgcgggctgcagctcgctcgctcattctggttctttctcttctccctttgtggctagaatgagctaattttttctttgtcttccagccccgattcctttttcycccactcgtctgttttcctttgccagagttacaggcaaaggactgtaacctccctgaaggacttagggagaccctggggtactgaaggcctgggggcagcctgcagcccctccaaagaaactacctctctggcctttctgtgtgtaggggcccagggccactggagctccaggacatgggcctagccctggctctgccagaggccttttgaggatctgttctttggccctggtaggcgaggctggccaggaggcaggggctcttgtcttccagtgcccatctgcctgcctttgcctcggagcccttgcygggcaggcccctggcagacaaagccgacaaagccgacagggtgcctcctggttgcttgctcagagggccctgtccagagagtgaaactggttacacagctccatgctccctgagctttcctgggcctggaagtgtgcacagggctggagcctgcagactggggaaggggtggggtagggtggggaggtgggggaggggctgggggtggagtgtggttgagcagggcagttgaaacaaagctccccagaggtgaggcccctgtaggctcggggtgcctggctgccctcctggaggagagagcctggggtgattctgagtgaagcgagtggtccaagacaaggcccccagggaccagagtgggctttgtctctgttgggtgcctcgggctcttgcctggctgtggtggagcctgggagagaagaggaggggagggaggagcctgttgtccttgctcctgaacatgggtgtttggatgggctttttgggaacctgggccaggggagggaaatgagggggataaaatgacaggttttttttgacttaaatcttaaaagttttgtcacagttgcccttactagagaagtaagaggcctgccaggagtgggtcaccaggtggcagcccatggctcaagagtgggggctcctgagggctcttgtggtgaactgatgcccctttttggagagcgtttctggcttatcttttctccttcaaaaaataacccagtctcccctgacacccgcatgtttctagaaccttccaagtctctgtttctttgccagattcagcctctttgcagagtcttccttctgcagcatgggtctggggtacagagccctgttcccctgtaaatgctgcctatgagctggggggctgtgtcgaggggaattatgaactgcttggttaataaatacaaatgtgctggacttgcggtgtcagggggatatgctcaggcacacaggcgtccctctgtggtttctgaygtcatgggaacttcatgctggctgcagaatctttctcttccktcctggagggtcagactctttggcaagagggaggaccaggaatggagccgtccttgtgcctgcctctttcagctgctgtggcggccaccccttccccacctcctggccaggccaggctggctgctgcttcaggcacccctgcctcccatcggccctctcttccctgcctgcatggcaggcagagggctgtcggatacctgggtttggtcatacccaccttggtcctcttgcaaattgaccctttcctcatctcttctagctctgctggtggcaggtgcagaccacgtgtcctgtgggggggcctgggggagagggggtgggcctggaggggtggggcctagctgctgctgctatttatctgaacccaagtraatccctgtgctggagaggcgctctgaggctcctggggagtcggtgggaacgacaccagaagctcaggtggagatcttatcttcctgaggctgctggatttggtgggcgataggaatcaggccccctttttttggctgtgggagaaagaggggtgactgcgggtaggtgggcaaggaatgttatattttcctagcaggccttgagggccaaaggggaaccttgtctctggcacttgcatgtgcctgtttgtatgtttgcccctcaggcagatgctatagcttggtccccaagtgtctgygcgtgcattgtgtgygtgtgcgtttktgtgtgtgtgtgtgtgcatgcatgggtgtgactttgctgcaggggaggagggatgagctcccagccagaacctgtctcttcagcttgtggcttctctttttcagatgaagactggcccatttgcagagcactccaaccagctgtggaacatcagcgcygtsccttcctggtccaaagtgaaccagggtctcatccgcatgtataaggccgaggtgagtgggggctggccartgtgccygtccctgctgccgcacttggtcctgggctggggacaaagcaaaagatgtggaacctggggctcctgcttcctcctaccccactgttttgctctgaatcttaggccagcccctctgacacttggggcctcggaatctcccatctggggcatgggcagtcagagaagcaccagccaccccagccccgaaaagctgcagtccagctctgtcctgatgagcttggaggctgaggcaaggacctgctgcatggggagtgggggcgatgggggcctcccttctcctttatcaagtggccaaaggctcctcaaagctcgggcagtckgagtctggctctcccatggcatacctgggaagggtcttaccctttggaggcatctccaaagtgctgccttcaaatgttagtgtgtatgatcactgagtggtgggaggtctgagggtaggccgagaattggcatttttatggaccgcttcagggattttgatgcaaatggttttccctgctctcaaatcagatgctgaggagaggagagctgaggcttcctggagctccccctgctggcaggcagccgagggtgtctcctgccctcttggcactgttctcccagccaaggaggtggccttttctctcttccaagtggggaggagacattttatttctactctgtcccttctgctagctcctcccacttcctgggaagactaattctagaactgcttgaccttggccagggaagggctggatgtgaagttccacacctggagtgatgggtccttaaagtcccttctttctgttctcaggctggcccttgtgactagttcatggcctcagacactgtactgtgggcaccatctcttgactcctggccggccttctcttctgggaaggggctgctccaggtcttcattggacccagagcttcctggatcccatcagcagaggcgggacaacggggaagggygccagaggccagcggggtgggggagcacagatgcttccarttggcttggctccctgcacttggtcctgaaggggttaatgaggcttgaactgaacagaccsggccctcactcccttccgccccctccccctttggtccccttcctctggacctcacatcctgtgtttaggttccagcccacatacctctctaatctgagaggcctgagagcccgttggctggagctgcctaggttccttccggctgcagctggccacccccggctctccactccgactctgccctgggtcactgccctctggtgtcctgatgttcctgaccccacccccgcctgtcccacagtgggggctgctggggaactctcactctgctgtgccccgcctccagggtgtctgagcatgtgagaggtgcacatcgcccaccagccacctcccaaccccaacccttgtgtgccaaagagaggactctggctgccttctctgcttggtacctgaagtactgtcttctctacaagcctcttaattcaagtgactctaaacttctctcgactcaggctctaaggcccaaaggatagggcaagagaccctgtccccttctctcacctgcccttccagagacaaaagaactccaggctgccagaggatgagggaggagcatattcggattgaaaatggtgatggtgtggcaggaacacagggactgtccactctgcacaggctgtcggggtctccgtgggggctgagcacagggtggcaaacacaaagaggacactgaaaatgaccaactcaggatgggggagctctctagtaatctgaaaaagggagattctagccctagttgaggccggcgctgtgtggggaaggggacaggctcctgtatagggtgacgctggaactccctgactttaagatcaccaagtcaggccgggcgtggtggctcacgcctgtaatcccagcactttgggaggccgaggtgggcggatcacgaggtcaggagaycgagaccatcctggctaacacagtgaaaccccgtctctactaaaaatataaaaaaattagccgggcgtggtggcgggtgcctgtagtcccagctactcgggaggcagaggcaggagaatggcgtgagtccgggcggtggagcttgcagtgagctgagatggtgccactgcactccagcctgggcgacagagcgagactctctcaaaaaaaaaaaaaaaaaagatcaccaagtctttgcctgtaatcccagcaatttgggaggctgaggtgggtggatcacttgaggccaggagttcgagaccaacctgggcaacatgaggaaaccccgtctctactaaaaatataaaaattagctgggtgtggtggctcatgcctgtggtcccagctacttgggaggctgagacgggagaatcgcttgaacctggtaggcggaggttgcagtgaattgagatcacaccactgcactccagcctgggcaacagtgtgagactccgtctcaaagaaaaaaatcactggttgggtgcggtggctcatgcctataatcccagcactttgggaggccaaggcaggtagatcacctgaggtcaggagttcatgaccagcctggccaacacggtgaaacactgtgtctactaaaaatacaaaaattagcctggcatcgtggtgcgcacctgtaattccagctactcaggaggcygaggcaggacagtcacttgaatttgggaggtggaggttgcagtgagccgagatcatgccactgcactccagcctgggcaacagcgagactccatctcaggaaaaaaaaaaaaaaagatcaccaagtctttgcagtgttcaacactcattgacaacttactagcaactagcccttagtccttggtcccgaagggcccatgggctggcatgttgcctacacagaggtccaaggagagggcttgttttctcaggccagttcttagcccctaaggaggccctccaaggcctgccagtcttgcagtccaggggtgggtaggaaggctgggtctccagtcagaactggttgattgaggggagtcagcctcctgggctgccacagaagtctgaccagcctggcagtaggtggcctcaggatttgggtctaactctgctctgtcccagcctttctgaccgaagaaccaagtgctctcrggggccttgtgtggttgcggggcggcrggggggagggtctgtctttcctctgggccatggctgtgtgggtgctgccttcagaaggaccttgtcaggacccagggagtcccttccccagcttgaatcacctctggctggaaggtcagggggcagtctgaagccgctgctccgcccaggtacatgggagggccttgctgggagaaaggctgggctggaggctcctcctgccctggagccttaggcttccttggcccagctcctgtggctctgagggggctggctctggggtcctgtgggcagaatgggaagaacccctgcctccaccccttctcgccttgcaacttcttctatgggagctagagggaggttgacctttgaccccttctggaattccagggcccttggggggtgggggggctcttatgaccacttctgggatgacataagcaccatggcagctgccttggcctctggcctggatctgcggctgctccccctcccgcccasggaccacctcccgctccctgctcccgcattctgtgtctcaggcccaggatcctggctgtggccagggctctgctccccaccccaccatgagcttggtttccatccttctttccctcccctcctggcgcctctttggcccactcgtcaccctggtgcttctccctcttaggttccacagctgatttttgaggagagggaacctgggccagtcatagcacccgtttgtctctaagttagttggaggttaagatcacagccacagagtgaggctcttactctctctgaggccataagtcttgttccaccccagccaggaggtgcctaacatactctgttttctgtggccaaaggtgtgggaggaggccctggtcagtcttggcagatccaaccctcgcatgcccagaacggctcctgtgagagctagygtccaggtgtggcaggcatgggggtgctgttgcgggagctgcagctggaagctggggttggctgcctgtgggccaggccagcttctgtgataggccctgtcacttgctctccagctctgctcctctgctaggagcccgggctgggctgggctcagggagtcgggcctcccccstgctcagccattcccctgttcagcgctctttttcccctgccccccacacaggctgctgggaattgcccaggggtggggggaactcagtgtcagctggttcttattgtctcgctctgaagtgccaagatgcctttttcagtccagagaactgaaagctggagaaaacaggctttgggacccggcctcagcctcttaggcttacgttcaaatgtccccacgtctcttctctagaactgggacctgggctgggggtccccagtgatcaggagggttctttccacctcaggttcccaacttccctctctgggccaagtgatggcacctggctgcctctcttctcggtttctaccttgtaggtttgggctgccttttctctmtttctctctctcgtgggtctcgttgtggagtgggtgtctttggatagaaggagtgaggaactgggggaggaaggcctgggggatcccctggcggggctacttcctgggcccgggatggacacctgggagctgctgcggttgttggggtcctggcaggggtgtggtgtggccctcaccactctgctcacctgctccttcctcacagtgcctggagaagttccctgtgatccagcacttcaagttcgggagcctgctgcccatccatcctgtcacgtysggctaggaggggccaagccgaagagccacccaggccacagttcctgtgcctgccttccccaccccagcagtggcccctccccatcccctccctctgttcgtcccgtttgatgagaggctgtttactggggtggggtggcgagatgggcttgagggggctcagagcataaggcttcagggcccaagttgggagaagtgaccaaagtgtagccagttttctgagttcccgtgtgctagactggccagaagagagggtctggggcctggtcactcggccactctctcctgtttctggcctcttctcccttcactcccgtccagtctggttttgagagcaggggctgttctgcagcacckcagggaagggaggagagatacctgctgcttccattgcttttcccttcctggagtcgatgcctttctaagggttggagctgctccttgcaggggcgggtcagtttcccaggccatgccggggtggccatctatgstagggctggaagctgaggctggccgccagctgtgggctggggtggggtgggtggggtcgggtggtggagaggccttagctgtcctggctggtgcccctcccaggctccttttcaccctgccccctgggcctgaggccccctgtgtcyaagcctccccctggctcttcagttctctagcccttggctytgctgggtttcctgactgtagccacatctctcccgctccctaagggtaacctagccaatggaagctgscctttgggtaggtgctgggctcctgggagggcccagatgatggggtgaggcatgtctttccagaactttccctggcagggaggggatggcagaaactcagggaggggcttggggcccattgtatctggagagcctggattcctcttggcagtcttaggcccrgccacttctgctacctttgcgctgctgtgagcctcaccctgggcccctgggccctgcttctctgctcccctgggtgatgggtgggcccagaaggtggcagtcccacaccttgtcctcccacctccctgaactgtccattgcttttatagggtgaggtaagwgacagcctcccaarcccaggctttggcactcagaatgggcccagtgggggctgggcaggcccattgagggccaccgccgaggtttctcctagggctgttcctgggcctggctcttamaggctygtccsccaggsctgsccttytycactgccccctcctgtgtctgggtccacacacccttcagkaagggggagcactgagaagcacagcacaggggctcagcctgggatccggtgatggtytgggcaraggctgggtcaggagtcccaaaggtcagtgacagtttytcagaaraggcccagcgtccacctctctcccagggccagacascccttcctggctcccccatccccctatgggctcccagccccttgcaccctcattgctgttcagattaaagcctctgttttgcacctgtcacttgtgtgaggtatgtcttttcatgtcacatgtttaacccatttctgcatgactgacctccatcaggtccccttctctcaggccacagtgtctgagacgagctgtttcaatttgggttgagcctttcctgggtttaaatcctagctgtctgcagtcccagctgcaaggttgtaagttactgaagcccctgagccccagcttcctcaattcacaaaatggggacagtcacagggtgactgccagcagtggacagcagatgtgaagtcctcagctcagggcctggcacatagcatatcccgggtggtcactgcagctgtgcttggtgaagggggcccctctggactcccaacttagccccaagctggccagggagcctttggatgggctttgacagtggaacatgcacctgtggtttgtgagggggtggccctctattctccctcctctgcccctcctgtccctgctgggctggagttgagggtctctggggctgctgtgccccagacttccttaagacactcttgctcagagaacaagggtccttgacctttctcttggccttagaggccttgcatggactggaaagcctcagcccctcatcaccttgcgctgcctcaggcacacccgagttcaaactgagcagctgctgcttactcaccaggaagtagagggccctcatggttgacttctctctgagcctcagcttcctgatctgaaaaatgggcataatgacgttcctatcattggtcttgaggattccttcatttcacaaatagtggctgcatgttcctcatgactgcagtgcacccagatatgacagtgttaggtagccggtggattatggagaaaataacgtcaattagagaaggcgttgatgggggcagggcagggggttacttgctctaaaaggtcctgtgagctgagaccctgaggacaagaaagagccgctgtggagagctcaggcctgggcctggagggctagggttgggtataggggccagactttcaggccggggccttgcgggctctgctgagtttggacagtgttctatgggaaggtgctggaaggttttgttggggagaaggggagataggaccatttgggaggttgtagttgtgattgggcacagggatagtggcctgggtgagggttcagagtgggatggtgggaagtggtccaatttaggctgcatttggtgtcgctaacaggaagggagttatgacagggagccgagcagccaagaaccccaattcttggcttgtgtggcttggtgccatttcctggggtggggggccctgagggagaggaattgctgtgggggcgcggaactgcctgttagcttctaagaggaggtgctgaggatgagggcgctggggtgggctgaagaggatggaggtggcgggcatggtgacgaggcgtagtgccaaatgggtggaacatgcagatgagggagaggagagggccggcttctgcacagaggagggtggagtgtgggcaggggacccaaagctgcaaatacaaggagcattggccctgggtgggctttcgtggggtgggggaggggggagcagggatgagaacgcagaccgcaccctgtgaggtctgcttgtcatggcacaggcccccaccctaggaggaagatgtggagggatggtctgctgcttgaggtggatactgaccagacatcactcgcttctcttctgagtttcactgtggtgggagtggggacgggagagtgggcagggtggtggccaagggactgccttgaaggtgggctctggtcagactggcaaggggctgcctcctgctgcatgctgggaaggtccaggagagcgggaggttgaagggagcgaggtcctgagaaggtaccggtggccttcacggggcaggtggctgaggcaggatgctcgtttctccctgtgggaggaaggcagaccctgcgccggtttggcggcgggttgggctgggtttatttttacagggaaatgtaaggcatgaggggcagtgagagctccgaggacgtgggcgtgggcttctgggcaggatgggagcccactcaggccctgggagatgggccatggaggcacgtgcacctgtagcctgtgctgtgctcggtggaggttggcctgctgctggcaccccagcggctcaacatgtccgaaagaagccctctgagtgtggggctggccgcagagctgaagggcgggtgtcacttcccagcatcctgggccacaggagctccaggatggacaagctgaactcagccacttgtgctcctttttggttcgccggggcagaggccgcttcatgctcgtgagaggtgagaggaagaagccttcctgggaggaaaatcctgggcagaggttggggttggaaggagagcaaagctgagggtttggtgtgcccaagacttgggcctaagtcaggtgatatgtttttcttgaatcccacaagcattaagcatgtgttatatatgtatgaggtattggaggaatgtggagatgagaaaaaggtaagaatctgccttcaagaaacttccagcttactggggaaacagagagatggagaactagttgcaaaggagggcggaaggtgatgcggccgggtggactttaggtaagctctggaatactctgtggaggaggtggcgtgtgggcatcctctcacctgggtgatgggcgcagaccaaggacgtgctcgcggggccattgtgcacagagatgtggaggggtggctggcaggggacacagttgcaacagcaggtcggggctggcctgcagagggctttaacaccagctcgggatccaagacccccgccatggatgcccgtagcactccacacgtggccttgacacttgcctagcggcatttaattctctacaaaatgcattgcttaaggttcgtcttccctgctagaagatgagccgcaggaggccagggactgtctgtcttgcccactgctgtatcccagtgcccagcagagactggcacacagcaggcacccggaagcaggaatcagtggttcggtggggagttggtggggagctggggaagtatgtaactggtgcctctgtggtgtgtgtgagagatgaggattgggatttaggaaactcatgggcagctggctggatgctggtgatgggactgtggatgctggtgatgggactggggccttggcccagataagggatgttgaaggccccaagcagcacagagagaggccctgggctgggaagcggagggtggaggtgggagctggtgctgaggaagagggaggggttcttaatgaccctaggcacatgcctgagaggaggactccggcaaaggtagctcagccaggggtgcagagtttgaggagctctggtagacatgttgcatgggctgaatgggaggctggcagggctgccaggacccaacccctggtagagtggggaatctggggccaaagagattcccagaatcctctgctgtgccctgcttgttctccagcctcaggcccttgcccacacccttgctgtgtcaaggtccagccaccctggctgcctctcttcctcacactcctggagccgctgatcagtttggccctgttcgaagaaccctttaccccactgggcaacccctggtgtttctttggggctcagctgaggcttcgctccctctgagaggcctcgcctggccccctagatcggggctggtctcctgggcctgcttgcctgggtgtccccaccccacccagcactcagccacacccctgccgtagggacaccggggtctttgttggggaggggcagccagctggttagaatttggggtggtagggggctgtctgcagacacagcttctctttacttggggttccttggtgggggctgatggagattcacatgaggcaggctaaggcccaccaccttgcactcagcacctagctttgctgctcctgtgaggccagacacctcatctgtcctatttcctgctagccctaggaaggtcctgcagacactcggtacatatctgtgaaatggctgtgacagtggcaggggccctcgtgcagagcatgatacagacacaggagggggcaggtcagccctggagaatccgtggagaaaggaagctggtgccccgcctggggcaggtgagtggaatgggcagggagactgagtggccactgttgccctggtgccaggcagccagcaccggaggtgggtatggggcctgtgagagggcagttctgagtgctgtggagccaagcagaggagcagtgggctggagagaaaggagggtgaggttggcacagtggggaggaagaaggaggcaggtgggcatggggggcccctggggtacctgagtgccactgcaggcggagggcggagggagggagctgaggagaggaccagagaggcccaggtcagggttgagccgggaggatggcttgctttcattcactcagcaaacactgtcagagccctctctgttccagtctggggacaagtgctggggcgctgcggtgaacaagacaggcagcaccgtccctcctggaggattttccctcttggacttattccagcagaacctgggaaacactctatatgttcagcagttggggattgttagggggctggagggagcagtcatcctatgggctgtcagatgacgcgattatccatttatttgtccagaaagatgcggataatctgttattcgtggggaaggcagctgcaaagactgcaggtgaaggacaatgcttttttgtaaaaaagcagaaatctgcattcttgatccgtccgtctgtctgtccatctacatgaacacaggcccaggtagtgatgagcttatctctgggtggtggggatatgagggtttttggaaaattcttaatgcttttcctgcttccaaagatagttatgaaaatgccaacatggccgggcatggtggctcgcctgtaatcccagcactttgggaggctgaggcaggcggatcacgaggtcaggagattgagaccatcctggccaacatggtgaaaccccgtctctactaaaatacaaaaaattagccgggtgtggtggcacacgcctgtaatcccagctactcggaaggctgaggcaggagaatcggttgaatccgggagggggaggttgcggtgagccgagattacactacggcactccagtctgggcaacaaagcaagactccgtctcaaaaaaaaaaaaaaaaaaaaaaaaaaccctaacattactgaaccacaaaagaaaaagtagtggcgggtcagttttaaccttgctttatgtttttcgtatttgatttttaaatctttctaccatatccacatattacttttgtaataagaaaaaaaaagaaaggaaactgaataaaaagatctcccccctaacaagcgccggaggatggtgcatcttgggcagagaggagggggcttgtccttctagtcaggagggagaggaaggagaggggccttgctcacatctgttgggataaaggaaggggaggtgagttcttggtaggtgctttggcccagagaccccctgagagggagtgggcagtcggggctgggggattcagggagtgagaggtattggggaaaagtgtttgagggtccatgtgagctggacccagggagaggaggcagcctagatcctgattcctcagggggcctttggactggggagagttgtggccagcagttccctggcgggcatctgcagccttcctggtgacctctgggacccagcttctgttctcaggaccccagcacatgtgagttggatccagaattcagtcccaaagttgaggtgctctttctcctgcctgggccctggatggggggtttggtggttaagaaccaagggacgaacggttcaatttctctcagtgcttgtgatgctgctgggagtattttcctgaatcccagtgaagaggcgaagcccctgatgggtccagcttcatccaccatcctcccctgagcaggtgacatcaagggatacctgggac

SEQ ID NO: 97945 - DNA, 21332 bp, Homo sapiens
cgattctcctgcctcagcctcccgagtagctgggattacaggcatgcgccaccaccctggctaattttgtatttttagtagagacggtgtttctccatgttggtcaggctggtcttgaactcccgacctcaggtgatccacccgccttggcctcccaaagtgctgggattacaggcgtgagccaacgtgcctggcgatttttgtatttttagtagaggcagggttttaccatattggtcaggctggttttgaactcctgacctcatgatccgcccacctcggcctcccaaagtgctgggcttacaggtgggagacaccatgcctggccatctctcagaggtttctacaaccgaaactgtcacttctagtttgacatcacagggatccagggcttccacagcctccactgaaatggcagtttcccgagggtggcacccagctggctatgttcactcttcatccctgatgcccacacgtggtctggcatgactgaggaactcaaatatttcctgaagtcaacaaatgaacctccaacccagaaggcagcatcaccatgtttggggaaagaggctgtattactctgttttcatgttgctgataaagacatacccaagactgggtaatttataaagaaaaagatgttaatggactcatagttccatgtggctggggaggcctcacaatcatggtggaaggcaaaaggcatgtcctgcatggcagcaggcaagagggaatgagagccaagcggaagggggaaccccttataaaaccatcagatctcgtgagacttattcactaccataggaacagtatgggggtaaccacctccatgattcaattacctcccaccgggtccctcccacaacacgtgggaattatgggagcgataattcaagacgagatttgggtggggacacagtcaaaccatatcggaggccaagagagggagagagccttgtttcctaagggcttgctgggaccctgagcacagaccagcgtggctggggtgcggtgcaattagactctgtacctctaatctcagggccaccttgtctgtgaactccctgccagaggaaagtccagaggtaaaaggccagaccctgccctgggacagctctggaaaagcctgggtttcagagcttgtctgataacctatggagcagtgggaggaggtggccagcagtttggttcatgagacgcaggaggttctgaacctgggccaggaggccgtggcaaacagtgtgccactctgagcctcgccatcctcagctacaagctgggcgcacttagggctgccttgcagggctgttgtgaaggtaacaagaaggacgcagcacctctcaggatgcagagccggcgtcgagaacatcactggtcaaaccctcagctcagagagaggaggcaggcagctcgggcagcctcccctggggctcctggccatattcatgcctgcaccgcccagcccctgtccaacagctgggtccgactgtgtcacctcgtccatctcatgggaccctgcaagggttcctaggcacgtctccctcagaaatgaatccacagctatgattccacaggtacgagtccatagccgtgcacaggttcacagcagcaatacttctaacaccccaaacttagaaacacccaaatgtccatcaagactagaatgggggccgggcgcagtggctcacatctgtaatcccagcactttgggaggctaaggcgggaggactgtttgaggtcatgagttcgagaccagcctgggcaacacagtgagaccctgtctctacaaaaaataaaaaaagactagaatgggaaataaactgtggaatgttcacaccatggaataccgcacagcaacgagaggaagcaaatttccactggaggccgcagcatggctaacgctcacaaccataatgtgagtgaagaagccacatactcaaaaactgcagactgtaggcttccgttgacagaaattccacaatccaggccaggctccgtggctcaagcctgtaatcccagcactttcagaggctgaggcaggtagatcatgaggtgaagagatcgagaccatcctggccaacacggtgaaaccctgtctctattaaaactacaaaaaattagttgggcatgctggtatgcacctgtagtctcagctactcgtgaggccgaggcatgagaatcgcttgaacccaggaagcggaggttgcagtgagctgagatcacggcactacactctagcctgggcgacagagtgagactccgcctcaaaaaacaaacaaaacaaaacaaaaatgaaattacacaatccagccaaactgaaggtgtggtgtcggaagttggaagtcacctggggtgactggaggggcgccagggttcctaagttcctggttcctgatgtgggggctgcttatacaagtgtgcttagtttatgaaaccacatcaagctgtatacattcgatttctgaaattttctgtatgaaatatttacatatacatatatatgtatatatatatattttagacagtcttgctctgtcacccaggctagagtgcagtggcacgatctcggttcactgcaacctctgtctcccaggttcaagcgattctcctgcttcagcctcctgagtagctgggactacaggtgcatgccaccacacccagctaatttttgtatttttagtagagatggagttttgccatattggccaggctggtcttaaactgctgacctcaagtaatccgcctgccttggcctcccaaagagctgggattacaggagtgagccactgcacccagccatgtatatatatatatatatatatttttttttttttttttgagacagagtttcactcttgttgcccaggctggtgtgatgtccgctcactgcaacctccacctccacattcaagcaattctcctccctcaacctcccaagtagctgtgattataggcatgtgccaccatgcctagctaatttttgtatttttagtagagacggggtttcaccatgttggccaggctgggcttgaactcctgacctcgggtgatccacctgcctcggcctcccaaagtgctgggattacaacccagccatatttttgagacagggtcttgctctgctgcccaggctgaagtgtagcggcaggatcacagctcactgtagcctttacctccccagctcatgtgatcctcccatctcagcctcccgagtaactgggaccataggtgtgcaccaccatgcctggctaatttttaaaaatttgtttgtagagatgaagtcttgctgtattgcccagctagtcctgaactcctgggctcaagcgatcctcccgcctcggcctctcaaagtgctgggactacaggtttagtcacggtgcctgccctgaatgttctattttaaacaagaaaaccaaaccaaacccaacaacaaacccatccttcagagcttccctctgtccccaccattaacagtgccctcaaagtttcgggtggtcaggcccctgtgggcctcctccccaccaccttaccccttctttccctcttgcccacttcatccagccacacgcgggccccaggacactggcttacactgttctctctgccaggaaaaccctccctgggtaactccctctcatttcatagttcctcatcctcatcctccctcgggaggctcccagcactgacaggcctgcatttcatggactttgctcccaaggcctatttgggagcggcaatgtggcccagatcatggatggctgtcctgtcccagggaactattctgagaagctcccggcccgctcctcacacctcctgcttctcagaggctaataatgacagtgcctgaggaaaccgaggccagctgaccccgacgagcccaggctgggagtgcgcacagcagggcagtgggccttctgggctctttggtgggttctgagtcgccatcatctccggccacacaggccagctcacggtccccgctctactggcctggccactcgcagaaagagccactctcagtgggatttcctgggtaattctcaactcacctcaggggcgctcgtgtcacttatcagacacttgctctaggtctggtctggaccaggctcaggatgtaccaggccctgtcctcatgttgcccagggtttctccagtggtggctgtaaccacctgtatcagaaccaccagagcacataagaatgcagacacctgggctccaactcagacctactggatcaacccaggccccattgtgacccaggaatctgtgttttctacaggctgatctcagcactccatgaatctgagagccgctgctgactgggagggatagggagccgattacagtccagtgaggtcagggctgagaaaggacaggaaatgcaaccgtgagagcccagtactggcccctcacttgactgtggaaacctgtaagccgaggagacacctgaaccagattgggccgggcaaagtagggcaggagaggcagtacatcccacgcagcaaaacagcacatggtggccaggggcggtggctcacacctgtaatcccagcactttgggaggccgaggtgggcggatcacgaggtcaggagatcaagaccatcctgaccaacacggtgaaaccccgtctctacgaaaagtacgaaaattagccgggcgtgccactgcactccagcctgggcaacagagcgagactccgtctcaaaaaaaaaaaaaaaaaaattagctgggcatggcggctcacgcttgtaatctcagcattttgggagccgaggcaggtggatcacctgaggccaggagttcgagaccagcctgcccaacatggtaagacccggtctctactaaaaatgcaaaaattagccggatgcggtggtgcgcgcctgtagtcacagctactcgggaggctgagacaggagaatcacttggacccaggaggctgagcaagatcgttccactgcactccagcctgggcctcagagcaagaccctgtctcaaaaaacaaacaaacagacaaaaacagcacatgctagcggcaggagacaagaggctgagccctcccagcccaccttacctgcactgtaatccaatccagccagagacagagtcgggtaggagaggtgaaggcgggtgggaaggtgtggctgttcacgcaggaatgtcttgggaaaactgaggggtaggtggaaaaccgacttcttgtttgaaatgctcccaagacgcctcattaagtagcatagacgtgactgaatcaataaatctttattaaatgaatgaaaggaggaaggagtccttaactgtagctaagcttccactcttaagtatcaattaagcttctctgttcagtccagcgtttagggcgcctactgcgcgccccgccccacacacttttgacaaaaaggtcgcctgctctgtgtgacttgccctttcgccggccagtatggggcagagggaaataagccccctctgctctctggtctcagtttactcgtaactgaaagtgggtcggttcaaaccccctggagctgaggttgcctctcctcttcgagcacgcgctatcggacgcgcaggtccccaagaccgcggatcggcagggggtaccagggaagccttcattcagggcgcaggtcccagccgaaccaaagctcccaccaaagttcaacacgcccccaaagccagcgcctgattggcccgccctgcccacaagctgaggcagcctcaccttctgattggctgttatgctccctgttcggtgctggaaccctccccttctctgattggccagatgcctacctgcgctcgccccagattgggcgccagctggggcggctcgttggctcccaggggccccgctctctgattcgccgctcgggccagcccccacggcctgcacgctraatggctgmgccgctacctatattggcctccgattgggtgcacggcgcctccccggcgtgataggtcaggaccaccgcccccctggctccccattggctgctcgaagaagcccggtctccgggtaagatggcagcggacggacagtgctcgctccccgcttcatggcggccggtgaccctcacccacgtcgaatatcctgcaggtaaaaggcggtcccggctccaaggacgccttcccagggacggcctctcagtcccgggcgctccggcctgctcgagcccgcgragggggcgccgggggaccggggtgggaactgtcaaatagtgaaccacggaggggctcggccggcgcgcgcgccgcgcaggcgcagtggtgcgaggatgagctgggcgaaattgtgaggcgctcgctcgcgcactctgcggctgcgcggccagggcgctcccccgggtcccggggcgccggtgggctgaaatgggttgaggatctgtgtgaggcgagaaaagatccctggcctggaccttggcccttcttccccgccctcccctgtcccagagaggccgcactcctgttccagcgtgcagggagtgtcttgtttccttcgaacagtgctttgggctgcttgtaagagaaagagctcccsgttgctgggagtgtgcaagccgaagccaggcttttgagtacttgtggtgccacgccctgagcagggcacgattccacaacagagaggacccgatgagggggcgggcagcctccgggaacttgacttctgttgcttcccatcagacacacctctcgaagtgcagggctttccagttgagaggtccattagcggcgttctggaggctgtctagtaagagtggcgcagagcctgggcgtgggggtcagacccatctgggctccagttgaggctgaggccttgtgcaggtgcctgcctctgcttaagttaattcatctctaaagtgggactgattacagtgcttaccttctggtgatggtatgagcatcaaatagcaggaggcacaagaagggctgagtacagtgcccggcatgcagtaagcgttcagtaaatacctgcagttaatgttatcccaccttgcaagaccctccctgggtaagatggttgagtgccagggaaggctggagcccctcattgagccctggttgcctgggaagggcctgctcatgctgctgtcttgcgagatgtgagaacctgggtccgctgagggcaccaggactgaatgccaaagaacgttgacgctggtgttctgggttgtactgggggtggtatggccctgccaggtcctgggccctgcctgcctgcctgtctaccattcattcatccattcattcattcagtcaatatccactgaacacttctgagtgctaggccctgggctagctctggtttttagaatgcttaacaggcctgaaatatccctgcattcctgcactatgaaaaccagctgctttataagaggaaagccaaagcctggaggtggggaaagacttgctaaggcctctgcaccttcacagcttcccctcctggcctcagagtagcttcttggagtgctcacaatccaacaagccagaaggaacctggcaggcagttgtgtgcagcatgatacaggctgtgatggacctggctgagcctggagcatctggtgaggtctagtcccctattaatgcttccatggttccctgcacttctccgtcacacccctcttcacaccgtcacttgcttacttcattcattcaacagtttttgagcccagttaagagccaggccctgtgctgggcttgggggatagagtgggatataaagagaccctgtctctactcccagatgctgtcctgatatctacattagtggatcatgaactgagtctggatggcagattctcccgtcagacctcaagctctgcactagcagggacatatgtgtctttttttttgccactgtggtgggttcttagttgtttgttgagttcacccagagagcgtcccaggtggggggaaactgtgtgcaaaggtccagaagtaggacagggcacgatgcgctcagggaactcgagtttggtccttggaactggagcagaggttgagagggaagcagggccaggactgtgcagggccagatgagctgggctgagggggaacttgtcctaagggcagtgggaggcctgagggggcttggatcagagagtagagaggccagagtccctggtagcatcttcaggaaaaccccagggtagtgctggctctgggacaggctatggagatggctaaagctttgggggtaccagtcactcactatcttcatagcccagtgctrtgagggtgagcttcatagtggagaggcccaggaaagagaagggactcacccactgtcacccagtgggactgtggcagcaccagcacttgaccccaggcacttagctgggctgctctgctctcccagaccaactccaggccagtctgatcctgggtaggatgggctgggtaggatcctgtgtgtggatgagaccgggcatgtgtgtgtctatgtcttcagccctggaatctgggctcagccctctgtggacaacttccctgctgcttgtgtgaggctggtggcatggaccatttcccacactgggttctctccacctctgccccaacatggaagtgtcctggttgccagggaccaagctgggtgtctcacaggtcccatctcattgagtctcatgcasctgtaggaggtaggcactgatatccctattccacaagtgggtgagctgaggcttgaatccttgcctcagttcatgcagccagtgagtgtgggcataggagctgaaccaygctctcagaccccagagtggctacatagctgcctgtctcaagtggtgagggtggccttcagactcagcctcccctgcccttggattctcagcttgagtgtccccatctcctaaaaggggccagtgttcctctgctgcctccatcccaggagtgatgggagtgtcagaagctggtaatcaataggtaggcagtttcctgccagagaagtggcgcgcagctgttaccgtcgccctattgggcttggtttctgtccgagtcttcagtgtggacccaagtctgtgtggtgtccagagaacgtcggatttccctggaggcccagggctcagccagggcagccccagcacaacagtgtgtggctctcatgtgcctgccgggctgcctcccaggtcccaggctccacctctggagtcaccaggccgggttcaccttcctgctttggcaggagggattggtctagtgtctggaacaggtcagagacttggactttagtcctggtcccacctccttctggctgtgtgaccttgggcgagtcacatagttgctctggaattcagtttcttcatctatagaatgggaacagtgaaggcacctgctttaaacgcatgctgtgtgcactttagtgctaagtagtagacagcatcacgtatggctgtgactgagttggcacaatcggccggtaaacaggtgtccctggctgcctggcctccattctccaggccctgccgggacctcctttctggatcaggccttacttgtagggggctggtccctcttctgatgcctgtgccctgtcctcctgattctgttctctgtcttgccaggtgatctctctggccacctccttgcctacctgagcctcagccctgtatttgtcatcgtcggtttcgtgaccctcatcatatttaagcgggagctgcacacggtgagtctgtcttgcccacaccctccccaccccacccccagtgcccccaccctgctttgggaagcccgtccgcccctcagtccagggttctcatccctgcgtccacctgtcttgaggtgcgtggagcctcctggctggttctaggttactcacctgttgggctgggaggttcagtcagaggccatggtctttgggactaggtarcagccaacaggtgcacagaggcccagctgaccatgcgtcttccccagcagatctccttccttgggggcctggcactgaacgagggggtcaactggctgatcaaaaacgtcatccaggagccacggccctgtggaggtagggcctcagctgcgagggcctgaggttcccccaggttggggcgttactgggaggtctgcatccccccgtgatrccctggtctcctctctctcccaggcccccacacagcagtgggcaccaagtacgggatgccctccagccattcccagtttatgtggttcttctccgtctattccttccttttcctgtatttaaggtgagtttccaccccggtcaggatggccctgaacttgctcaggccgagttctgctagggactcactgctagccctttggatgcccctggggtgggaggggctgcagcggaggcagaaggtacccagggagcatttggatggggccagggactgtttgggaggcctgggctgggctgtgggctgaggtcatctggtgggcctgttttcgcagaatgcaccaaacaaacaacgccaggttcctggacttgctgtggaggcacgtgctctccctgggactcctcgctgtggccttcctagtctcctacagcaggtatggaggagggagagcccctgcctgcaccctgcccatgtggggtcctgctggttcctggtccctgtcggaccccaccatggaccctagtcccagaacctgtagtgcaggactggaaaaggggtcccagacctctagttttaaaaggacagggctccagctgcctcttctagcccagtccgcactgagcccaagattctgggaccaactccacgtatcagccatctcttcccagcgttccggaggagcccactgtagacaaattcagaggtcaagggctagatgggaggcaggcagatcccagctggcccttcactgctacagatgggagagctgtgtttggggtccagcgccctcccacttggaaatggatctgaggctgtgccccgtggagtcagtgtcctgtctgtgtctccacatgtgtgggcacaggtccctgggaagctggcacatgggcagtggggattgtgcgggcctgtgtctgacwggctctcacatacttcgcttctggccttggcccagggtctacctgctgtaccacacctggagccaggtgctctatggaggcatcgctggaggcctcatggccatcgcctggttcatcttcacccaggaggtcctcaccccgctgttccccaggatagcagcctggtaactgcctcctgccttcctgggcactgtgggccctgtcccctcctgtgggtggggccatcagtgggcggacctaggagtcttgaccccagcccctgtctccctgggaaggccccagtgccccagggtttgtggcagagacacagggggtttcctcaggcccggaagccagagtgccatcctctgtcctcgcctaggttctcagggacttagaagcctgagtcctgctgggctgtgtgtgccgtgggacagtgcccctgcctgaggtgacacaggtgacatagctgggtctctcagtggctctggggtctcaggccaggcaaagactctaggcagtcggggcgggtgccgtgccagccccgggcaatggtggggatggctggcatggtaacagactcatgccctgatgtgcccctggctctctgatgtctgtctctccaggcctgtctccgagttcttcctaatccgagacacaagcctcattcccaacgtactctggtttgagtacacggtaacccgggcagaagccaggtgagttcaggggacagcagtgctcactgggccagccacaggcagcctctgcctccatgtttggagggctctccgggagcctcgcgcctgcctaagcacttctcttgcattaactcattgaatcctgctgtgacccccattttgcagatgatgaaactgaagcttggagaagagaagtcacttgctcgagatcttgcagatagtgggtgggggagcagggtggtgaacccaggctgtctggcccagggcccatgcttttaacctctgcagcccagaaccagagagctgggcagctgaggttctcagggctcctgtgtgtggacatccctagggattagtccagatgctttcttaggcctgggtaaactgaggcacattgagttaggaggccagcctgtagttgtgcagcaagtcaggacagagctgagctttggagactcctgactcatgctgtttcattcaccccaaatcctgggtgaggttcttaggggagtgggaaggctggcttttcttttttttctttttttttttttttgagacggagtctcgctctgtcgcccaggctggagtgcagtggcgcgatctcggctcactgcaacctctgcctcccttgttcacaccattctcctgcctcagcctcccgagtagctgggactacaggcgcccgccaccacgcccggctaattttttgtattttttagtagagacggggtttcaccgtgttagccaggatggtctcaatctcctgactttgtgatccacccgcctcggccttccaaagtgctgggattacaggtgtgagccacctcgcccggccgaaggccggcccttctctgggttcagaggggagctgaggctccacaggaagcctgggaggtttctaggcaggctgagagggactgtggggcggggtagggtggggcgtcctagcagccaggaaacgtgtttagtgcatcaaggtccaaattatcctaacgagcttaagggcaaagccggggatccatgaggaaaggggattggagggggttagggcaggcaatcctattagaggcagaaaggtcccagctggccccgctgatctctcactggcctgccccgcctcaccctgccctgccccgcctggccggcctccacctgccttcatttaccaaaatctcagggcacacctgttctgtgccaggctgtgtgctgggggcaagcacagtgacagccatggtcccctgctcactgtgttcacggcaggcagggaagagctgcgacgcacctgcctatgtgatcagtgctgtggcctgacagcttgtgtcgggagcctatgtggggacgtgggagctgggggtggggggaggtggggggggatggggggatggggagggtaggggggtgggagggtgttgtgggggttgggggaaacgttctcagcagagggaagggcatgcacaactcctgaagctgacaaagcttggtgactgcaccagacggaggctgccggggctggagcccagggagcaaggggtgtgttgtgggatgaggctggggacagatcacacaggaccagtcaggtttctagattttaactgggaccctagacaaaccccattctcctctactgagtctctgtcagcccctctagaaaatgggggtgattggccctggttccctcaggttcctgggctcactctggatatagccacagcccaaattgggtgctcaaatcccctcagtaacctccatcagtagttctcctgctttcgcttgcatacctcccggatggggagctcactacatttctgtacttctgttttgatcaataacaactgagcccacttgtgctgcctcgtctataaagcgaaactccccataactaattggaacccagccaggtccctcttgcctctgtagtctcatcctggtccctacccctgctccaatcccctggctccacttctgggattgcagagctgagataactgaggtacaggcctcgccggggagatcagccctgtctaggtgccattcccagggcaggtgctctgattggcccagttcaggtcaatcgctggctactgggtgtgggcatttgcctacttagttgggactacgggtggggtggggacagctgtaggtcactgaacaccagatgtctccacatctgacccccatcctgttttgcaggaacagacaacgcaagctggggacgaaactgcagtgaccagtgggtgtggctgggtccagcctccagatctggcccgcacgatgccttgcaggatggacaggatgacagacagggacgaagcagagacctctacagacccaagtcaccaagtggagcctttttttttcttattttaattttaatgaacaaggtggaccaaagggctgaaccagcccctcaaccaggaccctggggggcctgctgcctgggggccgtggccagagaccctcgctgtgctgctgccagcccctggctgggcagaaagtgccctcggcatgggcacctgggtgtggggtggaggaggagggctcgcgcctctggtctcggggccaggaattccaggtggcgtgagaagtacacactatttattttttggttttgtcagaggcaggcaggattttggagctggaagaatctgctctccggtggctgccctgtgaacagagggctcccggtcagcttcccaggcccttcgccctatgcccagagggcagactgcctctccctgggccggggtggcctgggtgccaggaggaggggagcataccccacaccctccctgccaccgttgccgttccagaacctcggtcagtgtttccctgtctgggggcagggcccagagcgagcacgcgtctggcggctgctgtcgttgtgttctaccccgtactgacccaacaccacaagggctttctctggtcccctgtccctaagacaataatcgctttctgacaaaggagcctgcacatttgggtgagcagacccaagctgtttacagctctttcttgtcctgccatccagtagcagttagtcttcatccccacgtgaacaaaatgggaaggagccgtgaggagaggagtgaggcaacaggcacccgaagtccctcgtccttccctctgtgtgctctgaatatgtccttgtccttcctgacccatctctgaccagctgggaacctgcttggggtccccctcaaacctgtgtctggggtgtgggctcacagatccctatcagcctggttcgtgggagggctcttcctaaagggacccccatctctaagtcactctgaaagggagttgtggagaggagacgcctccagactctcagaagttttgaggactgaactgggtcactcgggatctgtgttcgaatcctccccacccctttctttgtggagtttcctaacctgctgctgaagcacaatgttttggtgctttcttttctcatttgttaaaggcagtgtccaaaagccattccagatgccaagaccaggggcttatttctagggaaggtaggtcggtttccatgtttccctcccgttatttttattttttactttttgcctgagacaagccgagtatgaggtggtttgatttaagaaaaatcaatgaaattgtttactactgttttaaaataaaaccgtaaactctggcagcttgagcacttgctgattgagctcaggagaggagattggggcagctgtggggacacatgacccttaggggcaaggatacggtgaagaccataaaaccagaagtgatctagtcccttctagcccacagcaggggtctgaatgacctctgcggcatttcctgtcagggtctgtccagcttctgattacatccctccaggggacctcactgagggccaccataccaaacctggacactctcagccttaggaagttttcctcttttcactgtcagtctccctccctgtgtggcgctggccctcctctcactgagccttgttcctcctctgtgggacagccttgaggactcaggggcagccagtgtgcccttcagagtgtgccaggataaacatctccacttggtctgacacagtggctcacgcctgtaatttcagcactttgggaggccaaaggaggaggatcatttgagcccaggagtttgagaccagcctgggcaacgtagcaagaccctgtctctacaaaatatttttttaaaaatgagctaggcgtggtggtgcacacctgtggtcctagctactcgaggggctgaggtgggacgatcgcttgagcccgggagtcaaggctgcagccaactgtgatcacaccactgcactccagcctgagaaaaaccccatctcaaaaacaaatatatgtggacaaagatgatcaaatataaaaggaaaaaagacaccatgatggagcagcagcagaaaacagataatagaaacaaacccacaaattcttcaaatactggaatgattaagcagactgctttactattttttttttgagatggagtcttgctctgtcacccaggctggagtgcagtggcgcgatctcagcttgctgcaacctccgcctcctgggttcaagcaactctcctgcctcagcctcccctggctaattttttttgtatttttaatagagatggggtttcgtcatgtaggccaggctgatctctaactcctgatctcaagtgatccacccatctcggcctcccaaagtgctgggattatggcatgagccaccacgcccagcctgttttactatttttaaagagaacaccaggcacggtggctcacgcccataatccagagatgggcagatcacttagggtcaggagttcgagaccagcctggccaacatggtgaaataccatctctactaaaaatacaaacattagctgggcatggtggcacacgcctgtagtctcagctactcgggaggctgaggcaggagaatcgcttgaactcaggaggcagaggttgcagtgagccgagatcgcgccactgtgctccagtttgggtgatagagtgagactccctctcaaaaaaataaataaatggcaatatctgcagggaacaggaaactataaggcgagccctggcctcgaatcatagctaaaaaacaaggatccgagaggtagatttaacagcagatgagagagagttaaaaaggaaaagcaaactggagggtgtgtcagaagacatcccggctgcagtgtggagtgggaaagctaccgggagcagcttcaggcgcacccgccccygctaactcatcgccttcacttcatccacactcacctgcttaccctgaccccgctccaacctgcccaaggtgcggtgctgggcagaagcccaactcttcaagccctcagaagcctctttgaaatatccacttttcgcggctgggcgcggtggctcacgcctgtaatcccagcactttgggaggccgagacgggcggatcacgaggtcaggagattgagaccgtcctggctaacacggtgaaaccccatctctactaaacaaaatacaaaaaattagccgggcgtggtggtgggtgcctgtagtcccagctactcgggcggctgaggcaggagaatggcatgaacccaggaggcagagcttgcggtgaactgagattgcaccactgcactccagcgtgggcgacagagcgagactccgtctcaggaaaaaaaaaaaaaaaaagttcatgcccgctggatgtacagactttccgtaaagccacacgtctatttctcttgaattcattaatcttattaggctgggcgtggtgactcacgcctgtaatcccagcactttgggaggctgaggcaggcctgaggtcaggagtttgagactagcctggccaacatggtgaaaccctgtctctactaaaagtacaaaaatactgggtgtggtggcacaggcctgtaatcccaactatttgggagactgagacaggagaattgcctgaacctgggaggcagaggttgcagtaagctgagatcgcaccattgcacttcagcctgggtgacaagagtgaaattgtctcaaaaaaaaaaaaatttattactcattcaaatgtcaaatgatgcattgctcaagatataccaattcagaagagctttttttcactcattttgcaaaaacgaatcacgtttttcgtctgcatcactggcgccagagtttggtcacccctggagccccctctgggtcagctgagcctgctctcctggggccgctgtcttggctatgctagcctttaagcagcgcctgtaggatttcatgcacagcactagctctagaaatttcattccaagccacaagtgccccctggcacaacgttaagcgctggtttatcccgacatccaacacttgaaagtgtgaggtctcaggaattacccctaaggaagaacggcgaaatcttgtttctttgcctttttcccccacaaaggacctctagggattccctctcaccatgactgaggttgctcagatgctgaatgcgccctccctgaacaatacttggtggctccaaggaattgagggggcttccatgtgatgaggcctgtaatgccaccaccctaaggggatgcccctcaattcagaaggataattctgggggaaaaaaaatccaaccttatattcagacctgtagggttcttaggcgagttttgggaatccagggtgtctgtctggcagcctcttgactgttcgctctcccctccctgtcctgcctgggctggctgcaggcccactcctggctgctcatgcagcactctgccctgctgtgtaccctgtttcctagcggttctagtcacccccagagggagcaccctgttgtgtagcgaggagcagagtccgggtgctggtccaggtgacattctcttccaggcctgcgtgttccccccagaggcatccctttctctgcctccatccatttcctccattgtctgggctacacctcctgtgcccttggggcactgggcaagtggctgccctctcctgctgagtacaccaccaatggtcaggcctggcaggtccctgcgcctgattagagctcaggctcagcccagcctccctctttacccgcttccttgtggtcctgaggctgggccggtttccacccatagcatccctttctccaccccctgctgcgggacacctaggtggatgtggcctggggctggggacctggctctagggaggggcttcttggagccccggcctagaggagacaagtgtggcctctgtgaatcctgctctgccatttagcgtcccggtgaccttaacctcgctaagcctgcttcctcatctgacaaacggagaaaaccaaaggccccactctcggatgactgtcccagcttagtcaggtcacagagcccttcactcacaggccagccaacctcccccagcccaccccggcatccgcccttgtggtttcacacaggccttcctcacaggccagtgtcctaatgggagactctcccctctccacaaactgcacgcttggttttgccaggatgccctgcctcagccatggacayggggctatgggcaggtatgtggttctgctctgatcgcacctgcccacccccgaaggtgtctgtcctggcagcggctgggcctggggcaagctgagcctgctgctgtactcctacttttgctgggctcagttgggggaagtagaatgacaccctgggcccctgggtattagcaacattcatcagcccaccagacctgggcctgctgggccccacagtcccctgggagagttgcccctacccacaacccatgggacttgggaaggcccaagccagaggcaggtgggaagctgctggtgaaggacgcagccctggctctggtatggttctgggcccagtgccccaaggtcacagctggaccttggctcctgggccaaagccctcaggcccaccggctgcttggacaccagctccgaggcccagggaaagctgaagagggcaaggccaggtgcctgcccccaccctgcctgcctctcagctgaaacacctcttcaccaacacaattcccctttattgatgaccttccacattaatatcatacagcagggcgggggcaggaaccaagctgagtggaaccagaggcggctcgctagcaatgttatccacaggagcacagccgcaacggaggtgaaacctcacaccctggcccctcggccccagacaatcctgtctccaggtcctgggagtttgggaagcagggtacaratggtggcctggtcatggagttggcagggagtggccggggctgagctggtgagacaaagagctcttgccagtctcctgctctggagggctggttcccttccccagaggaggcaccggtggaggacgtgccaggggcccgggcctaacgtcctgctcagcctctgcactcagccccaggtcgggccctggcaggtgctgggatgacccacggaaggcacttggctggggcctgcaggccccctggaggatgcggtccgtggctcagtagatttggggggaccagggaagagggaaccaaggaagagggaaccaaggagctgagccctggtgggtggcccatccyagggtgggcttggctgtggcattggcaggcctgagtcctaggggctcagagcttggsccgggggtggctctgcagcagggcacgcatgtccaggagcgccttctccaggtaatgcgccaggcgggcggcrttggtctccgcgcagctgttgtaggccgacagggagaagttgatgtgggcctccatggggttatagcagacaccgtagccgtcggggaccacgggcccgaagaacatgacacagtctgtcttggcagggacctggggacggcaggatgaaagctctcagctcccctaccttgacgcccccagcacttcccaggctgcctgtgcttccgccaagactgcaggccccttgtgggcagggatcatggtctgtcccctgctatatcccagcaaccactacaggctggcacgaatcaaatgttcctttatacctgaccagtgagtcagcgaagctgattctcccatgaggagcactgaccccttctcagcctgcctgggctgcagagaggcccctgcccccagctcctcctctggaactcagctgtgttggcaatgggtcagtggggcctgtgtaggccacatcaaactaccagtgggttctctgcctccagcccccggggcacctggggcagtggcccacctggctggtggagaggtggaagtgcatggcgatggcgtaggaggtgtccatgaagatgtcgggcrtgctcaccaggtcctcgatggcctgcagcttcaggcccagcaggtgtcgatcaaaggcctccccgcggatggcctgttggggtgggagagctgtcaggagcaggggctgtggacccccggggtatccctgccctcttcagcctgtggcagcgccacccttcgcaggcactggccactcaaaaccacaagaccagagtattctggccagagagagccttcgtttcacagatggggaaaccaaggctcagggaggggcggggatttgcccagggaggcaggaaagtgcagggttgtagggcagggccctggagctgggtgacctagccccatcctggctgcagggccttggcaggttgcttaggttctggaactgtagtgt

SEQ ID NO: 97946 - DNA, 25856 bp, Homo sapiens
ctcttttacatatatttttaaaatttctttttctttttctttttttttttgtgatggagtctcgctcttttgcccaggttggagtgcagtggcgtgatctcaggtcactgcaacctccacctcctgggttcaagtgattcttgtgcctcagcctcccgagtagctgggattacaggcatgtaccccacacctggctaatttttgtatttttagtagagatggggtttcgccatgttggccaggctggtcttgaactcctgacttcaggtgatccacctgcctcggcctcccaaagtgctgggattacaggcaattgccaccatgcctggcctatttattattattattattattattattattattactattatttatttcttaaaaaaagactcaaccaagtggtatttatacatatatttttaaacacccatgaatttttactgctacctccaactctgatccagcatcacagggtccattcttgccttcacccctttccttatttataacttccttctcagacacagaagtggtactcattatctaccacatatttacttatttgtttagtgatagtacatacataaagtagctttagaattgctaactcaactcctctgaggaacaaatttaccaactagagtacagtgtttgtggacagatctttctgtcttcatccttcagctttcagccaaaatagttttccaaagttacttaggttggctctttgcttcctcacccccttcagtgtggttagatgagtcatctataacagagtcatttgtcatagtctgcattccattttaagtacccctcacaacctggtaaatagcttaaaatttacatacagtaaaattcacttactgatacacttctgtaggtttttaacaaatgcaacaagttgtttagcatcaccacagatttagaacggtctcatcacccctaaaattccctcacactgccctttatactcaatccctatccccacacccaatccttggcaaccactgatctattttccatctctataatttttcctttttaaagaatgccatatcgaatatattgtacagtatatagtcttttatgtctggtttctttcactgagcataatgattttgagattcatccatgtggttttatgtatcagtagtcactttgtttttattatggagtagtatttcattgtataaatattatacaaattacacaatttatttaaacatttacacattgatggacatttggactgtttcccatttttactatcataagttgttatacacatttacatacaggcctttttgtggacacatattgtcatttttcttgagtaaatacttaggagtgagattgctggatcatatggtatgtaaatgtttcactttataagaaatttccagtttcccaaagtggctgtactattttgcattctgataagtaattatgagagttccagttgctccacatcctcactagcatttaatatggtctaacttttaaatcttagccattgtaataggtgtgctgtggtatctttgtgtttttaatatgtaatgttctgatgattaatgatatcaagtatcttttcctgggttaatgtcattcacatatattctctggtaagttgttcaaatcttttgaccatttaaaaaataagattgtttgtattattattactgaggtgtaagactatatattccagatataagtcctttatcagataggtgttttgcaaatatttttcagtgtgtcttgtctttttattttcttgacagtgtcattcgaagaaaagatgttgtgcattttgatgacaattgattttttcttctatagtttgtacattttgagtcctaagaaaatatttacccaactcaggatctcaatgatctgtccctatgtttctgtctagaagttttattgttgtaactattactttttaggtctatgatccattttgcttcaattcattaaattgtgtagggtaaggagttgaattttgttcatctttgtatttgttttgcttatggatttattattccagcattatttgttgaaaatgctgtcctttctccattgaattaccttgggacctttgtcaaaaattgataggccatctacgtacagatctattttggactcttttttttgttttttgctttgagacagagtcttgctgcgtcgccaggctggtgtgcagtggtgtgatctcagctcactgcaacctccacctcctgggttcaagcgagtctcctgcctcagcctctggagtagctgggactacaggtgcatgccgccacgcccagttaatttttgtatttttagtagagacagggtttcaccatgttggcaaggatggtttcaatctcctaatctcttgatctgcccgcctcagcctcccaaagtgctgggattacaggcgtgatctttttcaaaattcttttaaccatgtaactcctttgcatttccatatagatgttaagagtcagcttgtcaattctacaaagaaacctggtgggatttttactgagatttagatcatcttgaggataattaccttaatgatatagatttttccaatccatggacatgttatagtactctactttatccaggtcttcatcttaccaatgttttgacattttaagtgtacaaggcttgcacatattttgttaattttatgttttgtgcttttggatgttattttaaatggctgtgatttttaaaattcaagttcaaatggtttgttcctagtatatagaaataccattgatttttgtatattgaccttgtattctataaccctattagttctgctggcatttttgtagattctttaggattgtttaggttcatattgtatgtagatatacacaattttacttcttccttttaaattatgttcactgcagcgtcgacctcctcggcccacatgatcctcccacctcagcctcccaagtagctggggccacaggcatgcaccaccaaacctggctaatttttaaattttttataaataaaaaatatgttgccccggtgggtctaaactcctgggtctaaactccactgtgtctggcccaagccattcttgatatcatggtacaaactcctttgagaatctgataaaagctatgaactctttctagaaaaatcccccattcagaattctagggaaaggattcatagacttcttgaatcccactcatggatctcagttttaagaatcctggttcatgcaaatcaagaccacgatgagataccatctcacaccagtcagaatggcaattactaaaacgtcaggaagcaatagatgctggcgaggctgtggagaaataggaacacttttacactgttggtgggaatataaattagttcaaccattgtggaagacagtgtgcggattcctcaaggatctagaaccagaaatatcatttgacccagcaatctcattactgggtatatacccaaagaaatataagccagtctactataaagacacatgcacacgtatgtttactggagcactagttacaatgtcaaagacatggtaccaacccaaatgcccatcagtgatagactggataaagaaaatgtggtacatatacaccatgtaatactatgcagccataaaaaggaatgagatcatgtcctttggagggacatggatgaagctggaagccatcatcctcagcaaactaacacaggaacagaaaaccaaacactgcatgttgtcattcataagtgggagttgaacaatgagaacacatggacgcagggaggggaacaccacacactggggcctgtcgcaaagtctggggcagggggagggagagcattaggacaaataactaatgcattcagggcttaaaatctaggtgatgggttgataggtgcagcaaaccaccatggcacatgtatacttatgtaacaaacctgcatgttctgtacatgtattccggaatttaaagtaaaaaaaaaaaaaaggacattctgacacatgctacaatatggattaggtatctaaaacagtcaaatttcatagagagaaaatgtagaatggtagttgccaggggctggaagaggggaatgaggagttactatttaatgggaacagagtttcaattttcaaaaataagaaagtagtggcgatggatggtgatgatggttgaaaaacaaggtaaatgtacttaagaccaataagctgaatatttaaacataaaaggatcctgattcatagaaatcagtaaacaaaacatgaaaacttagtttacctatataaaaataatactaattatggttgcttacacaaatagcttatatttccataacgtggtatagaaactattttgcatataattatgtcagattaactttgttataagttagatttggttataaaattaaactagaatcaggctccactttatcagctgttgtgcatgtggcacagattgcctactcacaattttaaaaggaaacattggagagacaatttcttaggagctagaaaggtgccttttgttttatgttaaaattatttccggccgggcgcggtggctcacgcctgtaatcccagcactttgggaggccgaggcgggcggatcacgaggtcaggagatcgagaccatcccggctaaaacggtgaaaccccgtctctactaaaaatacaaaaaattagccgggcgtagtggcgggcgcctgtagtcccggctacttgggaggctgaggcaggagaatggcgtgaacccgggaggcggagcttgcagtgagccgagatcccgccactgcactccagcctgggcgacagagcgagactccgtctcaaaaaaaaaaaaaaaaaaattattatttcccaggttggaaatgtgtgcgtttatggaataaattggtaggtgagaggctgtgaggcaaactggaaggtggttaggcttcaaaagacagaagaacttgggctagaatcccagtacttttaccacttgcaagctagcaagtcctttaaaccctggccttcacgaacttcatttttaaagtgaataaaagtacctttttgagaggcttctacaaggatttgggacaatgcaaacaaaagtgctcaagctgcactagatcctaaataaatggtgctatttatggtgagtcggtgttacacaactagtggctatggcacccagagcttccaatgccaaatcatcaaactggcatgagattcccgagttcaggggacaattgcttactttgttggaggaggactagatgtgaacaaggctgataaatgttgacattcccaaagtgccgggacgccagacgtgaggttacagcatgtccttcctttgctagtacaacgaagcatgacttgtgaatgtcacttttttggcttttcaggaagccagtgcagtaacaaagtggcttaatgatccaaaactaacatacacaaggtaagaatcagttcaataataacatcgtttccttccttactgttgacttccttgttttttctttctttgctcagtgaatatcaacacaaagactaataaatcttctgacactttttttgtcttccaagaatatattttcttgtctggctaagggccatcaccttccctgactcctttgggaataatgggtgcatttcttacagtcacatcacccgattttcaggccaaagttttcacgcgttgggtggaaggcagtgtggcatggtggaaaaggtagagggcgaagactcaggccacctggtccccgtcatcatttctgcatctatctgtctatatgaagtgggctgatggctgtgccagtttcctcatttgcacagcgcacgaggtcccgctttcggtgagcttttatcgcatacatggtaagcggtgatcggtaggaccccggagccctcttgggcgttcggcttgggctgcacttgcactgtgtggccaactgcgaccgtggcgccgtgacgggaacggcgggttgcgcgcgcagcacctccgtcgcctcccgatccagcgyctccgttgccaggaaaacagagcggcgcgctttccggcgcagtygcggcgcgtcgcagctgtcatggcggagaccgtctggagcactgacaccggggaggcagtgtatcgctcccgggaccccgtgcgcaacttgcgcctccggtagtcgcaccgccccagccccgaggccccatgcttttgtgtccttagatcattccaacctgarctcggtgttctgaggtccccactttctgcttacaatcccgaccacttctccgggctccccacttctttcactatccgtamccccatccactcacagcctctaagaaccccttacagacctacccaagtccattcacgtctttgttgctcccagtttctcaaagccctgtgcccccagtacaccctctccccttcattcttccccataggacggcgcacccacccacctcctctccgttgtctgcacccagcacaccttggcaaccctacctcctctgttttgtttcccccatccttgctttgtgttcatctcctggtkgcgtgtctggtaacgaatattttgggcttttcttgacagagtccacctgcaaagaatcacatcaagcaacttttttcattatcagcctgctgccgagctcgggaaggacctcatagacttggccacttttaggcctcagccaactgccagtgggtgttacggtggtgatgtgccatctaatactaattatgatactaatcagaattgtggccaaatgtagtgagataacaaatactatacttctgatatgttatagagttgcccggcaacctacattctatttgtggcttttttttttttttttttttttttttttttttgagacggagtcttgctctttcccccaggctgaagtgcagtgtcgctatctccgctcactgcaagctccgcctcccgggttcacgcgattctcctgcctcagcctcccgagtagctgggactacaggcgcccgccaccacgcccggctaattttttgtattttcagtagaggcggggtttcaccgtgttagccaggattgtctcgatctcctgacctcgtgatccgcccgccttggcctcccaaagtgctgggattacaggcgtgagccaccgcgcccgtcctatttgtggcatttttaaaagagaaaacgtgccccaaaccctaaatacacatataaacacttttaaaaacaatttttaaactggagactgcttgcaaaatctgcatatgatgtgcatgtatagatcaactgtgttcttgtggttttccttatctgggaaaccaaaagaatgaggaggagaggacagagtggttgttgtcaggtcactagtctgtttgcttttattgtttctctttctgttcagagctgttcctgggcaagagtgtgggctcacaggttgtgaaacgtgtctctgaaaaaggcatacccaagagtgtattagattagatttgttttctttgtttttgttttcgttttgttttgagacagaatctcattcttctgctcaggctggagtgcagtggtatgatcatagctcactgtaaaccttggtctcccaggctcaagccatcctcctgcctcagcctcccaactagctgggactacagactcacactcagtttatttttttttaaagttttagtagagaaaaggtcttgctatgttgtccaggctggtttcaaattcctgggcccaagtgatcctcccaccttagcctcccaaaatgttgggattacaggcgtgagtcactgcattcagccagatttggttctgttaaaaaatcatttatttgccttcactgtcctctccttacacttggtctcctaaatttcagtgtttgtgattctacatatatggctttagaaatagtaaagataaaaatgccagggttattttctagcaaatgcagacagttgggactgaggaagggctggctattcagcttatatctaaatttcagtttcttatatccagttagattagatatttcctggagcgggctgagcgccgtggcccacgcctgtaatcccagcactttgggagaccaaggcaggtggatcacctgaggtcgggaattcaagatcagcctggctaacatggcaaaactccatctctactgataatacaaaaattagctgggttggtggtgtgtgcctgtaatcccagctacttgggaggctgaggcaggagaatcgcttgaacccaggaagaggaggttgcagtgagctgaaacagtgccactgcactccagcttgggtgacagagtgagactccatcccccccagaaaaaaattcctggggggtattttcttttattcaaattagagtcatgactaagacttcctgggttctaatcttggcttctactcatactaactctcatatacagcctctctagcatttctctaggttgagtgcttactaaattgctgaattccagctagtttttgtggcaaatataagaatagggactttggttataataaaccacagaacaagaagtggtrctggtttggctcaagcatttgattcactctgttgtctttggaggtggacaccgcccagaggaagacgaagaggaggagattgtgattgggtggcaggagaarctctttagccaggtgagccagtgtctcttgtcttctctgtctattccatctggtctacctccacatggctggtgatacrtattgccaaagtgatttccagacaggttgtaacagtttatactttcccctgttgtgtttaaagggcattgtaacatagggattgccactactcagttttgtgattctgggtgaggaacttttcatctctgggctatatgccrtctgtaatagcagacttggattagactatcagtctggttccttttagctctaatgttcttggttcccctgccattcattagtttagtgttggttatgaaaacatgtcagatagcatcagttctgtagaactgatttgattaaacagttacagaagcaaaagtttgatgtattataatgatgtacacatctctgtttccttatggtaacctcagtttgaagtagatctgtaccaaaatgaaacagcctgtcagagtcctttggattatcagtaccgtcaggagatcctgaagctggagaattcgggtggcaagaaaaaccgacgaatctttacctacactgactctgatagatacaccaatttggaggaggtattgttctttctagggtctcatagcttccatctttgcttcctctagcttttttgcctcactgagttctgtgtgttatgtcagagcctagtaaggggagacaagtagcctgtctaggaactgctgtgagctgctgctgctggcagccagcctggaatagaatgggcacagtctacaggtggtgaggctgctgctcccttctctgcctgctagagggcctgggggagctgccagtatctctgattatatgcttgcagagtgcatactgggagaagtaaccactgggcttgacttcctccatgcatcatgaaaaaagacaggtagtggagtctggaacaatatagataaaattcatcaggggattcagcccaaactctgagtatatgggtttgaagaggaattcagtatagctatggaaaatggcttatgtcctcaatttgcctatgacaaaaatacccttgtgaccttgttttacattttcttcagtcactgcatttcagttgcttctgtcttctcagtaagattttaagctcctcgagggtagagcctattttttttatttttgtctatgactctgtaggtctctgcaaggaacaggtattcaataaatgtttttgaaagattgacgtgctttcattattagagctgtggattgataacattagctgggcatggtggcatgtacctgtagtcccggctacgtgggaagctgaggcgggaggatcacttgagccaaggagttcaaggttgcagtgagctatgatagcaccactgcactgcagcctgggtgagaccctgtctcttaaaaaaatatataaattaaataaaatttgggttgtctgttttggaaaagcaaatgaaaatgcagttagtgctcagttaccatgtgaggatttcccacaaaatgcttgtatcccatttggcattttctaaccaccttgttaacttcaacatctaccaagcacactaacccaactttttgttggtttgtgctcagagaatgcagactgattttaatattaacataaataactcctttttaaaatccaaaggcaaaccatgatgtggtagaaatcttctttgggttgtttggctactgctccctccgttagcatgtataattgtgaggtggcggaacctgtggggttcaggtcctggatgaggtttcaggaggaagacttcccttcaggtacttggctccatgtggccctgaccagatggcgtacacagggctgcttgcttttcccagcactgtcagagaatgaccactgcagccagcgaggtgccttcattcttggtcgagcgaatggcaaatgtcaggcgtcgccggcaggacaggcgagggatgtgagtgcgggcatgggatgggggacaagcttttactttttatttcctaaagttgggtagttttgcatttttatcagtggttatatatagtattcaagtattactttgtaattaatttaaaaaataaatataaaaatataaaatatcttcctcactcttcatgtggacatttttccaaagtgcctcagagagagggaagggatgtcatttctgtttgtcaaatattttggctcttaaaaaacaaaacaaaacagtatgtccactagctcaaacttcccattctgaagtggctctccactggggtgctccattggggtgtgccagggaagtgacctttctgtggtgtctcccagggagggcggcatcctcaagtcacgcatcgtcacctgggagccctcagaagagtttgtcaggaacaaccacgtcattaacacccctcttcagacaatgcacatcatggcagacctggggccctataaaaagtgagtggcgcttctcactgccagcttagagcctcatccttttctcctctcaccagctctccccttcctgttattatcatcctaggttataggggagggagggactttttcttccttctcttcttagttatgagtgaagcttctcactgccaactcagatcctcatcttcttctcctctcaccagctatccccttcctgttatcatcctgggttataggagaggaagggactttttcttccttttttttcttagttgtacttggaagaaagttttaccatgacagctctccctatagcctctgttctctcccctgcagtgggctcagtatctcttcttgtttccctgaaggaccattgacctcaaccttggtgttttcctgatttctaggcttggctataagaagtatgaacatgtcctgtgtactctgaaggtggatagcaatggtgtgatcacagtaaagcctgacttcacgggcctcaaaggaccctacaggtgaggagaggaagaaaggggtagtggagactggcattccttcccttggttgcactttttgtccctagtcaactagactgtcagaaagtccttcatctgttctaacttttacattcccaggcaatggttcrtattctgttccaagtcatagggccttagaaaaccagggactcctttctcagaaaatgtgcaactgcaccaatttgaaagggatcacttcagtggtacagttaaatgacagtgattctctgtgctgctgaatgtaggacctgaccagaacagagtggggtgaactcagccaggcttttcctgtgggctgactgttcctcatctctgtatcttggaaatgacagaaatgtaaattagaaattatctggcccaacctgtccatttttcaggtgagagaactgggtggcaggaatgttgtgccttacagtttgactgtaacttcaagccagaaatgggcccagaacctatactttctgagtctagtctggtgccctctctgctttacccttttgtttctctctcctggtcgtcaatacagccacttttatcatcatatacttyagtgaggtgtatggcccctgatcgctcatccctgggctgggagctatcccagggcccatctctcattattagagttgctcctttctgtggttttgaccttacaggattgagacggagggggagaagcaggagctgtggaaatatacgatcgacaatgtttccccccacgcacagccggaggaggaggagcgggaacggcgagtgttcaaggatgtaagcgcragttcattccaagtatccaagggatgagcctcagtgcctggagctgagaccatttctgaacttgatgtcagcagttgctcgggaaaagccttgcccttcatggccccttctgacttaggcagcattgctgacatatcagacagaagtttttgatcatattataataataacaataaccatttatttgagcatttaccatgttctgtgctaggtactttacataccttatttcctttagtctttacaacaaccctttgaggtgaacacttattaccaccttataagtggggaaaccgagattgaggagctaagtagtctgcccaaggtggcatagcttgtaagggcgagagtcaggattctgccccagaccagctgactccagsgcctctgcttcacggtaaaatggcggtgagtcaggtgcttacgcctccagctcttgctgacccttcccactattgcttttcttcttcccattcagaactgaactttggtctagcttgggttgcatcttgagttttggtttggtttgtttcctcagctttatggccggcacaaggagtatctcagcagcctcgtaggcaccgactttgagatggtgagtagcttggcttcctgcagcactgtgagctgtgtttagccggagcattctgactgtggatgagttacactacctctcttaaaggcccaaaggtatactctacagtgtgaaaaggaagtcaaagaatagcacatatagtccttgttatgtgttttgcaacattgcatgttgatagagaactgttaatgctragaaaaaggtctgaaaggctatgcacatgctgtgggtggctttctctggggagggtgggattagatgtggtagaagggtagtgggtggtgagagggatatattagggatttttgctttttattccctaaacttaggtagctttgaatttttatcagttgtaatgtatttaggtattactttataattaatttaaaaaataaatataaggatgaaaaatgtcttcttcacctttcatgtggatattttttcaaaataccccatagagaggcaggggtgccatttctgtttgtcacatattttggctcttaaaaaatataggcctgatgcggtggcgcatgactataatcccagcactttgtgaggccaaggtgggaggatcacttgaagccaggagtttgagagcagcctgggcaacatagtgagaccacatccctacaaaaaaaaaaaaaaaaaattagcaaggcatggtgatacatacctgtagtcccagctactcatgatgctgaggcagcaggattgcttgagcctagaagtttgagtttgcattgagctatgatcacaccactgcattccagcctggacaacagatcaagaccctgtctgaaaaaaaaagaaagtggtttagttcagctattctgttgtgctgttctttgtcttttctcattctaagagttctatctctagacctggaaacaaggatagaattacttcctggtctccctctctttctctgaaaaattaaccttcactatttccatattgcataagcaacagatattcagtatttaaaagttagataagacatgcacaaataattaaaaaagaaaactccctggtttcttgacctcagccatctaaagggaagagggcgttctggcttcccattgcacaccacaggacagttgctgttgcttgaataatttcccatagtgcattgtcctcactgccatttaaattatgtactttccccctacattgtgaatcttaggaatgaaggaaacagatctgtggagaagtgtcagggtggggagaaagtgcagtagtgacacccagggcctgacccctagtggcaggtcgtctgcagatttgtagatggggctggaggagaagtgccaattccctccaggcctgctgatcctttcccacttctcttcaccttagactgtcccaggtgccctccggctctttgtaaatggagaggtcggtaagtgtcttgctagcatagatctcttgatgcttaggcacgtgcctagatggagctgtgaatagtctcctccactctggtagaggccttgtctgctgtacttgggaaactcagtggtgagtctttcctggaaacgcagagggttcctggccctcaaaagacttgctctcagggtgtgtaggcccctcaggattgggttgggtgctaagggtggtaggagaaaaagctaaaatagcttcctgttttctctcgtagtttcagcccaaggctatgagtatgacaatctctacgtccacttctttgtagaattgccaactgctcgtaagtaatattcttaagtctctccttttatacccattcagacagatctagaggcatttggtcaggcttcctttcccactcctctgctgaaactgttactgttcttttcaaggtcatagatcacatccactttaccaaacccagtggagacttccctgctttcacctcgcttgaccttcctgaagcattttccagagcccactgtgctgcatgacacacttctctggcttctggctccacacttctctctcctatctcgctggtggcccctcatccttcttgggtgatgccttcccttctgttgatcttaaaccgtgagagtacccacagctaagccaaggccttctgttactctctgtctgcagtcttcctgggcaacgtcatccatcctatggcttaaataccatcaatacgtctcagactcccaggtttctgcctctagccttaaccttttccctggactccagactcatatccagttacctcttttgtcatttctgtctaacatgaccaaaaagaactcttgattcctcctcttccctcaaacctctcctccctggtcttccccatcctaacagaatggcagtgtcatctactgagttgttgatgccaaaaacctagggaacatccttgatccctcactttccctagctccctatagccagccaatctgtcaacagttcctgtccgttctgtcttcaaaagctgttgtgaacctatttgttctctccagcaccctacaccaagccaccaccatctcttgtctaggccagtgcattcaacttctgatgtatccccctgcttsctgccttgctcccatttgccgttgatttgccacagacaccaaagccaagttgagctttaaaaaatgtaaacaagttatgtcccttttgagctgaaaaccccaacagcttcccctcccacttagagtaaaatgtaaacttgataccctgaatgagctggcccctgcctatctcttccatacaaccttccagtcattcttcccagccaggttcattcccaccttgtagccttttaagggccgtttcctttgtctgaaaccctttctgccatatcttagcatggctggttctttctgagtttaggtctcagcctgtgtcgcctctgagaggccttctcttaccacccagtctaaatgagcctcccaatcactcagtcccttccccgttttgtttttagtatagcactcatcactacccaatagtctcttgttggtttggtttttgtctgtctccctgcttcccccagaatgtcagctccatgagagatggggatcttttctatctagttaccaagatacccctaagatatactagcacatagcaggcactcagtaaatggtaaatgaatgattgattgtgtgaataaatgaataaagaaactgtccgccccgtctgggaagtgaggagcgcctctgcccggccgccccatctgggaggtgtacccaacagctccgaagagacagcgaccattgagaatgggccatgatgacgatggcggttttgtcaaaaagaaaagggggaaatgtggggaaaagaaagagagatcagattgttactgtgtctgtgtagaaagaagtagacataggagactccattttgttctgtactaagaaaaattcttctgccttgggatgctgttaatctataaccttacccccaaccccgtgctctctgaaacatgtgctgtgtcaactcaaggttaaatggattaagggcggtgcaagatgtgctttgttaaacaggtgcttgaaggcagcatgctccttaagagtcatcaccactccctaatctcaagtacccagggacacaaacactgtggaaggccgcagggacctctgcctaggagaaccagagacctttgttcacgtgtttatctgctgaccttctctccactattatcctatgaccctgccacatccccctctccgagaaacacccaagaatgatcaataaatacaaaaaaaaaaaagaaaagaaaaaagaaactgtctttttctgaatgacttgctttcctcccaggcgagcttactatatttggtctttggctttcagactggtcaagcccagcattccagcagctctcaggagtaacacagacctgcaccaccaagtccctggcaatggtatggagaatgagagcgggtatctggaagggaatgagatctgctcctgggatggcatttgaggttttatcaggccaagtgctgtgcgccctggggaggattccagagttgggtgacttgtgtgtgggttctacagggccacctggtccggagatcctgtctgtctttttgagcatggcagcagcttgtatttgggtgtccttttgcatctcagactcctatttcccacctgggtgataatttttctttttcccttgtgaagataaccttgtcattggccacaaggagaacagattccaagggaggccttgcccaccctatgacactcctttttataggacaaggtggctcacttctcctacccattcacgtttgaagccttcttcctccatgaggatgaatcttctggtgagtagctcagcagttgatcctgggccttggttcccctcaagcagtgctgtctcttggtgaaggccgcctgtgacctggccgcttctctccttgctcccagatgcactcccggagtggcctgtgctctactgtgaggtcctctcgctggacttctggcagaggtaccgtgtggaaggctatggggctgtggtgctgcctgccactccaggtaaccgctcrtctctgcccttctgtggcccacatgccctaggccctaagaacaagactaacactcgaatgcttctggtgaggggtggagataattgggaattggaaatgtttggcttgaaagagttcctgttcctctgaggactttctgcccccctccattagcgacaatgacgtggccttggcactgacttcctgacagtctctccatgtgcttcatgctcctctgattggactcagggtgagaagctgtatggcaaaattggctcatagcatatgtgtattgaatgaatcagcattcagtttggaataaaagcatctgtcttttactgtgtgccaggcattgtgccatacttctcacttaattctcccagtcactctgtgaggtgcaggtggtattatttccattttactagatgaggagaatgagcttcagagaggttaagaaacctgtcctgggtatgcaggtaataactggcagagcggaaatttgaatttctccctgattgatttccatacaggtgctatgggtaaccatgataacctgcaccagaggccaggtcatcaccagaccaggtgttttagctgagtctaggcctgtgtcattgctggggagtcagtgaggggccacatgccctttctggacctggccccagtcttctcttcccttgcgcaggctcacacaccctgacagtctccacgtggagacctgtggagcttggcacggtggctgagctgaggaggtttttcattggcggttctctggaactggaggacctctcctatgtacggataccaggatccttcaaggtgacttttgtctttggagtgacttcacgctgagaacttatggtcctgtccttctgtaggaggtgggatctgggtcaagaccccttagttgtgcattgcttcagtattaaccccttccttcctgtggcttaagctggaagtcatgaccacattttgaatcaggttccaatatctacactgctatcgtaggaggtctctggaaaatagtatrattagagatttcccctggttcccatcagaataactggctctttcccccatcactgaaggcctcagtaatcagatgtggggaggattcacagtaagcatataagaccgccgcttctcaaatgaggttggaatgttccctggtttagttgggggagcccaatagcccagtattagccttgaggtaatagagtctgggtgatggaataaggtttccccaacagaactgcgcttcccaagaatgggaataagaatgggggtgaggccagcatggtgcgggggtgtctagagagagcagaaacctgaggctgtcccaatggcatgccacagggggaacgcctgagccgctttggactccgcacagagaccacaggcactgtcaccttccgcttgcactgtctgcagcagtccaggtgagtgacttggccctctgcctcagggcaccttagccctgaggggtggagacagccgtaaccatgtggctggcctccctgcagggccttcatggaatcgagctcccttcagaaaaggatgcggagtgtgttggaccgtctggaagggttcagccagcagagttccattcacaatgtgctaggtatgtcccctcccccagctggccaccccaggtcagcatgggcctgtttctctctgcagtgcagagagaaataccatatggcagccaaatagcatatctcctttccttacagaggccttccgtcgagcccggygcygcatgcaggaggcccgggaaagcctcccgcaggacctagtgagcccctctggaaccctsgtctcctagctcacagcagccctggcccacagtgcaagaggacaagatgggggatatctgaggccagtgctctcctgcctcttygtctttctgattagagaccacgttggtctgctgagaaccagaaaagctgggaaattcccggctggcccctctgcctagccttctgcagggtcttctccctaccctgtggaaataaagccagagaccctgtggccccccctttatatttgcagccactgtcaatgggcatcacagcaaggcaggctttttgatctgaagctgtttggggtgaccccatagtgagtctggccttgactcacttttctggcttgtctcacagtagcaggggatctgctgttctccaccctttaaaaatggagcctttcatcttccaagaccaaagaaggaaggaaggtggayggtgagagggtcttaaatccccagcctgtgagtctcagcctctttccagggaagcctcattctactgcttggggcttgctgaggttgagatatgagttatttctgagtaagtgaaggctgaaggcagtgctgagtcctttytgctagctgggtggtatcttttactgtgtttttttgtttgtttgtttttttgttttttgttacataaaccccttttattttgactgatgttctgttggctgtttgtctgctcaggttgctggtatggctagggtgttcttaatgtcggggcccctaccatgtctgcccttccccttttctgcctttccctactccacagtgtttctttgggctctcctaattcagcccccaggagaggcttagatggttgtgccagcttgcgtgttaacagcacttctcttaaacatctggagcaaagcatggaactgaggccacgtcttccctagcccaacacagaaacagcagcccctgcccttagcagtgctttattggtagaagcagagcatgctgcctggcctcaggctcagaggagtattgtggggtgtctggaggctaggaccgagtggtctcttagtcatggtgagggaggggagggagggctgggaaacagtagaaagtgctgtaaaccctccagctgacttttcttgcctggggtgcaagaccacatggcttggctcccaagcctttgcacgtggcgctgattcatagcctaatacctaagaggctcccaaggcgggaaggtccattgctgataggagcccccagccttcactcctggctggggaacccagctctgagctgtagccagcagaagcgtcagcagcctgcacttgctccagggagacaaggcagcctcatggtcctccccttccccttgtctccaaaagttggagacttgggatagactcctgtggaagtaacagaactggataagtcaggaatttactggatgtttagaaatggagctgttttcaggtattagtgaccaagctgaggatagttggatgctcctaatttccccccaaagtcctagggcctggaattgactgtcagcccagaaactagcacattgggaagccacttggaaagagtacctagtgacaagttctgttttctctgcttagagacctaagaggactcagccatccatccagggaaggatgtgagggcttaacccagcccagggtgctggaggtggcctccccttacctgcagaagcctcatgtccctcgccaggctgataggttcaacctggggatacggctgcagttcacaaagccccgagggtagatgttggctctgaagatgtcccttgaaaccgtggtgataccggtattgtcacatataattcgagacaaggaaattctgctcagggccttgcgctgtcttttggtgaaaacacctcgtttctgccaccagaacctaccaggcagtcgagagatgtgggtgaaggctggggaggaattaccttataatgagcacctgttgtgtgccaggtactttacatatattattccattcaattctcacaaaattcctgcaagattggaatctcagaaatgaaacaaattcagtggccaaataaattgcccagtattaagtgcacagtaatttaagtggccagggctggatttgaactcgggcaataccaactccaaataaggagacaggtctttttttttttttttttttttttttttttttttttttttgagacggagtctcgctctgtcgcccaggctggagtgcagtggcaggatctcggctcactgcaagctccgcctcccgggttcacgccattctcctgcctcagcctcccaagtagccgggactacaggcgcccgccactacgcccggctaattttttgtatttttagtagagacggggtttcaccgttttagccgggatggtctcgatctcctgacctcgtgatccgcccgcctcggcctcccaaagtgctgggattacaggcgtgagccaccgcgcccggccgtcaggtcttaaatcacaaatgtattggagggaaaccagatttagccctttctgcccatgttttctgggatccaccaacccagaatagtgaggctgccaggcaacctctgggtttaagatgactccagctcaggcaatatgggccttgcctgggtcagtgtctctcttcctttgacccagcttttcagagaggagcctcctgatttcagatcctgtgaacttggaagaaatgatactaaaaagagcagtgttcttcaatgtttagtcttgaaatgctagtgtttttctgctctgcctctggtgctgatgtcttttatgatagggtcacttacctgtctccgtctcgggctcttctgaactggttctcgaacagacaagccagaagaggccccactcgagcccccggcaaaagaggctcagcgatggccccaatccagatgtcaatgttgtcaggtgttccatacaaattcaggaacttccttgccaagtcctggtttttcagcacccggctaagctgtgccaaattccggggctgggagagcccacagaagcgcctccaagcattgtaccctgcaggggaacggggagaagcagcttcagtcttgctgatctcccattagcttctgtttttctccaccagtcctctggggggaagctgtggccagtcaatattgggcagaaccagaagatcctgctggcagaagagtccctagagcttccaaagactaggtttctgtcctctgattgaaaatgtgagtggacaactgtgctcagtgtgcatcagactgaggagtgtgtcctaacctaaaaagctgttttaacccaaaactcataaccacaaatccgacacttagtgatattactgggctcgactgcattcattagacacaagtaagacagtacccagaatataaaagactctccatcaggtttgtagaatgaatgagtgagcaaatgaataaatgaatgaacaagcaaacaaatggagagcaatgataaaattcatctactcagaaaaggacggcacactatgattctgttgatatgagaggtcctgcataggtcaatatagagacacaaagtatattagaggtgattggggctggggtggggatggggattgactgttcttacaaggtttctttggggagtgaaaatggtgtgatattagatcatggtgatgggtgcataactctaaatacactaaaatcattgaattgtctatttcatatgggtgaattttatggtatatctcaataaagaagtttttaaaaagttttcagaaacttccaaagacaagccataccaatttgtcagccatcaggatcccacgcagggccaagccacatcataagatgtgacaatcaaggtaggagatagctttgccatgtcccgaagggacaccagcccaacgtcatccattgaactacagctcacacacaccatcccccagcggaacccatgaaaaccacacagtattttaccattactgagcactattgggtgaatatctcaggaccctcacagcacctttttgaggtgcttttatggcatgctaactatatctggtatgtttactaaagttgagcaaccataggcttcagggtcactttactgttaagtggagctcaaaccaggttgtccagttcccagtttgatgttggacttgggaagggattagaggagattgcaagagctagtgtcaggataatatttctggagggcacaggtattgcggggagcagaagctcgcaatgtggaaacttgggtggctagcgatctcagctctccagctcttccttttataccaaagtagaaggcaagaatgttagtccaaactgcaccattttctaagccccccaccatttcccagaccttggtcaaagtgaaacgttccacaggaggtcgggccatgaaaaacataacataccctaatgggcaaaggcccaactgaaggaacatccctatcatatcctgctgggcaaaggtccaaggaacatcttaccacatcccactgaaaaaaggacctgatcataggtacatcttatcaatatcctgctgggtagcaagccatacgacccagacccctcctgcccatacccatacccatacccagtaccccagctgtaggcggcggcaggttctggcaataagctggtcccccacctctgtaggttttatgctggaaataaatacctgcattggctgttcagccgccctctctctttgtgtctttccttaacccttgccttcccttcaaaacctaatagaaacttgggtggctagcgatctcagctctccggcagggggtgcccacagctccttagctgccaggagcgcccaagtttaagaaaggaaagaagctcaggtttccggagtgcctgctgtgctctaccaggcgctgtgtgaagtggggtgggcagtaggaggtgccaccactgcttcatacatgggcagatgggccttcaggttctttctagacagggaggtaggaggtgggaaggagagaggagcaaggcagtggccaaaaccttcccctactggggttgaacagggggaagaaaggagaaattgtaaatttaaattcagattttactacttcttatttatgtgatcttgggcaaattactagctgtctctgaacatagtttctcatctataaaatggctgtaatcatttgcttctcaaggtgattgggagaacaaaataaattaatatacatgaaagtgactaacaaagtgcctatattttcttctttcctgggataaagtcatttgtgccctcaccaaacagccactgcagccttagttttattccacctattccctgcctctaaggctctttgcctttctccacttagagcaaggagcgtttctgtagctctggaattttagccttcctccttggaacttgccagcgtgttgggaatggagcagttcttccctgccttttaagcctattgctttttttctacttggaaagttcgagcctccctttttcagctcctgagcctaagtgctggtcctgtggtgaacctaaagctggagcccctacagtggatgggggagccatggcaggacagcaagcggtgttccaggagtgctttgggacatcgaccttggccttgcatgcctctgcactcctgcacatcctgtagacagtcccagtcagaaaggaggtaccagggtcttcccagaaccccttgagcagcctggcccgagcaaagctgggagaagaggtggacagccccctcacctggaaggccgtggtcccggcttcgttgcatgttgagagctgccaggtccagcccaatcctcctcacttgccgaaacagccggtcccggagctcatccactaacatggcatcctgacggttcagcttggcaggggtggccatgaggccccggaggatggggtcgatgccccctggtggcagggaatgtgagcagcacagattggaccagcctctgggaagctacttgggttatcacatgatgccaagctagcccagagctggacaagccagtcgggtatgttagtaacgtttgtcaggaaacagagttctggagagacatgaagcagctggagctgggaggtacttcttaaggaatggaaggtgagctccccatcaatctgacattagtctccacccctttaaaaaatcctctcattccacacaggatgggaggcccgtgactgagggtcttgctggcacctgccttgtttccactgtcctggggagatattagcagtggcctctgcagcagcctggcttcctggcagtaagcttggcccacctaggggagggcatgctccccaccctcacccccatttgccccctggaaaacctggtcaccttcatacacgatccgccagctggcaaagaaggcagagctaagtgggacatgcgagttgggtgcggaggcccggtactgactgtccaagcggaacatgaagggctggagcattgtgtggccaaagcggaaggccagggtgaagacattggccacccgtgggtccacattggagcagtaccccctgtagtgccccagggttctcctggcccgggccttgcccagaaccaggggcagaaagtctcggtaggtgatgatctggaagggaagacaggaggaacattccccagaggctactcacccatacccttgccttttcaaagggtggctcagacatattctttattgtcatcacg

SEQ ID NO: 97947 - DNA, 75769 bp, Homo sapiens
gaaacaggacgaacctggtgatcctatgctgtcactattgctcaaacttttcactgttgccccagcataaagtgttttgcccagtggattgcaacccaccctcacagcaggagtcagaatggccaagggccagctgggctgggtcctgatcctgactgtactgcagagtgaccttgggcaagtcccacagttttcccagggcacctgtgcaaggagcaggtgaggctccaggaatgagaagggccgttttaactccaaaagccttgagcggcattcagctggagcctcggaggcatttcttcagccagccacatgagggtgtggggggtttcccaaggcagctcacctcccaccccaccccccagctgaagtccccagtgcctaaggcaccctagccttcccaaacacctgctccagggtggaaggagctctttgggccaggctgaaatcgcttgcacagcaatggagaggccaagcaggctcccgcagagggcagtgttgggcctgagcatactttgtgggtccagagaggtgctccagtggctggttaagatagggacgagacagggcctgcttccctgagaccagttcactctgctgctggctctgccgcctcctgcacaccacccaccccacttagcaaggggagaggccagaccagctcagtttctggaagcacatttataaataagtgaaatcctcccaagaaatagctctattccccacgaaaggctgggagatggggccatgataagagagggtttcttcattagggaatcaagtttttttcctccttcctacacctcaacaatgacaaaaataaaaactaagcagcggcttccatccacacttaccctgctagccagcctgagtgtatggagaccgtggctgggggctcagggtctgggaaggagtcaagcctcaaaccttatccagagcatcttgggtctgagtgaggtccataaaagacaccatcggatgggtaggaatttactgagtctcattctctaaagcagctcagatgcagttgaaactgggggcacttgaaaggatttggagcagccaaagagggcagctctgtcccagcttcttcaacttttggttgttggaaaaaggataggaaactgacagaatggaggtacaggttctcaggcctttgatatccgctaacatgataattttctttttttctttttcaagacggagtcttgctctatctcccaggctgaagtgcagtggcacaatctcagctcactgcagcctccgcctcccgggttcaagtgattctccagcctcagcctcctgagtagctgggatttcaggcgcccgccaccaagcctggctaatttttgtatatttagtagagatatggttttgccatgttggccaggtctcaagctcctgacctcaggtgatccacccaccttggcctcccaaaatgctgggattacaggcgtgagccactgtatgggcctagcctaatacgacacattattgagctccatccctatgccaggtactgtcctaggcaccagggttacacacacaaatacaacatggtccacatgcttaagggtttagtctagtgagggagagatcagcatgtaaaatcaaggagtcttacctccaacctggcagtatcctgataatctatgtaaagcacttagtagagtatctggcatgaagttacagctcaataagtgatagctattattagccattattacaagaagccgcagaataaacacaacacgtcttccaggagtgccgatattactcaatgattagggaggaaagggcattagtttttacattaaaacaacaaacataggcatactctggagtacaatgcaaaactcacttgattttttgacaacaaaagcagatttgaggccgggtgcggtggcttatgcctgtaatcccaacactttgggagggcaaggcgggtggatcatttgaggtcaggagttcgagaccagcctggccaacatggtaaaccccgtctctactaaaaatacaaaaattagccagccgtggtggtgggcgcctgtaatcccagctactcaggaggctgaggcaggagaatcgctggaacctgggagacggaggttgcagtgagtcaagatcacgctactgcactccagcatgggcgacagagtgagaccctgccatgaaacaaaaagcagatttgaggtctgcactgccttatcccgccgtgggacacatagacacatggactcccctgtgcaatcaggagttcttctgagggaagcctaaagaaatagcataactacaaaagcccctgcccttagagtggggaaactcctcaggttactacctgttaccttaggcgccaaattccttgggccctatttcttcattggtaaaatgaggttaaaaactctctatatccaagattgtgataacagacaagataatgtgcttggaagtacctggtacaatgcctggtcaataatatgtgcttaataaatgctatgttatcagggggcaagaaaacagggctgaaagggtcatgggaggcagaacagaagctactatgttactgctgtttaatctcccaggtctctacaggagagggagtagggacctgcgtccttacagcagtgattccagatggtcatttggcattgtgttctgggatgggaaggccatggtttgagaacccagccttgccccaaaatcatatcctaactcccccttcagctgattcagcccatttgttctatatcttagtagataaattttctaagatttgggtccattgacaacccaccctgatcccaatattacatcaatactctattagtacttggcctaagacatcttaagtacttaggctgccatctgttttgtgcatgttctttttttttttttttcctgagatggagttttgctcttgttgcccatgctggagttcaatggctcgatcttggctcaccacaacctccacctcccgggttcaagtgattctcctgcctcagcctcctgagtagctgggattacaggcatgggctaccatgcctggctaattttgtatttttagtagagatggggtttctccatgttggttaggctggtcttgaactcctcacctcaagtgatccgcctgcctcagcctcccaaagtgctgggattacaggcgtgagccaccgtgcccgaccttgtgcatgttcttttaacttttctctctctttttttgagacgcagtctcgctctgtcgcccaggctggagtgcagtgatgtgttcttggctcactgtaacctcctgctcccgggttcaagcgattctcctgcatcagcctcccgagtagctgggactacaagcatgcgccactacacctggctaattttgtgtttttagcagagacggggtttcaccatgttggccagggtgctcttgaactcctgacttcaaatgatccatctgccttggcctcccaaagtgctgggattacagatgtgagccaccacacccaaccaacttttctatgaacatagttctgtatcttcaggatcctgtaaacaacacaaagagctgggattctgccttctttgaagaacctaaatactgtaatatccaacttactagtctttcgttgatgatcgtgtagaaaaatgtggaaaaaatgatgttgactgagaaaggttagggccagatcttgttttccttaacaatccatttaaatctgtcctctgagaatgtatctaaaccctttgaaacttaggtgacacattaaattagagttagtttttttcttttgagatagagtctcactctgtcacccaagctggagtgcagtggtgtgatctaggctcactgcaacctccaacccccaggttcaagtggttctcgtgtctcagcctcccaagtagctggaattacaggcgcctgccaccttgcccagctaattttggatttttagtagacatggggttttgccatgttggccaggctagttttgaactcctgacctcaactgatccacccaccttggcatcccaaagtgttgggatttcaggcgcagtcaaagtgttgggatttcaggcgtgagccactgtgcccggcctagagttacttttttttgagacggaatctcactctgtcgcccaggctggagtgcagcggcgcgatctaggctcactacaacctccactccccaggttcaagtgattctcctgcctcagccttccgagtagctgggattacaggcggctgccaccgcgcccggctaatttttgtatttttagtagagacagggtttcaccatcttggccaggctggtcttgaactcctgacctcgggtctcccacccgcctcggtctcccaaagtgctgggattacaggcaagagccaccacatccagccttttttttgttttttgttttttgagacagagtcctgctctgttgccaaggctggagtgtagtggcatgatctcggctcactgcaacttctgcctcccagattcaagcaattctcctgcctcagcctcccaagtagctgggactacaggtgcacaccaccacgcccagctaatttttgtacttttagtagagaagggatttcgccatgttggccagggcggtcttgaactcctgacctcaggtgatcaggtgatccatctgcttctgcctcccaaagtgctgggattacaggcatgagccaccgcgcctggccctagagttactttttatattttatttatttttatttatttatttttttgagacagagtcttgctctgttgcccagggtggagtgcagtggcgcgatctgggctcactgcaacctcagcctcccaggttcaagcgatttgcctgcctcagcctcctgagtagctgggactacagccatgtgccaccacgcccagctatttttttttttttttccgtatttttagtagagatggggtttcgccatgttggccaggatggtctcaatctcttgacctcgtgatccgcccacctcagcctcccaaagtactgggatgacaggtgtgagctgccgcgcccggcctactttttatattttaaaatgacaatatggagcagaccataacagttctgccagtctggaatttagtctaggcagggagtttggaaatagtacaacaatggttaagcttatcgaaggagctaaatgccaggcactgttctacttcacttaatcctccaattgcccaatgagatgagtattgctattatcatccctatttcacagatgagcaaattaagatgaaaataagttaatcagtgtgcctatttttatagattagtaagtggcagtgccaaaaattggaatccgtggtccccactcttagctaccttactatactacctcttgccattcattcttggcttcagggagctttgaatttatctgcatggatttgtagccaaaccactgggaccactgatccttttgttacctttctctgggcctccttcaccagcttctgggtcaacttctgaggggtcatgacgttcgaactgcttggaattcctgaatacagtgcattatacatatgctctacacgtatctattatagccttacaagttggagttgtttgttatctatttaatgtgtatttgttttgtctccccaactagactggaaacacctagaggacagggacagtatctttctctttctgcaatgctcccagtgcctgggggctaggctaggacgccaagggagctcattaaaagttgttgacagtctctccaccatcctgtgccccaccccgaccactcccctcttcctcggtggccactccacttcctcctcccgggtccccgccccttctcgctccctttagttgaatcctcactggtctcgccccttcttagtggattccatcctgcccccgccccccgcggcatcttcagcgtcccctagcgacgaggcggtggctcctagcaactgcatcccggctccctgacgacggcgccacgcagggacacgtcagcgcgctatggccccgcccccggcgcccgctggtcccgcctccccgcgcctcgttcgccgccgctgtcgccgccgccgcccgagactcgcgcagagcagttatggcggatcccgcagcccccacgcccgcagctcccgctccagcccaggccccggctccagccccggaggcagtcccggccccagccgcagcccccgtcccggcgccggcgcccgcctcggactcggcctccgggccgtcctcggactccggcccagaagccggctcgcagcgcctgctgttttctcacgacctggtgtcgggccgttaccgtggctccgtgcacttcgggctggtgcgcctcatccacggcgaggactcggactcggagggcgaggaggagggccgcgggagctcggggtgctccgaggccgggggcgcgggccacgaggagggccgggccagccccctgcgccgcggctacgtgcgcgtccagtggtacccggagggcgtcaagcagcatgtgaaggagaccaaggtgcggcgggcgggggctgggcggcgcgggcggcagggggtcggcggccgggccgaggccagggaaggacggcgtgcagggccctgcccggagcggtgccactgcagtggccgacgcgggaggacagccccagtggagggtacactccatgcaaagtcattgcagcagctctgggcgcacacgccagccaggcactgctggcccgggaccgggcgggccctgggcttcccgacttgaggggacttctaagacatgttatgctgtggtgtcggcctcgagatttagagacgtggaccgactcccgtggggactcaggttctggggcgcgttcggcgttacaccagtgcggcgttttgctgacccccaaggagctcggtactgcattgtgcatccagaaatgaaggccgtgccgggtccgtgcagggaggggttgtgggcattccaaaacaaagatagaggtgaaaatcccagccgaacccaagaagttcactagcttacaggctgcattatggtgaagccacccagcctctttttgttttaccctgctgcctccttttaattgctgcagggaactttgtgagtaaaatcattagcaatcagagccccggtatgaatagtacttgggggggaggattctgacagctgcgaccgggattgatgactcctaagtgcatatggactccttgaaaaaaataatccagaaccctgggtagaggggagtcaccaatttggaaacccgaaggktttttcttgacctgaagctgttaagcagacatctgactcccgtatggtttttggggtgatgctagtgagtatagcagttttacaaaacaaagaggcttgtcatcataaacccgaaaccttgaacccgggttggtttggtggcttgttttccagaatgtgaattcctatcagtaattgacacacacacacacacacacacaccacccctgtatctcacaccccttctttctctcctacttcccctccccttcaagaaaacatttctaagcaggaatcaggcctacgctgttttaggtccttgggaggttgagaggtctgatttcaggggagggcactttggaagttgatctgggtttctcacacagtgggagacaaagactacagaggaacggggtttcatgtcaaactacaaagcggggtctgtgacaacggcttgagaaggaaaaaggccccactccagagaagagcacatgatccatttcctagaggcagaagtgactgctgataccagcggggtctttttgttggggatgcacatacatccacagacacaaatccacacacaggaccctgcttcccctcagagaaatgtgaatcaggcaacagctctgagacttggaaggaaaattatcagtccatttacaagagtatttggaaaatattacttttgtgcaacagaatgcttgttaaaaattacccagtattgtgtcagkaaaagagggttattgctgtatactgtgtgacaccagatgattgctggtgtctttctgtgagtttttaagaatgtttttcaccacccatctatttgagagattcgtgatttttggaacgcaactcatttgactgcagcatcctctgtgttgtggcctcctgccctaggactcagggaggtaggcccagctcactactgggagccgctatgtttatcagttgttgttcccgtccgtcttgactttggtggttaactttgtttgcagttatgctccgtttgcctcctgcactatgtgtaattatacagagtttgacttgaaatacctattttggagttaaatcgaaaacaacggccgggtgtggtagctcatgcctgtaatcccagcacttgggaggccgaggcgggcggatcacctgaggtcaggagttcgagaccagcctgaccaacatggagaaaccctgtctctactaaaaatacaaaattagctgggcttggtggcgcatgcctgtaacctgagctactcgggaggctgaggcgggagaattgcttgaaccagggaggcggaggttgcggtgagctgagatggcaccattgcactccaacctgggcagcaagagttaaactctgtctcaaaagaaaagaaaaaaaaaacaacaactttgaggcaccactttggatagattttgcagctggcctcctgtgacttgctttgaatttgttgaaatccgttttgtggctcggtggtggtattttgtcattgtagcatctgggtttagcaaaagccaagggacgcagaaattccaaggaagtggtggaatgggatgcccatttatgggtggcaagatatagttcttttaggatttagaataggtttgttttggagggtggagtttatacctgataggtagctctgttaccatgagctatagatacaggtgactgattagctgaatgtctcctggtctgttactgaccaccaagcagggtggtagggtgggtcctgggaccttgcagaactgtggcttaggatgatttttcttctcacctcctgctccttatgaattccatcaaggtgatagtatgccgtaaaggaaagaccattagaccaagattgactaatctagttatgagatttgagaacccaattattgacaaaataatgtagtggcagatttttttttttttttgagttactggtttgtttattatttttgggatggggtctcactgttactcaggtgtccttgaattcctggtctcacacaatcctcctgcctcagcctcccaggtagctgggactacagtagtgatggttttgagaaacttattttttatttatttatgtttttgagacggagttttgctcttgttgcccaggctggagtgcaatggcgccagctcggctcaccgcaacctctgcctcccgggttcaagcgattctcctacctcagcctcccgagtagctgggattacaggcatacgccatcacgcccggctaattttttgtatttttagtggagacggggtttctccgtggtggccaggctgttcttgaactcctgacctcaggtgatccgcccgcctcggcctcccaaagtgctgggattacaggcaggagccaccgcacccgcccgaaacttattttttttaataagctgctacctattgaaaatttttgtgtgtgagtttcttttttaaacagagtctctctctgtcacccaggctggagtgcagtggcacgatctcagctcattacaacctcaacttcccgggttcaagtgattcttgtgcctcagcctcccgcatagctgggattatgggcatgcgccatcacacccagctaatttttgtatttttagtagagacggcagtttgccattttggccaggctggtcttgaacttctggcctcaagtgattcaccggccttggcctccccaagtgctggaattacaggcataagccacagtgccttgccccattgaaattttttagtagtatctatttaatgtggagtgtttcatagggtgtggcgtatttttgtagttttctctgtaaattggagggcaatgagtaaaggcttaatcttagtctcaagtttttagtgaacaaatttacaaagagagatgaagagactgggcagcaagtcatgtcctttccctgctgccttcatgaaaatagcaacagaaacaaagtaagttcttccatgaagctatggaatttgtcgtgttcctgaggcttccagccaccaaaattaagcctcttaaggactcaaaaggagctagtggccagtgtctcttayatgcttcttcctttctccagtcttctgacctgttcagcgaggtagccacttgaaactgtccatctggccatggatctccttagaggaggcttgccccttccccatcaccagtcatcctttgaataaaattttgtaacaaagccaaatgccagcagccacttaaaccttcatgagcactggctagacgtggtgggtccttctggtctccacctgtcatggttgggcagaacagccccctgcgaggtaagggagcaggactgctgtctgtcagttcaagttcagccttcgtttcrgaggcaaagcgtttatgctttagctttcttgtgctttttcatctcttttgcattgtcttttgttttaagttgccatgacattcagggtttcaccaggtttgagatatagtgcctctaaattagggctgtctgtgatcaccctgcttttatgaagctgtgtgtgtgaaacatccctgatgacaggtccctcgggaattggctttgcagtttatttttggctcctacgctggccagcatttccatggggaaagctatttaggtgtagcatcatggcacgtgaagtttgtctcacttgtctgggtgctgggcccattaaaagcaattgttcttagtgatgtaatgtgaagaagttatataaggttaaccaagatgcaggactaagtgaatctaaattgcgttttattcagataggatcacagcacttgtagactcttaacagctgttctgtgattttattctttgtcccttgatttttccccttctagccctcgggcctcagtgccctgatggtgcttctgtctggctgctgcctgactcaagggtactttccccagatgaagggtgtgtgttttgtactgtgattggaagccaaaacccttgggtgctcttcctggctgtcacctactctgaatgaccttgaccaagtcactgcctcattttctccctctgcaatgaaataagaggtctatcttcctaaccccgatatgatcctgctcggatggaataaccagaagtgtagctgggtcaagcctaggatggccacttggttattagcagacagcattctgatgtctgtcagagagmgccagccctgtgccttcagaagatcacttccatgagaaagagggtgatgctgcaccaaagaggcaccttgggaagcaaaaggtgcacgaggcgggttgtggggaaggtggttgtttcaggggcataggaattcctaatggctcgtgttgctagtgaccagatggattataggtttgactttattaaacctcttctagaaatactcatgaacttcctacctctgttactttgtgagaaattcagtaatgcacatttaaagtaaccccggccrtcctccaggagggggatggaatgaatctgtatgtatgtatgtatgtttccagagtctgaaaggtctcttgaaattctcaagactggtaatgagattataaattacaaagatgatagagtattgctttatattttaaggtaataagagcagtcatgatccaggatactgttactgtgtgccaggcactcttagtgctttagatgttttacttcacgctcacaacaaccctgtggtgctattattagccccatattccagagaaggaagctgaggaacagagaggttaagtaaattgcccagtgtcacacttctaagtggaggaatctgaatacaaattgaactaaatgtactttgttctcacctgagaatacttaagttcaggattcagagatcattactatacgtgaccgagtgccctgatccaacatgaatcacaagccttgtggttggcattaatcatcccttctttaaacagttgaaagtcttagtgtaataggaggtactacaagtgaggaaggagagaggcacaggatgttgggataggtggaagttgtgccagtgggcaggcaggagggagggagatgatgggtagggagcaggacgggaggaacactgcattcgcactggcggtgtgcttctgcagattccactcttttcattccctgacccctcagtcattctcaaaataactgtcaaaaacacattgcatttctagagaacctttgactgcccctcaatgttgaatgaagcaacctctgtagtctgattcattccaacactgaactgcagttcagttttattccccaactccacctcctagagcaaaacaagtgtgcagacactccacgtaactggcatttctgtgttgcctcagaagtggtcagctccattaggagctccaacttgacctcctgtccgctctgctgctgtcatccttcggctgggaatgctgagtcatgagacaggttcaggaaggattccttggagaggctgagttccacctcaatttcagtttctgttcccttcagtttcygtgtgtttttgctttaggacattagaggcctctttgcaccttccccatctctacttcacttttatccctgtttctctctgttttgtttgtttggtttttttttgttgtttgtttttgttttttcattttcctgttatactaagaggaactttttctattttttactacttaacccaccatgggggctcatggaatccagtggaacctgttsggggccagcactttttaaaagggtgcrattgtcgtgtataacatgaattgccagcacaacagtcctgggcacgtgatcagtgtcagctgccgctggtggtcggtcccctcagagttggagtcagggtggttttctgtgacatgtgggttttcacccaggaggatatgatctgtgctcctattctgatggaagcttttggaatttccttgcccaaggcttagcctgcttctggatggcgatggggagttgctgatttaaaatgacaatcaaaaggggcaagttacaatcaggaacgtctataatgtgctttccagtttacaagaggctatcacttatctcacttaataggatctcggtatttttaactgtagctccttcctgaggctccacttgcccatgaatgggtgccagtcctggagaaggtcatggtctaaatgctgcccatccacatttgcagctcttactgagcaagagtgcccgttcggaattgcttcatcttctgacattccagccagccacggggggactctgtcaggagccacttgatgtgtgcagttatagccagggaagagcaaaatgcttattggaatttgctgtagttgagaataaaattgaattgtgttactggataactctctggatttatctactccaagttatttgcctttgtttcattcgttagctatactctgtgattgaggatttaatgtccttcaatccaggctgactgtattggatggatccttgggtcagctttgtccaggtcacccctagacacaggtaggctgtgttctcctgaagcagtattgtgaaaagcacatttttatggtttaaacattgcagtcagttgacataccactcagaagtattcagtgggcaataaggattggaatgaatgtcctttttgggtttaatctggttctttggttgggggattttgagttggtttgcatttttagagaggccacagcaatatttaatattctgcagctaagtcaaaggagtaagacatttttcaggtcacttttggtttaaattgatagcataactatacctgggaaacagtctgactatgataattgaaagtaaaaaaaaaaattaaaacactgagtcatgcttggaaaaagaaraaaaaaaaggcagtcagtcctacccaacaatgacatgaatattcccagctagcactgacagagagatttcctgcaggcacccttaaaaagagaggccttcatttgcatcctgcaagagagctggtcttttcacactcagcagctccgatgatrttcttcctcctccttttaattctggtcctttttgtgggagctccctctggaagagggcagttgaagatagataccttgaccggcagattcagcggactgtgtgtgtggtcaccggactgtgtgtgtggtcaccgctagtgcaggtgggaagtgtagacacacaaatacgtctccagggattctgggagcctcagggcttgacatatgcagtgctgaaagcatcccggtattcatgtgctctgactgttttattatttaagggattcygagggccctgaaggttgatgacatcatcttcaagccaaggaagaaagcatttctctggtcccccagtgtgcttttgggtcatcccagcactgtactgggggaaatggatgtctgcctccatttcctcatgacctgctctcgccttcagtcattttctgtctaacctctcacaccactgagtgtgacggctcccctgaaggtcacaaatgactagtgaatttctgatcactgcatttgctgacattttctcagtccttgtcctcattttgatccatcagccttatgctctgtcacccaggctggaatgcagtggcgtgatcacaccttactgcagcctccrcctcctgggctcaagcagtgctcccacctcagcctcctgtgcagctggaactacacactcggctttttaaaatatttttgtagaaacagggtctcaccatggtattggccaggctggtctcgaactcctgaccccaagtgatcctcccacttcagcttcccaaagtgttgggattacagacgtgagccacggtgcctagctgaccacaccctctttgttttgttttgttttgttttgctttgtttgtgagatggagtctcagtctgtcgcccaggctggagtgcagtggtgcaaccttggctcactgcaacctctgccttctgggttctagcgattctcctgcctcagcctcccaagtagctgggattacaggctcccgccaccacgtccgagtaatatttgtctttttagcagagacggggtttcaccatattggtcaggctggtctcgaactcttgacctcaggtgatccatccgcctcagcttcccaaagtgctgggattacaggcatgagctaccgcgcctggccgaccatgccctcttaacggtatttccttccttggggttctattataccagactataccamatgtttctcttttttgccttttgtcttcttcctcttacccatagatgtgcagcttttccaaagacctctcttttctttatctcttcctccccagttttttggagtgacctccctgcttgtagctgcatctggtacctgtatttaggtgacttccacagtgacatcacatgcccagctgcttacttgatagctccattgtgccatgtagactttgtgggtataaaatcttgtgattgtgactgcccttcccatccccaagtctgtggacytaaaaaaamaaaaatgttctgactgggcacagtggctcacgcctgtaatcccagcattttgggaggccgaggtgggtggatcacttgaggtcaggagttcgagaccagcctggccaacatggtgaaaccccatctctactaaaaatgcaaaaattagccatgcgtggtggtgggtgcctgtgatcccagctactcgggaggctagggcaggagaattgcttgaacccaggaggcagaggttgcagtgagccgagatcgtgccccggcactccagcctgggcgacagagtgagactctttctcgaggaaaaaaawatatatatatattccccaactttttttgtttttggttctgaacccaagacccaactttttaataggaaaaaatattgaccataccaaaatgttgaaagccagtaattgctaacccccaaccattatgagtcagcagttgttaacatcctgccatatttgccttatctgtatgcttatgtawatatatttcctcctgaattatgtctggtactaactcctgctaagttagtggcagacatgatagcacttcacccctaaatacctaagcttgaatcttctcaaaattagagcatttggggtcatttttaatttaccttctttggccctcattctaacttgtcatcagttctttgagaggcctcttgcatcctgtgcctgcatttccctttcacaaccctggtttgctctctgcttgcctcatgcctgcactgtgtagcyttctccctggtctccctgcctctagtcctccttcaaccagtgaacagcgctgccgccaactgacctccaaagggctgacctcccaagtgatcgcctggattgtgtcaggacccagcctctgatcatgccttggttgtcattcagggcccctcacctacacatcctgctctatctcctgcctcttcagttgattccagccaatctgactgcttttccccaactcaattgtgccgttcccttcctctcatgccccatggcacacccacattctctcctggatgggaagctccttgagaaacagagacagcaaatcctaaagcttgtgtgctatcacgcacatgcagactcttgggaaacatcttcatgaatgaccagtttgctccctcccacttactacwaatagtattcttagtcttcttccagatgccctgtggtctgtgctggagctgtatgggccccttactagaccactctgtctcccaccccccgtactaggtgtgttgaccatgtacagtaatttattgcccaagttgggttcttttgagagtactatgaataattactccaggactgggacgtatgggcatcctaatactaggaagagcagattaatcagaatacaccatattgtagttactactttggcaacttccgtcgcgggctccccaggcagactacgtgcattgtggactaggctagagctagctagagctggtgtcacctgtggtcgaaatgaagctgcttctggctgcatttcccctgtaagaaccccgcctaaagcacttgacaaatggcagattccacacacgtgggtttccwgaatggttatcagcacccagtcctcaccttaggaggatggctaagtacgaacgaggctctctattggaaaaagaatgccccacccgactgcaaatgaatcaggaacgcagcttaggctatgcactctgcctgcaccaagacccttgggggcggggcctggagttgcagtggctatgccaggcctattactttgaaggagtcaggaaccatctattgaaagtagatataaccacccctgtttatcagtggagggggagggggaagtgaagagagcatgaataaatggattctaatccagcacttttccaaggtgaatgccacatgccatcacctagggtctcctaatgcaaattgtcctaattccattgggctgaagaatctgcgtgtctaacaaactcccagtgacattgatgctgctggctgggactgtcttttgaattgcacttatatgggcccttccaaacctcgttgatgtcaatgggttcagttttagtacgtctttggttcraggctttttctctcccctctgcttattcttctagtgccagtgttaatgaaccgggaattgtccaaaggtgggctgcaggaggggcaggaaagggatgaggcggactcatcatccgccagtgctttagtgttagaaaggcttgcctctttcttcctccccattgcttgctggtggttattattaatgcactgctgttgctaagaagtttcatttgatttcatttcattttaggatgtaaatatggtagttgttttgagtataacacacccaatccaagaggagaatgattattcagcattttaatgaaattgctgtcttttatccagccagtgtcaatggattcctgctgtgagccaggcatgttaactcacactttacctgtgtcatctcacttcccttaaagtggccagtgccccattttagaaaaggaaagactgaaacccagagaaagcttataactcaccaaggccacatagcaagtgggaggccaacccaaattcaaacttaggccagtttgtgctgcccgaatgcaggttctcttcactgactacacgggtgccccctgcactgtgctgggtgctgtggggagagagatacccccacacaggccctgccctctagataaggggccagccaaactttctgtaaagggccagatgataaatgtcctagtgttgcaggctatactgtctccttcacaacaactcagctttgccattatagcacaaaagcattcagaggcagtaagcaaatgaatgggcatggtcatgttccaataaaattttaagaaacaggcagtaggctggacatgacctgcaggctgtagttttcccacctctgctctggaaggatcctgaaaaatagagatacaatgtgagccacagctgaaaaaagtaaatagaggccaggcatggtggctcatggctataatcccaacactttgggaggccaagccaggcggwtcacttgaggccaggagttcgagaccagcctgggcaacatgatgaaaccccatctcttcaaaaagtacagaaatcatcttagcgtggcagcttacgcctgtagtcccaactactcagtaggctgaggtgagaggatcgcttgagtcctggcggtcgaggtggcaatgggccgtgatcgtgcgacccattgcccttaagcctaggcaacagagcaagaccctgtctcaaagtaaaaaaaacaaagagatgaaattaattttaatatattttacttaacccaatgtattcaaaatattatatcaacatataactcatatgataagtactaatgagagactgtgcgttctttttaccatagtggctactggattgggtagcactgcttcagagacttagataggagagagaaccatcgctgtgatctcctactcagcttttttccctcatagcacctggcattacctgagattatactacttcatgtcctgtttactgtccccagccggaaggtaagagaagcacagaagcatctctgtcactgctatatcctcagtgactggcccaaagtaggtgctaggagagatttgtttagtgagcacttgggaaatggcagattgcacacatgcgaatgagtggaattagtgggtgaatgactgatgcacataagggagcgagagcctagttccacctgcaggacacagttgagatgctgaaggatgtggtggggagcattaggagatgctgtcatggaggtgccttttgagttcactcttgaaagataagagcttggaatagcagcagtggagggcagggcgtcctgggcgggaagtccagtgcgcataaaggcaagagaggcaggaagttcatttcagtggtttcagacttaggcctcagaactcctttaacttaaaaattattgaggaccacaataattttttagctttgtgagcttttatttgtatgggttgtttctattaacatctaccatttaagaaaacaaacttaaaaaccaagaatgcctgggcatacattctattggccatcagagcagtgacgtcatcacacatcatgtagcctctggaaaattccactgcagactttggagaggatgagaggaaaaaaggcaaataacgtcttggtcttgttatagaaaatttttgactttggacctcctgaaagggtttcagggatccctgggccatattttgaggaccactgagctagaggtggggtggaagaagtcaggtgagagagtgctggcaggcgaggctgcacaggactgtaaataacrataacaacaaaggtttgttggcacctgccgcgttctaggcacagtcactggagaaccccgtgaagtaggtgttcttacttcacagaggaggagaggttaaggcagtgagcagaaaggcttgggctaaagccaggcaagcgcctccaaaccacgccgtcagctgcccctggaaaggccactggtgtcatgcttgctgtgtgtgtgcaggtctttggatgactgactcaggagttgggatttgttttttacataaagaggacttacatcagagtttacaatgggtgatttggcggcagtttacaaggtggaatgtggggagctaggaagcctggaggccagttaggaggattttatggggcagatgagttgtgtcctctgtgccctyggtgtgcatggcgtcacctatgcatgcatggcgtggagtgctagaggtgctgacttctcacacaaaatgaccyggaagtgtgaacaaacatcttcattccgtattcagtggaagaagcagtgatctgttccagtgcaagaggaaacactggttatgytggtcttactgatggatttaagggatttttcaaggataattttaatgatgttcaatttgacttagtacctaaccccccagtaaaatctgaaatctatcgaacctaagagaacagtaataaagytttcaattattagagtagtgaggtagagagaaaggtgaggtggttggagaaggtttctcagatggggcgcaaaggtgtgaaggacgtttgaggaataacaggtaaagcatgtgtttcacagccttgcacgtacagctgagccggggtgtagtgggggaggtgggagacagagcaggagtagggacattagtgtgccagggctttgaggtgatcagaagagcgacgaggagcctttaagtttttcttttttaattgtagtaaaatatgcataacaaaatttaccattttaaccatttttaaataaacagttcagtgccattaagtacattcccattgttgtgcaaccatccccaccatccacccccagaacttttcatcattccccactgaaactctgtctcaattaaataataactcctcaaaccattaagttttatagcttttagaaaaaccttttctaaaagcagtggatgtagacatgtggtcacctaccaaaaggcagtaagaagagggaagcgtggcagagactcaagcttctcatgagcatggccaggtggctggtcctgccggtaatagcagtgtggacagaggagtggggagggagattccgttttgaacacattgcaaattagatgcctggaggcatccaggcaacgagagacacctcccttcgaagcgtgtatttagcctrtcccccatcttcctttaattcttattgctgtcctatttcataacctcataattgcagtttctaaacaaacattttttagatttatagaacagtttcaaagatcatacagaaagtcctcgtatccccttcacccagttttccctaatgttcacatcttacatatcatgatatatatttgtcgaaagtaaaaaaattgacattgagccaggcacagtggcacgtgcctgtaatccaagctactcaggaggttgaggccagagggaggatcgcttgggtccargagttcaaggccagcctgggcattgtggtgagactgcatctcgcaaaaaagatattaacatcagccacatactgttatctaaaccatacacttttatttggattagttttcttttccaggatccaatccaggatactacattgcatttaacataattgcctttttttttctttttctttytttttttttttgagatggaatctcgctctgtcgcccaggctggagtgcagtggcatgatcttggctcactgcaagctccgcctcccaggttcatgccattctcctgcctcaggctcctgagtagctgggactacaggtgcccgccaccacgcccggctaattttgtgtatttttagtagagacggggtttcaccgtgttagccaggatggtctcgatctcctgacctcgtgatccgcctgccttggcctcccaaagtgctgggattaccggagtgagccactgtgccctgccacctttttttttttttttttaaagatggagtctcactttgttgcccaggctggagtacagtggtgggatctcagctcactgcaacctctacctcctaggttcaggcgattctcctgcctcagcctcctgagcagctaggattatgggtgcccaccaccatgccagctaattgttttgttgttgttgtttgttttgcatttttagtagaaatggtttcaacatgttggccaggctggtctggaactgctgacctcaagtgatctgcccaccttgacctctcaaaggcatgagccactgcacccagcctagcataattgccttttaaatgttgaaataaatgctcctcgttgatctttcactaatccccattttatactctgtcctaagaggcgttaccttttttgaattttgttcagaaggagggtgctagccagtggcttttgatgtcagggcaaggggtcaagtaggatgctttgtaaagagaggcagtttgggagttgtgaggaaccttggatagcacttttgagtagagaggtggtggctggacaccagagcagcagcaggcgagggacagcgtgcagggcaggggcctggaggcatcgtctaggctctcggggattcagggtccagcaaggagggaaagtcccaggtgtaatagtctgttcttcagtctctgacaatccagcaccraagaaaaattgctggagtcatcctcttatttgccttagatttatagctttattcctgattggtctattaagttatttatatacttaatacaaaagtgcaaggacataggaaaggtgggtaaaaaaaaagtcacccataattctaccactcggggataacttctctttattatttcagtggatggctgttctagtcttttatttgttaattaattaataaattaattaatttttgagatggagtttgctcttgttgcccaggctggagtgcaatggtgctatctcggctcactgtaacctccgcctcccgggttcaagcaattctcctgcctcagcctcctgagtagctgggattacaggtgcacaccaccatgcctggctaatgttttgtattttagtagagacaggctttcgccatgttgcccaggctagtctcatactcctgagctcaggtgatccgcccgtctcagcctcccaaagtgctaggattacaggcgtgagccaccgcacggggcctaacgatgatgagaatttgatgtgacatctgcaggatccccagctagtcagcagcatctagagggctagaactctggccagctgactgggccttttgctaactgttttctgtcccctctgtgccggggtgtcactgagctttgcgggacaggctggtctgtygtgccttcagctcagggaatgtggctcccgagcatagggctggactgagaggcgttaggtgagccagagaaggcctcagacacagggcttagagagggcatgtagacctgtgattgcttagtgtccatgactagaaaagacagaatcttgtagttactggggattgcacgagatcaccttcgagagggctcagcacagcacctgaccagtggtcactgctgctgggggataatttagctctgcgtctgtttccctgtgtttccaagcccatgcagtaaacggggggaatattgcgaattagcttgtctgcctcgtaaggccaacctgaaaactaaatcttaatctttgtgtgtgtgtgtgtgtgtgtgtgtgtgtgtgtrtgtgtatgtgtgtgtgtgtgtatctgtatatttaaacagataatatatgcaaatatcacaacattcaaaaggtttaaacaaatatgtagtgaaatgtttgtctccctcctaccattttcactctccagggatagccactgtgaccaaactctatgtgtgtgagtataccttttttatattttagctttttacataaatagtagctttctgtacaactgctctgtatttggcaggtcagagctttggattcagacaaacctggatctggatcctgaccttcccgtttgcttcgtggtgactcacagctggcttggtgcatctcatcccttagtgccttgccaggtgcgtcacctcccctttcctctcctcattgttgtcctttgtgccaggctgttgggctaaatccagcctagtgtgccactgcagggagagcccagctctgccattttggggatagtgtaggaatccatgatccctggatgggcgcgcccgagcccctctattggggcagggttttctcagtagccagaggtaccaccgatggaggtggaaggactataacagaggtatttgacccagaagacctttgtgagggcagagacaaagttgtttttttgtttgtttttttwaaaaaaaaaaaaaaaaaaagcttaagtgaaaaagcatttccagaacatcgcaggtgcctttcgacttcactcctgacctttgccatgtcggaattgcttagtttgtgttagcagtgtgggaccactctgagctccttgcagaagccaaggcaagactcttaaaaggactctccacaacccaaaagcaaaccacggccatataaggtgggttctgttgcctttccccaggacgaggagtcaccctaattcatgcttggaatccttttttcttcatgtgattcctgtgagacatatctcaggtaacacagttcatggcaggactattggcgtgtcctttacagtttccaggaagacaaatgtgccctgtgatttccagggtaggactgtgtttcctacgcgttggggtttccttcctctccgtttctcccatagacccttgcccctctcactttccttttctgtgctgggaacatcagaataagaaggagttttcagccaccgtgtgcttattgcaggtggggtcttcatctgaacctctgagataggactgtgtgctgggtttccatgtatgtctaggtctatagtggtaagactggaagggatcctcggggtcatttcgctggagccccttattttatagtcaggcccagagaggcttacgtggttaagtaagatggatggaagccacagacaaagaaaacagacttctttcttaggaaataaaagtctataggaggacactcatctaatttctaagagtagaagatgttaggagggctcgtttttgtcttctggtgagtatagtttgagacaagttctggtatttgacttgaaaaatagaattgatagcacaggatttacaggaaacactgtagctgggcctgtaggcgcgcaccgccacgcctggctaattttcatttctttttaagttttttgtagagtcaccatctcactatgttgcccaggctggtctcaaactcctttcctcaagcgatcctcctaccttggcctcccaaagtgctggcattacaggccaccgcactggccgaaaccccatctctctctctcttttttttttttctgagatggagtctcgctctgtcacccaggctggaatgcagtggcgcaatactcactccacctcctgggttcaagcgatcgagaccccatctcttaaaaaaaaaggtttattgagacaattcacataccataaaattcacccttttaaagtgtgcagttcaagtggtttttagtatactcaaacggttgtacggtcatcaccgctatctaattttagaacattttcatcaccctaaaaagaaacctcatacccattaggagtcataccatatttccctgcacccctcccaactcctggaagccatgttctgtctctgtgggtttgcctattttggacatttcatataaatggaagcatactagatgtggccttcgtgactgatttatttaacgtgatgttttcaaggttcatccatgttgtagcatgtatcagtacttcatttgtttttattgttgaataatattctatcatatggatagatcacattttgtgtatccattcattagttgatggacatttgttgttgtgtcattttcaccttttggctattctgaataatgctgctataagcattcaagtccacgtttttgtgtgaatgtatattttcaattctcttggatattatacccaggagaggagttgttgggtcgtatggtaggtaaatctatgtttagcattttgagcaactgccaaactgctttctgaagcaactgcaccattttacatacccaccagcaatgttggtgggttccagtttctccacatgctcaccaatgcttgtgactgtcactttgtttatagccatcctagtgggcatgcatgggtattgcattgtgatttggcatgcattcctagtgatgagtgatgctgagcatcttttcatgtgcttattggccatgtgtatatcttctttagataaatgtttattcaaataagtcctgtgcttatttttgaactgagttttctgttggtctgcttattacaccctgcatttggatcttccctctctcccatggagtctcgcaggtgggctacctcttgtggcaggtgcctgtcagtgtcattgggatctgtgctagccattttgcattatgttgggatttaaccccctttcctatttcagtatgcttaagacccttagaaactgaaagggctttaagtcctaagtctttccaggaacacagatgtaattgttttaaatctggggctccacaagcatcctaggatgagaaaggggttgctaaataggttttcttggacagtgggcaagctttcaaatatttaccagtcacatgtaccgtggcatgctgggtataagtctttctaaggcggagaccatacaatctatttcttttgagtctctctcatagtacaattatagtacttcttacacagtgggatgatgaaatatttgtggattgacaggaacrtactttgataactgagtcctttccgtagcagtttgacgggtctaagacatggttgtgccgaaatgtgcatgagagtgtcgggtgtgtgtgcctggcgatagggggccttgagtttccaaaggctcttggctgctgctgcctcacagattctccatgctgtgtggctgtctgctgaggggcacatgtgctgctatttatgtttggtgactttctcagtgattgtttttagtttagccttttaagaatctaatctaattttgtgagtgtgtaaagtgtkgatttatccatgcctgctgcgtgacactgacagggagtgtcttccaccctaagcctggatcagttctgactgtcatggttagatcacagcaatccatgggacttaaactttctttaacatttgaaacaaaaagccatttgtaggagcggatgtgtggccctttcaggtgtctgggggagtttctaatggagctgttctttttaaaattttttattcttaattttactttttcatagagatggagtcttggcccaggctggtcccaaactcctggtttcaagcagtcccccccgctgggcttcccagctcctgggattacaggtgtgagccacagtgtctggccctaatagttagtctttcttttccctacccactatttcacatctcagaatagcaacatgaggagagtccatcaaaatgaattggtgagtaggtgaatgtctgaactaaggatggctaatttttgaatttgtgatttcctgggttttgttgactttttttttgagacagagcaccctgtcgcccaggctggagtgcgatctcggctcactgcaacctgtgcctcccggattcaagcaattctcctgcctcagcctcccaagtagctgggattacaggcgtgcaccagcacgcccagctaatttttttttgtatctttagtagaggcgggatttcaccatgttggccaggctgctcttgagctcctgactgcaagtgatctacccacctcagcctcccaaagtgctgggattacaggcatgagccaccgtggccggcttttgttgacttattacttctccttcatcttcagatctagttgtatataagtactttgcaaaacaaagattaaaaacctccggttgcctcttttttggctggaaccatggagggtgtcgaagagaagcagcagcttcctgttgtgccagaaacccttgggaaaaagcaaaggaatttcacagaactaaagatcaagcacctgaataagaagtttgcccaaaagatgcttcaaaaggcagggaggaaacttatgcacgaagaagtgaagcactaccacaaggaatctaggcagatgtacagaactgaaatttgaaaggctaggatggcaagaaaagctggcaacttttttgtgcctgcagaacccgaattggcatttgtcatcagggtcagaggtatcagtggtgtgagcccaaagggccaaaagatgttgcagcttctttgcctttgtcagatctttaatggaacctttgtgaagttcagcagaccttcagttaacatgctgaggattgtgaaaccatgtattacaaggggaacccaaatctgaaatcagtaaataaactcatctacaagcatggccgtggcaaaatcaataagaagcgaattgctttgacagataacactttgattgatcagtctcatggtcaatatggcatcatctgcatcgaggatctgattcatgagctctatactgtggcccttcaagttatcctctccacaaagtggaatgaagaaaaagaccacccattttgtagaaaatggagctgctgccaacagggagggccagatccacaggcttcttagaagaatgaactgcggtgtctaccgtgattatttttctaatctggtcagttaataaatagtacctgctctcaaattgaaaaaaaaaatcttcggttagcatactttaggtaaacatggtagattgaacatattcatttaaatctacttcccctagaaactctgctaaaataacagcaaaataattgtttttagatgtataaacccacaaggacacagaatgggagagaaaacaataacaaaagatctccaatttctagaaggtggaaggcaaacagaagactgagcagagcagaggctgaaatgttggtacctgcggaaaaacaccaaggaaaagcactttagaaagcatcaggaattggaggcaattggtggcactcaaggtgggaataaggtttgggcctaaaagcagagggattatgattagttgacagtctgtatagggagggatgaaacttcccaagtcatctctttgaattctgcaaaccagaaaatactcaatcccctttgctggcgagtgagagagcagaggcttatgcaccagattgaggtaccttgggcagagcaaggggcagggtaacgctggactgaaagagggattcatgaacgtctgcacactaaaagagcaaatcccagccatgcccctgcctgctcctggagtgctgaggccaggcatgaggcatggcattggattccagtctggaaaaaatgagcatgtcagcaacaagacctgccattgccagtatgtagtggctcctcacagcagtggccagctttctactccatctaatgtggtcctcacctgtccagagccttgcttatgttcacagggtttctatcatctttttatcacctcaacttttttaactttttttttttttttttttttttgagacagagtctcactctgtcacccaggctggagtacagtggtgtaatcttggctcactgcaacctctgcctcccaggctgaagcacttctcccacctcagcctcccaagtagctgggattacagccatgcgccaccactcctggctaatttgtgtgttttttgtcaagatggggttttgccatgttgcctaggcaggtttcaaactcctgagctcaagtgatctgcccacctcagcctcacaaagtgctgggatcacaggcatgagccaccatccccagcccaactttttattttgaaataattatagatgcataggaagttgcaaacatagtagagggctggctggacgcggtggctcatgcctgtaatcccagcactttgggaggccgaggcgggcagatcacgaggtcaggagttcgagaccagcctggccaacatggttaaaccccgtctctactaaaaatacaaaaattagccgggcatggtggcatgcgcccgtaatcccagctactcgggaggctgaggcaggagaattgcttgaacccaggaggcagaggttgcagtgaaccaagatcatgccactgcactccagcctgggcgacagagcaagactccatctcaaaaaaaaaaaaaaaaatagtagaggggtcccctctacccttcatgcagtttcccttgatggtcatgtcttatataatcacagacaatatgaaaatcagggaattgacatgggtacacaatatgtgcatacagtttcacaccctttatcacatctgtggattcatgtaaccacatgtaacagcagtcaagatacacaactcttccatcaccacaaagatctcttattgcctcacttttaaataggaatggatgccaagaataactggatatgttcagaaagcttccagtatggaaggtagaggccagagaaagcaaagagaaaaatgtatctccgaggaatcagagctgattcaggtaggagaaagccttaaagcacatggcaaatatactcagaaagaagagccaatattttatccatgaaataaaaagttactataaaaatcagaacaagaaagagttctcggaaattaaaaccattactttttctttgaagttgacgaaggctcccaggaaacagattaaaaacgtctgacatctaggaagtctataaagagagaaagggaaaattaaggaccataatgtatcagagaaacaagaattatttcagaatggacagtcataagtttcaaaaatggtaaatggaaaatgtcctgtggcacattgtgtgattccagagcactgggcataaagcttccgaagagcaaaaacgggtcacatacaaaagactgggaatgaagatggattggatttttcaacctcattggaagccagaagacaatggggtggatttcctgtttcagtgacatggtagcttgagctaaagttagaaccgctcccattacaatcacttaaaatgctatataagctataacaacagaataagaaagaaaaacagagaaccgaaagcaaagcaggaatataaagccagagcagagtaggcagctctggggaggggcaaggtgggttcattggaccctgaaatcgaccctaacaataatagaggtttggatttgcatgaacacgtgaagcatggagttgaaacagaaatcccctcaaaagagccattcccaggtaaaagggatgcaagaaaatttcccccatgggatcagagaaatgtcaagggagctgatcattgccccacactctggattgtgttggaggaagtcttctgtgaacagtggaaaacatccaagttctaagtctgtgtttataacatctacatgttgcaggaatgcccgagctggcaccagaccagccagcagactggcgatacccctgaagcttyttgcttgcagaacaaaggcagaacttttctagagtgacccttgcacagtacaggccttttggaatcctaggatgcccacagatgatgagcttgttctaggaaattaccaagcatgtagaaattagaacatgagtcagcgatcacaacaaacacaagattctcaacatgagaattcaaataatagaagagattataatagaaatgtctaaagtgattgaagggctaaaagaagaaatagatgtcaaaggaaagaataagacagaatacatcttaaaagggattattttttaaagaatcaaataaagcctctagagtgaaaacattgagttaaaaccccagtggaaatgttaaacagcaaatagcataaattctcaagagagaactatgggaactggaaaacagatctgcagaagttagttagaattctgcagagataaaagagatgcttgtgaggaagagacattacaaacatggatggtggtatgagggcccagtgggaaaaatagcatcctaaaggcagcttgagaagaaaggcagattactccccaggttcaacagtgaaactcaggaaatgccaagtagcaacagtagaggccataaggaagtaaaatcttcagtgtgctaaggaaaatcagttgttggcttagttttcagcaaccagcttaaattatcgttcaataatgggaacaaataaggacattttcacagaaaaaaaaaaaagttgtatttactaagagaccttcgctgtacttcgggaagaaggaagtaaggagaaaggagaaatgcggacagtaatggtatccagaggcgttgggaagtgcaggtaaatctgaataagcattcgcttctgaaagtgatcgtcactaatttggagaggattaaaaaccaaagtcccaacaaaaaatggaaatcagtgagggggtgatttgaatgaacacactcttaagttctttgaactgtttgggaagtgtaggagggatattgattgacttcaaactttctgagtcaagtagacatgttccaattttaagggtaaccaccaaaagaatagaaatagtgtttaaagctttcaaactcacagagggtaaaaatatggaattttaaaactaggtcatttgtctaaaagaaagagagcaaagaaaaaatatggtagccagaaagccctaaaggtagtagaaataaatccacatggatcacaatgaaagtaaacaattatatgtgccagttaagacaggtactcagactggaagacagcagagcaaatcctgcaacattctgagagaattccgtatccagcccaactacgtcaagtagagtagaaaaaagttcttttggctgggcatggtggttcacgcctgtaatcccagcactttgggaagccaagacaggaggatcgcttgagccccgttcgagaccagcctgggaaacatggcaaaaccctgtctctacaaaaaaatacaaaaattagccaagtgtggtgttgtgcatctgtagtcccagctactcaggaggctgaagtaagaggatcatttgagcccaggaggttgaggctgcagtgaaccatgatcacaccactacactccagcctaggtgacagagtgagaccctccttttaggcatgtaagggctggaaaaaaagtgcctcctgtgaacctcttgtggggaggagatagaaggagttgttcttcaccaaaaccagggacttttcccaggatccaggaaacgggatctgacacagrtgagcggcagaggaaagtctgagttagagagacaggatggaattctgcaggagggagagagatcgacaagaaaaagacacaaagcccaaagatacctgatcgataatttgtaggtaatttgaagatatttagaaaagttatggataggtatttgacaaaagtatcaatatgtacatagttgtgtgaggacacggaacaccacttggttcagctgtgagctctgtcctccatcataacacatttagatttttcaattaatgcagtggaactgttgaaaggatggagtacaggcaaagggcttcagaggggagggtaagagttaggtcatcaggtaccaaaacaggacgtcaatagataatgtctataataagttaggaattagggtgcaagcatgttgtttatatgtatggaggtaaatattcaaacagctaaaaaattaaaaagtatttgcttcaaaagagcacagttgagagggtaagatgggggactgcctktttttgttaagccttttagtactatgttttttttttaacttaggcatgcattgttttgatacaattaagctaaactattatttaaaaaaatacmatatgagccaagtaggtcctttaaaattttttagtgaccacatttttttcttttactttttttttttttttttttttttttgtcgaaaggaccttgagaagtgaccacattttaaaaacattaaaagaaacaggtgaaccgggtgcggtggctcacgcctgtaatcccagcacttcaggaggcccagacgggtggatcacgaggtcaggagatcgagaccatcctggctaacatggtcaaatcccgtctctactaaaaatacaaaaaagttagctgggcgtggtggcgggtgcctgtagtcccagctactcgggaggctgaggcaggagaatggcatgaacctgggrggcggagcttgcagtgagctgagatcgcgccactgcactccagcctgggtgacagggtgagggcgagactctgtctcaaaaaaaaaaaataaaaaatwaaaaaaaaaaaagaaacaggtgaaattaattttggaggtagaggtggatggagtcttgctctgttgcccgggctggagtgcagtggctcgatcatagctcattgtaacctcaaacacctggcttaagggatcctgctgccatttttttatgtagagatagggtcttactctgttgcccaggctggtcttgaactcctggcctcaagcaatcctcccaccttggcttcccaaagtgctggaattacagacatgagccacctcactcagccagaaattaattttaatgttttatttaactcagtatatatccaagataccatttcagaatgtaacgaatataaaaaatactagtgggctgggcacggtggttcacgcctgtaatcccagcactttgggaggctgaggtgggcgaatcacgtgaggtcaggagttcgagaccagcctggccaatatggtgaaaccctgtctctacaaaaatacaaaaaattagcagagtgtggtggctcacacttgtaatcccagctactggggaggctgagacaggagaatcgcttgaacctgggagacagaggttgcagtgagcctaggttgtgccattgcactccaggctgggcaacaaaagttaaattctgtctcaaaaaaaaaaaaaaaaaaggccgggcgcggtggctcacgcctgtaatcccagcactttgggaggccgagacggacggatcacaaggtcaggagatcgagaccatcctggctaacatggtgaaaccccgtctctactaaaaatacaaaaaaattagctgggcatggtggcgggggcctgtagtcccagctactcaggaggctgaggcaggagaacggcgtgaacttgggaggtggagcttgcagtgagccaagatcgcgccgctgcactagcactacagcctgggtgacagagcgagactccgtctcaaaaaaaaaaaaaaaaaaaaaaagaacccaacctggaagtagctgagagccacctggtgtgaaaagaggaagtctcctctcctgtgttctggttcctttgcggacactgtgccgtaggccacctctatcaattatgtcctgggcctgaatcttcaggctctcccttggcagcttcctgcctgaccttattttttatttatttatttatttatttatttatttattttgagatggagtgtccctctgtcacccaggctggagtgcagtgttgtgatctcggctcactgcaagctccgcctcccaggttcaagcgattttcctgcctcagccccccaagtagctgggactataggtacgtgccaccatgcctggctaattttttgtatttttagtagagactgggtttcaccatgttagccaggatggtcttgatcttctgacctcatgatcctcccacctcggcctcccgaagtgctgggattacaggcatgagccaccacgccgggccctcatttttatttttactgtatttattttttagagatagggtcttactcttgtcacccaggctggagtgcattggcacaatcagggctcactgcagcgtcgaattcctgggcttaagcaatcctcccacctcagcctcttgagtagctggggctccaggtrcgtaccaccgtgcccagcttgaccccatttttaatgtcttgaaaagagacccttcctcagcccacatccaccccctcacctacctcttcctccttttcctgctcttcagccgtagttcctgaatgagctccatgctgtgattcctgtttcctkcaytgccagatgttctccaggccccgccattggggattctgcccacgccacccattgggactgctgagcccaggtcagcagggacacttccccrtggcactggatctctcagcagcatcaggcattgctagccactcctttcttgacacttgttcccaattcccatggcttttccttcagctgtctctagtgactcctcagaggcacccttctgtgttccaggcacttgctggggtgcactggtgcccagtgcctgcccttgtgtggttcacattctaacccccatggggcacacagactgcaggtgtgggaacagtaagtgctgtgaagaaaaataaagcaggtggatagagaatgaggaggagcaattccagacagggtggccagagaagcccttctgaggaggtgacatctgagcagaaacttgggtgcagctatctgggggaacatttgagccatggctgttccctgtggtggccacacctccccaagcctggcgtgcctcggcttcattgcagatggaacctccgtcctgctcggacacctgcaggactgtctcgtgttccagatgtttcattggcatctggcacagcgtctgcccacccagtggttattcagtttgctgaatgggcgagggaacaactgaatggatggtctacagcatatgatgaacgggaggaagaggccactgggtgcccagaccttatgacagagcaggttgtgtctgtgtcaagcccttgctggaggagagatgggacttgagctcagcctgggaaaagccaggttaaagtgagccgccctttgcccatgccctctccccgtgttgttcatttaggtcgtgcttccacacatcatcttccctttcaggaccactcaggctgtgaatgagtggagtgactgaaatagttgggagccattgaggaaaagccggagagagaggccacgagaactagcattttggggttacttagcacacgtcccattacttatcacacatagaggtstcaaaaacatcaccacaggcctgcctgaccctcctgtggcttggttgtcccttaaaggaaggacacagcagatcctttgagacatctccatcttcccattttcctccacctgggatttgtggtccttgagcactctggatgcagatccattggagaggggatgggtcctcagatgcagtctggtggcgtcatcttgtcttttccagactcctggccagcgacttgttgacttcctcctgggacccagtgactgagggaaatagagccagccaggatgggagaaatgggaagcacgtggcatttactccatgaaagaaaggccacaagcccttctcagccagcagtcccaaggcatcagttaccagttgtaatggatctcaaatggtgctaattactccatccctgggaaaatagaaaatagtcactcagggccgggcgtggtggctcacgcctgtaatcctagcaccttgggaggccaaggtgggcggatcacctgaggtcggaagttcaagaccagcctgaccaacatggagaaaccccatctctactaaaaatacaaaattagttgggcgtggtggcacatgcctgtaatcccagctacttgtgaggctgaggcaggacaatcgcttgaaccggggaagcaggctatggtgtgccgagatcacgccattgcactccagcctgggcaacaagagcgaaactccgtctcaaaaaaaaaaagacaaaagaaaatagtcactcaaattatgttccatgctctagtgtctttaatgtgggtgactccagtgtttcagtatctggaagaatggtgaccatgtggtgtcagccatgagcgctgacagcaggccgtcacttctttctgcagtgtttccctacggttgggctcagctctagggagctcactgtagctgtgagtttcccatttcctgtcagaggagcaacggccttttggagcgaagtctgcagtactgatggactgcacccacttagcaaatgggtggtgctgagtcctgttcactttcccatccatgccttttaccaggaactcagcccaaatacatgctgctatgtgtttgtatttatttttgttggaaatcttggcttagaaagcagactacctgatcctgtcctgacctaattgcagggatgtggggggctgaagaaagggaggactcctactgtcaaggttagcatttggaagtctaggggggtgagtgacaaggccgtccctgccaactcactggggtcagcctgtctcgggctttctgtggccacagacataaacagtgtgtggcaggccgattttgaatgctggcaggaccaacacctggtggtgcaagaccccagcttgcactcgatcccaggacgtcttgtgtctcttcctccttggcttcccatgcctttatcaagctcctgcttctctgtgaaaaagaaatgtctgcagcgccccagcccagtttgtctcgcaaagatgtagttacagagttgtaaggagtggagaatcatcattgttttgacatagtcattccagggtgggtcatgaaacctgccagtgcctctagtgtaggttctcctggcctgcatgtagggttgctcggtggtgtgtttgggtaaagatgtgggcgagtctgtaacatttctggccactgggattgatctaaaatcacaggtattaggaaaacaaaacgatgcaggaagccaggaccactgtgggaagataggcccccctgcacttccatagcccyctgctcctccatagccccctgctcccacttcagtgggmacttggcccccggggaaacaactggccttggatcagggctcttgtgtgttatttttactgccttttcctaccatatttgcatttttaaaaatagcactgctgagtggctccttttcagcatgagtctgcctaggaaggtacggtgcattttcagagtgtggctgttgattagcagccaaggcttggcatttgggggagtgtggygcgaagggggccactgctgcgctgggtaggggtgaggctccrgatcatgagctgtggcaggagtgaggcagcagctttctgctgccccaaggttatgtcatgcttctgtgcattcgcagttgcagggaggtgatgaaggaggggcagggagcaccagggtcccgaggrccatggccgaggaatggggccaagcaggcatgcctccttctgccggcatgcttctttctcagactctgaggtttccgcgtgggtagagccacgctttcacaccagctcgctcccttctagtcacagctctgagcatcgggttctcagggccacagcatggccttcctgcctggaagtcttcaaggtggcgaaaccatgtccaccaggttcccaaggatgcgtgctggcgggatctgctctttgccactgtgacagcaactggcccggggccttgttcttgtcagcatggaaactggcccaggctgggatctggaccacctgagcagaggtgggtcaaggttggggccatatcagtttgaggacctggtgcctctgtgtctttcccaagggctggaccacaggaagggtgtgtcagggagtgccgaagggtgggcatcagtcaactctcgctttcttagttattttcagtcaccttgcttttacgccttgatccctggatttaacttaaaatgttttttctatttttttcttcattacacccccatatcagcagtaaacttaaaaactttttttaattaaagacaaatattcctaagtagtcagagtatattttgtttcaggagaaagggatttttttttttttttttttttttttgagatagggtcttactctgtcacccaggccagagtgcagtggtgcgatcgtggctcactgcagccttgaccccctgggctcaagtgatcctctcaccagagccccccaagtagctgagaccatgagcatgagccaccaggcctaatttaaaaaaaaaaaatctgtagagatagggtctcactaggttgcccaggctggttctcgaactcctgggcttaagtgattctcaaagctcagcctctcaaagtactggtattacagcgcgagtcaccgtggcagtcagaagttgaactgttttaactatcagattcacctagggaacattaatctctccacccagaaatttattcaatgggtttgggttgaaaaatccgtgtttttcaagctgataaacaactgccttaaaatctgttccggacaggcgcggtggctcacgcctgtaatcccagcactttgggaggccgacgcgggtggatcacgaggtcaggagatcaagaccatcctggccaacacggtgaaaccctgtctctactaaaaatacaaaaagttagccgggcgtggtggcgggtgcctgtagtcccagctactcaggaggctgaggcaggagaatggcgtgaacccaggaggtggagcttgcagtgagccgagatcgcgccactgcactccagcctgggtgacagagcgagactccgtctcaaaaaaaaaaaaamaaaacctgttcctccttccaagggacctgtggaggctgctccattttccacagcttcatggtcttttgctttcagcactgctgaattgaatatctaracttcctccaactgttggcttccaccattgcccttcagaggccagcacagggtgcagacagccaaatggcgcctcgcagttgctggttgtaaggcatggctcctggaagagggtgtcctatagtccaagtacagtttagtctgttactttcaggaattgtgtacctccttcaggactgtgataaaatgagtttttgtgtgaggcctggagagccctccgggaggctgtgggctcctagaagagggaagttttttgcctratagtatagaaaamattgtcagaaggctgaggttccaggtctcacatgttggtgtctgttctctattatcccttcttcagggcgtcccagggcagtgtggggcagctatcccagaccccagggtgggactgggtgtaggcccactccacgtgtcccagctctgtgacctccccctgcgccttcctcctgaggtggtgaagagcattgaacctcatctgcccacttctccacctccacttctcccaaggcacaacagcagcaagcagctcctctaaatgcagtgagccaggactcaaataccarcggaaacagcaccatcatggagactgggaggagtttctgcccaattctgcaggtgcagtgagacattcatctcttcacccagacgtctcttcgcggaygctgatgcatccaygcagcatcaaacacctgctcctcttcccttcctcctgtctcgcctgggcctgcaatagctgtttcctgcccctggacatgcttagcattctttcctcctgtagtcgaaggcccttcgtggtgctctctgccaggtggttttagtgatggcctctaaagacccagctcagttcagccacccagtgcactctcatttggcctccatccatgtcctcttatcactggtggtgggtgtgtccacactcataaaaaggagggggtagagaattttgaccatattaacaaggaggtggttaatactctaagatttcctgttggttctcttcagatagctctcctggtgtatctaaaatcccctcactgtaataatacatttaaatcctgatgtgcccatacatgaaattttgcattgtgttctgttctttgtaaatgttatygtcttctccagggaagaggtcctcgtctagggacctgccctggtgccccagccatgggggcctccttgggccatgctgcccagggatgtcgttgactttcggctggcctgctctgatggtcaatgggggtgcccacatgtgaagagcagaagcctgcccctgagtcagggagaggtgccaggcaggtggaaatcaggaccccaggaggtgtttaggggacaagctctggagcygtagccggaagggcctggagctcattcagctcagtgttgcccaaccccctgatgaggcatstggtgcccagagatgtgacatgactccagcacacacagctggggagtggcaactctgtggcccctgcaggacctggtccctgtgccctgaagcttatactccacatctctgtcccctgcagtgtgtagcctccatgtgaccagccgcagctttgtctcactgcacctgcagaattgggcagaaactcctcccagtctccatgatggtgctgttctagttagtatttgagtcctgtttcactgtcctgagatgagctgcttgttgctgttgtgccttgggagagatggaggtgcaaaggtgggcagttgagggtcttaggacctaatgayccagccargaagtgacattttggtcaactcccactctccaggccagctggtgtcccagtgatgccagcatcccgggatggtattcatttcatctgccttgaaatagtaactgcaggtgtttgagaagcgcggggaggttggtgtgggctcagggaggttgtgtctcttccacgtgcggtctgtcatggctgagagcaggccctgccccacttcttggacacagcccctccagggctcctcttctcctggggagcatagctacaggggaacaccgctgtttcccccaaattttcccagaagcagctcagagggatgcagtcccttttagctgtttctctggggggtgtgcatcagaatcatttggggaactttttcagatgattcccaggcagcaggtctgggatggggcctgagagtctgcgtttccagcaagctcagggaagatgctgggctgccagtccagggccatgctttatatatatacatatacatacatatacacacatatatacacatatacatatacatacatatacacacayatatacacatatacatatacacacacacacgtatgtgtatataaagccacactttatatatctatacacgcacatatatgtatataygtatacacatacgcatatacatgtatgtacatatgtatacacatacgtatatacgtgtatgtacatatgtacacacacatatatacgtgtgtgtacatatgtatacacatacgtatatacgtgtatgtgcatatgtatacgcatacgtatatacgtgtatgtgcatatgtatacgcatacgtatatacgtgtatgtgcatgtgtatatatttgtatatacgtgtatgtacatatatttgtatatacatgtatgtatatatatttgtatatacatatatgtgtatgcacacacacacacacacacacacacacacacacmgtcttgctctgttgcccaagctggagtgcagtggcgtgatctcagctcactcaaactccacctcctgggtccaagcaattctcctacctcggcctcctaagtagctgggattacaggtgcgcaccaccacacccagctgatttttgtatttttagtagagaccaggtttcaccatgttggccaggctggtctgcaactcctgacctcaagtgatccaaccgccttgccctctcaaagtgctgggattacaggtgtgagccacctcgccaggcccagggccacacttgaatggcagcatggttccaattggtccaggtgtagcaagggccatgcttggagaccagacaggtcaaatgaggaagggcaggtgagcaaaacaaaggctctggagtcctggcacttgggtgaccttaggcagctcacttacttctccaagccacccagtctcctgtggaatgagaacaagagtggtgcctccttcgtgggggtcatagggttgggagaggcagtgcacgtggggttctttcctggcaggctccgtcaggatcagtttgtgtgattagcagcctgggtcctcattccgtgaactaacatggcatcagacactgaggggtgttgaggctgtgaacttgctctgtgcctggccagctggccgactcccttcttgttctcagggatgcccggcagccacaggaccgcagcctgtcgcatctgaaatggagcagtccggggccactggttaggtagtgatacccagtcaggcctgacaagaacagaacatggaatcatgctgatcacttttctgccttctacttatacttttgaggaaggaggcggccttctcctaaagatgcccatctgtcccctcccttcaaatgcaggagccaggcctgggctgttcttgtctttttttaagccaggttgacaagcccagagccaagacagaggggtgcagggctgggctcctcggctcccagctcctgccgccaagtgcacatattgcttatcaaacaccgcagcatctgcagagaccagcccgctggccccctgccaggccaagctctgcagtccttccccctcacttagcaggcagttggactcagtcccctttctctgtccctcgggcaggctgtgcctccaggccattccagcaagctggcgagctgcagccgagtttccaggcggtgatgcagcagcactgtattgcccagcctgagagtctgcgttgtgagatcagagagggtgtcaggggtgagggcgtgggggctgtccctggtgtgcagttcccctgcaaccccggtcctcctgccttcccccaccgccatccagacaggactcagtttctggtctccccacccagcttagtgctctatttacttgtgtataactgttttcaggtgtaatttcatcttacctccctcatctcagtgtaagttctagaaagctaattcccattcttaattatatatttgtattctwgtcttgtcttaagtctatagaaaacactcaaaaactattcaatcagttgacctcagtcttagcacagcttctctgttgaatggcttccgtagctcatgattgacagaattttccagctaggggcaccaacatttcttttacttccagccatttccggaggttctccctcccctcccccaagcatgtgaggccccctggccatttgtgctttgctggtaaaaccttctgtcctcaggtgggcagtgagctgattgccgggttatcagggctcagccacatgatggtcaactgctctgagaaagtccttacactggcaccagccggaattactgaccattcacatcctcaaatccagtccaaactggaaactcgggcttaggaagaagctggaagaggagtccagctccaacaggaggccccattttctgcctctcctggttttactgtttgagccaatttagtaacattttaagtcaggtcagaaagttaaagttcctcaccctaaaagtgcctgagtgtgactgtgtgggtcttgggttttgtgttggtttgcatgttttttggttccaagaccagcttctcatgagagggatgtcctccctctgatgtaactgccctgaagcctggccagaaaggaccgagagtcggcgcaggtgctgggcagagaattcagtagagtggagattctccagcttctcagcagtcactcacggtaaaatacacattttatatcatgacccgggacacatacgtgttatatatgcaactgaacgggttttttcaaaatattttaactgcagttactttttgccaacctaatagtacttattcttaccacatgtatattaatgcactcaggtttttttttgtccagtgttgaccatgacccactaaattggttctataacccactaatgggtcacaacacatggtttgaaaaaaagtgctgctttggggaatatgccattctacgatttccgcagctttttcagaaatccacactgggataaactttccaatctggtgtaagtagcttctcaggccatcaagctgcattaacattgtgggatgggggtgaatgtcactggtccttacttcctccaccccatccctacgtcagattcttgcaaaatctttaaagaccatatgtgtaccttattttatgtttgtattcttgtctagccttgaatatataggaatcactaaaaaagtgggatcctaggcctcagcaaggtttcctgcttccacccccgcaaaactgagttgggtttttttrtttcattttgttttgttttgtttttgagacagagtcttgccctgtcttccagtcacctaggctggagtgcaatggcgcaatctcggctcactgcaacctccgcctcccgggttcaaacgattctcctgcctcagcctcccaagtagctgggattacaggtgcccaccaccacgcccaggtaatttttgtatttttaatagagacggggtttcaccgtgttggccaggctggtctcgaactcctgaccttgtgatctgtctgcctcagccttccaaagcactgggattacaggcttgagccactgcgcccggccgagttggttttcttagtttgaaaaatatatatgcactaacacacgtgacccctgtcttgaactatagtggcgccacacctgtgctggcagtggagtgggcacatggcagcgtggagytagacccttcaagctcagggacaaccaaagagycagagaggcctcagctgagacaggaggggagggagagaggctggttaggagcccctgaggtccccagcacaattggaagctctgtctctcccacacccccagttggccactgtcaagttcactctttttctatacacctaggactcagacccagctcagacaataagagatggggggtcagggagggggtggaggagtggcgtttctcagattgtttttactctttgggaagtatcaagttggaatttagaagtttccagtgctggtctaacctcatcttccttttaggaatctggtctttgagtcctggcctaggtcaacagcttcagtcctgtgtgtggctgctggaccttcagaggtctagggtctggcttagtcctacaaagggaaagcctcactctttgaacacaaatccaggagccattgcaagctgacctgttgtctacacactcaccagggacctagtgtggggctggtcgtccgcttgtccttgaggtcccaggctgtctgtgaagcctcagcgggcacttggcatgatgctggaccttttctgtttgagactactgcaagctgtgagctgaaaacctagtattggggccaggcacagtggctcrcgcctgtaatcccagcactttgggaggctgaggcaagaggatcacttgagctcaggagttcaagaacagcctgggcaacatggtaaaacccagtctctacaaaaaaaataaaattagccgggtggtggcatgtgcctgtagtcccagctactcaggaggctgaggcagaaggattacttgagcccaggtggttgaggctgcagtgaaccctgcttgcgccactgccctccaacctgggtggcagagtgagaccctgtctcaagaaaaaaaagaaaaaatctggtattgattacatcactaacctccagaagcggtggggttgccttttaccccgggattaaaagagagcacccatgtctcgtcctgtttggccttccctggtgtctgacacctggagatgactgtggcatggctggtggcttccagccttgagctgtaagtgcttaggctccatgcaggcccctgcttttggacttcttccagctcccctttttgaactgggagcccatttagtgttcaaatgctggtgctagtggccaggcacaaagccgccttttcccttggggcaagggcatggcctccaggagcagcccagcctttaggagccatccgctcctacagggacatgacaatcaaaatcacttgaaagtagcttcttggccaggtggagcggctcacacctgtaatcccaacactttggtggcaggaggattgcttcagcccaggaatttgagaccagcctgggtaacatggcaaaaccctttctctacaaaaaattacaaaaattagccaagcatggtggcgtacgcctgtagtcccagctattcaggagacaggtgggagtattacctggaagatggagccatgattgcactccagcctgggcgacagagtgaaactctgttcttcccacccaccccctcccccaccacaccaaaaaaaagtagcttctttatttagcgtctttgtattttcaacatgttgatcagcctcagtttgtgttttctattcctggatcactttatacagtgaatttggattccacctggtcagtcaaggtcagtgttatgaatgagagtctggaccaggagctgcaggacgagctagttgcttttgctgtgttattgggggtcagcctcaagactgcagctcagagaagcagcatgtgccttgggagtcaggcagccgtggaggagagtgctcctggcaggagaggcccccggtgagcttccccggctcctgaatgcctgctctgagtggcccccagcatagcttcggggagctcaaatggggcacaacagaagtgcccagcctcctgccacgttgccctctgccctggcattgtccctgacccctcacttaccatttgattgctttcctacttgatgtatccagaggctggtccgcagacccaccttctctgccattgttcgggtctcagcacctgcgtctccagagcaccttcagggcttctcagctgtggcactgcgggtgcgttggccacgccattcttcgttgagggatgtcctgtgcgttgttagatgctcagcattctggcctctgcccactagataccagaacccccaccaccctttatgaccaccgaaagtgtctccagacattgccaaatgtcctttgaggagcaaaattacccctaggtgagaaccactgggctaaccagcctccgtgctccctctctcagcacgttccctgcccaaaaatcaggtaatgttttggatatcaccatcaggcagggctctgagtggaggccttcaggggcttccatcttgctcaggatagaatctcaagccctccctgtggctctctaaggcctgaataacagcaccatgccttctgccttcttgaagccttgccggcctgtgccagtcaccccacccagcaccttgacagctactmctccctgcttggtaagctcattccccatctcatcccgatctctggttcagcatcacctcggaggggcctttcctgaccacacatttaaaattcttcactgtgctctccctctgctggcccccatgtggcctagtttttcttcatggcacttggtaccaccttctctgcgtctgtctgtctgcatcccccctgcaggagaatgggcgcttagcatgtgccagaatccctctcctcggagggcaactgtgttgtttgctgctcctgtttccagaggaggcacagaggatgtcggtcctgggttccactgggcagccccactgttgagtcacatgtgtgcaaagtggtgtgtgtttgccaggggcggtggctcacgcctgtaatcccagcactttgggaggctgaggagggcaggtcatggggtcaggagttggagaccagcctgaccaacatggtgaaactccatctctactagaaatacaaaaattagccgggcatggttgtgcatgcctgtaatcccactactcaggaggctgaggcaggagaatcacttgaaccccagaggcggaggttgcagtgagctgaggtcgtgccactgcactccaacctgggcgacaaagcgagactctgtctcaaaaaaaaaaaaagtagtgtgtgttcattttaaaccagccaccaccccttctggcttagagacactgttagcattttggcatcttgtcttgtcctttttctgttcagaaacctctgatagttacgactctctaagaaatagacaataggctgggcgcggtggctcacgcctgtaatcccagcactttgggaggccgaggctggcagatcaygaggtyaggagatcgagagcatcgtggctaatatggtgaaaccccgtctctactgaaaatacaaaaaattagccgggcgtggtggcgggcgcctgtagtcccagctactcaggaggctgaggcaggaggatggcgtgaacccgggaggcggagcttgcagtgagccgagatygcgccactgcactccagcctgggccagagagtgagactccatctcaaaaaaaaaaaagaaatgttagacaataaatagctcaccaactctgaggttgtttagaatttcagagcccatgaggacagttgaaatctcttcacccccgaccccagatcccctcctagtaacaatttttttttaaactacaagcagggcaccccttaacagtagggattgggtttattccaaggtttagttttgttcacaaatctggtgctttcccagagtgggcacagtgccctctagtgttcacctgccaggccggctggcacctgtcatttgctctttggaggtagaaggggaagtggagggcaaactgtgcctagcaggcatccgcagtcagtggccaccattgctgccttccacttgcctcagaaatgaagagagtttttctttctttcataagcagaagaatcactgtctttaaatgtgtagacctgccagaagtctttccctgtctctgtagctctggggagagatgagctttttatttggttaagagaatggactctggagccaaactgcctgcgttcaggtcccagctccactacttgtgacattgaatgagttgcttattttctcttggtctcagtttgcgtatctgcaaaatgagcatggcagtgatgtgcttcatgggttgtggagcacctcatgggcgaagacagtgaaacgcttggagaactgtctgccaggtaggaagcacctggttagcatgaggcgaaaaactccagagctcttgcattcgccaggagcacgtcggttccttcctgacgggggcactgaaaggctttgtgaagcaggttgtgcatacgggggcagggagaggaggacatttggaagtaactgttcagtggagtggctcacagatgggagggtatgggcttatttggagaaagccagtgcccagtatgggtggggtataggaagttaggaaggaaagtcacaagagcctcccaagtcatcctaagtccttccacatgccgttgtcttgggttctaattcccagtggaagggagtgtagccaccatgttaccatcccccagccccttgtcgctcccactctgctcccagcaccatcargtctttggagaaatgtaactccttgtcatagaaaggtcagaagagcccctggaggcagcatcctggtgrggtggagctgctgttgtctggagaccccacgggaagaatggcatttgctgccagcctccctctcctgggagcactgggcactgcctgccctgccagcctctggccttgccatgatgccagctttcaccagctgtttttttctgcttcagcctcagagttgacacctcggtttcccctgcactcccaagggtgctgttaggctgaacagggtgtttcatcagtgacggcactgatttaggtctgtgtctgcgttcttctctcctcctttcctggctgctctctcagggacccccaagtggtggaggcagccctcctgccacacatggtgcagccccccttgcattggattctcctgtcctgccgcttctggcttctctgggagcaattgtggctttttgaagtctaaaatgggagcaggggattaagatagggtggggcagcacaaaaaaatgccgtatctcagagtggagatttgggcacagagggttacaggcacagaatattctttgatttagaaaagtggcaccgtcacgccagcatgcctctccagcctcctggggtcttggagcagagataaggagagcctgacctttcaggggtcttcaccctgcagctcacagggccagtgatcacagctgccgaccttgctgagcacctactctgtaccgtgcaccatgtgccacctgcggtccgctgccttggtgactccacctcagccatgctgagacagctgccatcatctctccttccacatgtcggcaggagtggtttgcctgacgttcctgtgtctgactcaagaaccctgcgtttaaggactgggcaagttgtcatttgaaacaggctcatacctggatgcagtggctcacgcctgtaatcccagcactttgggaggctgaggtgggcagatcacgaggtcaggagttcgagaccagcctggccaacatggtgaagccccatctctactaaaaatacaaaaattagccgggcgtggtggcacgtgcctgcagtcccacctactcgggaggctgagacgggagaattgcttgaacctgggaggcgaaggttgcagcgagccgagactgcgccattgcactccagtctgggcaacacagcgagactccatctcaaaaaaaaaaaaaaaaaaaaaaaaacaacttgggctcatgagttcccatgggactctctgcactgctggttggtggtggggttcattgcttttctttcctttttttttttgtgagtcacgttcttctactagcagagtttgttttagttgtcattgccagcatttaagtgaccttgagccagtatcttcctttttcggcgactcagttctcctttcttggtggtgacctctcagtgcccccaggtcaagagaggccaccacggaggagtgtctggttggctatttgaggaaacagctctccagccatgtggtttggggtctcggaggtggacacacacagagacccatccatgattatgacccagtgaagaaccatagaggagctgccccaggtttgaggaaccagctaaaaaagacgcaggctggcctggtgggagcatcacgtgcctgggcttttgggcgatggagcagcaggaggcagtggccgctgccagctgtgcgtaaagagacaatcaggtgctcgtgcagttggccgggctccaagagccaaccatcctgagggttacttagcagcctgcagggctccaagcgcagcagataaggtgcaggccgcagctggtcaggaggataacccagattagaacatggtgtccggtgatagccaggcttcagggtgacccaccgcagcccagtgtcctgcttctcccccagcccactctccctcagcactgatcagctagggcaggcacttgcagagggcagaaaaaagattgaacgcaaagcaaatgttttgctctctgtagaatgggctgttaaatccttcattaaagtgcagccttatgtgatctgtcattgagctgcactgttcagtgtgaggaaggctacctccggcaagccaagtgcctctggtgggtgagacagtgaccacaggggccccaggaggcctgtgggcgtgacgcgctctgcctgtgggtctgggtgctggtcggaggtgtktkcggtctgtgaagatactgctagccaaacgcttaggatttgtgcacttagcagtgtggatgtgacgctttccttcagaagctggaagaaaactgtattctgtggtggcttcagartccattctctcacacctgtattttcttttacagctgaaactagaggaccgttctgtggtgccccgagatgtggtccggcacatgcgatccaccgtgagtcctgcgtccccaccccagccccgggcctgrgggcagccaccttagggacttgagcctgcccacctcrcactctgcatgtgggagaactggccagctctgcagggggtgcgctggggttgcctgggctgggtctcccctggtgaccagggctgctgcaccacgggacttgcatgtctcctccctcccccaggacagtcagtgtggcacggtgatcgacgtcaacatcgactgtgccgtcaagctcatcggcaccaactgcatcatctatcccgtcaacagcaaggacctgcagcacatctgggtgagccggccctgtcttctcatcatcctttctgggccctctggttctctcggcggcacgacctctgggctacagcctcctccgtgctcttgccaagcacagccttcctgggtcagaaggcggagcacagcagccagctggctcctgtagccttgttttcgctgctttcaagtaagccatttagacatgaggtcaggacgtgcccttccccaaccccagcataggctgccagtgtggttatctttaagtgtttttcctttctcctctaacatttctttaaaaaaataaattattggaaatagtttatttttttaatgatttcaaacttaccaaaagttgtaaattcctgtgtccctccatccaggttcctcagctgttaagatttcacttcgtttgctccatcaccttccctccctccttttccccgagatccccctccggtcttttttcttcccaaaacatttgacagcaagctatagatgtgatgccctgtcacccaccccggaatacacacacctcttgtgtgttttccaaaaatgaggacagcctcctgtgcaaccaccatataacccccagattgggaaatcaacgttgataattactgtccagtccacagaccacatgcagttgtcccaacactactcttttcttctttgcggatccaggacccaattcaggaacacatcttgcattgagttgtcatctcttcattttctctccaatctggaatcgcttcccagcctttctttgtcttccatgccctgaacagtgatacattcagtaatttgaccctcagcctgggtcttcctggtgttgcctcatgcccacgtgttcttggcaggcccgccgcagagctctgccctggttcatggtaccccatagccaaagtgctggggttgttcacttttacccctggtcatgttggtgtccaccaggtctctccaccataaactcaccatttaccccctttaagtgattgtattttgtgggaacgtagtcccagattatgtctataacctgtcatttgtcaaactgaaatccaccagctttggcctccattcacagttccccctgcgccagccattgctctgatgttgctaaatggtggttctatgactcccttgttcccctcatttcttttagctggcattctgctctgtagaagagctttatcttctgccctatttatgtattctttttttttatcagtatggacttagagatttctgttttattcattggttataattaattactactattatctgttctgttgcttggatggtcccagatttagccagtgggaaccccttcaagctggctttcatgtccttctcacatggccctttttgttggttttttaagaactttctttctttctggcatgagatgtgccaggctcatcttgtactttttgtgatccagccccagaatcaaccatttctccaagaagcctcattgttttcagagaatggtatttttaaaacccaagatctggatgctaggtgtgctaattgctacttggctcttttgggacacactaggaaatacatatgtattatatgtatacacacatctaaatatgtcactacctgctctatgtgtatattaaaatatatgagttcaggcagagttcacgggcgcagtggctcacccctgtaatcccaacactttgagaggctgaggcagatggatcacttgagctcaagagtttaagaccagcttgggcaacatggcgaaaccccatctcaaccaaaatatatgaaaaaattggccaggcacggtgatgcatgcctgtagtcccagctactcagaagactgaggtgggagagtcgcttgagcccaaagatggaggttgcattaagccaagatcacaccattgcactccagcctgggcaatagagcaagaccctgtctctaaaaaaaataataataaagtaaaataaaatatatgagttcatcctgatagatccacttccacctaaacacctcagactcctcttccttcttctccttcctgctccctttctgttagtaaacacctgggcaccttctccaacaatgagggacttggctctcgatatccttgatgtgttaacgtatttactcagagcactgtccatgtagccaccccccagtggtgtggctgcctcctctgcctgccacctccacagcctactttgccaggtgtcctgtgtccatggatgtcccatgtccatggatgccatcaggcctctctgcccctgcatcacccaccccgttccctccaggcagccccaccaccaccaccacttcctcctcactgggaagagcagctgggatgcagcctagaacttgtagggagggcctgctgcagcagctgtttagggctagtagccaaccggtccagtcagtgagctgtctagatcctcccccatcctgtcttcggtggggcatagaggaatctgtgccctggacatgaacgttgtctgctgtgtctcactgcccctgcctccttggtctgcagcccttcatgtatggggactacattgcctatgactgctggctggggaaggtctacgacttgaagaaccagatcatcctgaagctatccaacggcgccaggtagagtctcaccaccagagagccatcggcttgggaaggatagcctcttggaaagaggggaggaggagggtgtttcctcctggggacagtgatgacaggtttgatcaagggcagtgacagatgttgcaggcatccagggcctaaccctgtaccgttctccttatctgcsgtgkcctawttctgttgctcagtttctgatctgtcctggcatggggagaaacgttttcactgaggatatctgctagaggctgatgctttacttgaggcactgtgatggtgctgagcaagcactccagtggcacttggggtcttgttcgttgtgggagagtttcttgtacyacctcgggctgagttgatggtagaagacgaattgtgctatttagggcatgtgggcgcaytggcatctcagaatcgcaactttttggtactcactgtgtcccctggtggagaccaaacctctgttctctgttttaggtgctccatgaacacggaagatggcgccaagctctacgacgtctgcccgcacgtcagcgactcggtagtgtgctccatccaggccagcacccttctctgattgctcagtcctctggaaggaggacttcgtagcaaagacctggacccagctaaacagagcggtttcctagaaaaggggcgggtgcgcgccagagggtctaaaagtttgggtataggcagaaagtattagaacttttttttttttttttttttttgagacagagtctcactgtcgcccaggctggagtgcaacggtgcgatctcggctcactgcaacctccacctcccgggttcaagtgattctttggcctcagcctcccgagtagctgggattacaggcgtgtgccaccacacccgtctaatttttgtatttttagtggagatgaggtttcaccatgttggccaggctggtctcgaactcttgacctcgggtgatctgcccacagcctcccaaagtgctgggattacaggcgtgagccaccgcgcccggcagtattagaacttttatttgcatttttggtagcttttttttctcatcctttaaggttccactttgtctctctcagtacaggatgatgtgttagttacaatagtacatggacacacacagcaaacaagtagatatacagggggtgcgtgagcaaacaggtttcaggaccactgctctctggagtcttattcctcagagtatgagcccttgaccaaggagcatggaatgcatcacctatgtttgaacaagggcgccagatgacctctgcggacccagggtttgggaagtgctgatgtggagccacaggacttgttttagggcgtgtggggcgtgtgtgtgagtgggcttctgcaggtgggcagccagcgggcacaggcgtggagagcatggtcacccatggagacaccgctcacggggactttcctttggccccacatcccgcagggtctcttcttcgatgattcctatggcttctacccaggccaggtgctcattggccctgccaagatcttctccagcgtccagtggctgtcaggtgtcaagcccgtgctcagcaccaagagcaagttccgagtggtggtggaagaggtgggtccgggcccaagggtaggagatggagtccttgacctccacaccctggagctgagctgctgyccctttccttcctgctcttgagggttgagccccgctcctcagcatctggaccctgttgatctcaaagggctttggggataaagggaacccaggctctggtcatagtgaccaaaagacagatgtgccccagcccagcctgtacaggctgagcaaggtgggagggtggcaagtggcagttccagtggcccctggctggtatgagcagtgacactggtcctgggcattgggtgggggccgtggttacagttggggcctgctctgatgtgtctgtacttggtgctgcactaggaagatcagtttcctgctctggaggtcaagtgggctttgggcagctggctaaagagagtgctgtcagagcctgccctgactggcgtgtcccacctgccatccccaggtgcaggttgtagagttgaaagttacatggattaccaagagtttctgtccagggggcacggacagcgtcagccccccaccctctgtcatcacccaggaaaacctaggcaggtaagcatgcccttactgccagcaacccaggggcaygcgtgggacagggctctgggccctggtcacatgcctggggaggcttaagaacactgctggcctcscaggagtccagcccagctcacccccacttcttccccaaccagggtgaagcgtctcggatgctttgaccatgctcagcggcagcttggggagcgctgtctgtatgtcttcccagccaaggtagagccagccaagattgcctgggaatgtccagaaaaaaactgcgcccagggggagggctctatggccaagaaggtatgtccttggggttggggattggtgggcatttgaggaactggccttgagccatttccatggccaagaaggacagtctgtgctttaggccttggggggcagccctgatgacccttgccggctactcaggtgtatacagctgtcatccccccagcctgagatgcctagggccaggcctgcccaggtgcacctcacagccctgtcctctctgctccgcccttgcaggtgaagcgcctgttgaagaagcaggttgtgcggatcatgtcatgctccccagacacccagtgttcccgggaccattccatggaagacccagacaagaagggggaatccaaaaccaagagcgaagcggagtctgccagccctgaggagacgcccgatggctctgccagtccagtggagatgcaggacgagggtgcagaggagccccacraggcaggagagcagctgcccccattcctgctaaaagaaggcagagatgacaggctgcactcrgcagagcaggacgcagatgatgaggctgctgatgacacggacgacaccagttcggtgacctcctctgccagctccaccacttcctcccagagcggcagcggcacgagtcgcaaaaagagcatccccttgtccatcaagaacttaaagcgcaaacacaagaggaagaagaataaaatcactcgagacttcaagccaggggacaggtaaactcagagttgtgcccctccccaatggcgtcagcgtgaagccaggcagagtgcgcgtcccctcggtgtgcgtgcctgcgctcgcacacacacctctgcatgccttgtagtggctccggggctcccacccgagacaacgtaggtgcctggggtaggccctggtggaaagcagagactgaggagtggtgcagagggtgggatggtggtggccttaagcttggccttctggaaccacatttgcctgagctctcccaagtggatcctgttctcagagaatgcgtggccttggaaccctgggtgagcttcctgtgcaccagagactcatcctgccaacctgggattcagagtttcaggttaccaagcccacagggacaggaagggacagaaagactctctgccctttccgcggagggggtggggtttgcatggcctgctgactggcctgcacccgcagggtggcagtggaggtggtgaccacgatgacctcagccgacgtgatgtggcaggatggctccgtggaatgcaacatccgctccaacgacctcttccctgtgcaccacctggacaacaacgagttctgccctggagacttygtggtagataagcgaggtagtgccagctctggaagggcagccagcagggtggtcgccaatgagggcccgggttggggcttgtggagaatgggcagtggatctggggtcagagctaaaatgaggtccagaaggggactgccctcatgaaggggtctcaccacttccaagacgggggaaggtcagggttctgcactctgcactggcttgagatgtgggctccttagccgggatcccttagctagtcacttccctttctctggttccctagtccagagctgtccagaccctgctgtctacggtgtggtacagtctggggaccacatcggccgtacctgcatggtgaagtggttcaagctgaggccgagtggggacgacgtggaggtgtgtgcagcccctactgcttgcttcaggtgggctctggggttgggtgtaggacccctagctcatgacaacctgtcctgtgccacagctgattggagaagaggaagatgtgagtgtttacgacattgctgaccaccctgactttaggttccgtacaactgacatcgtcatccgcatcggcaatactgaggatggggctcctcacaaggaggatgaggtacgccttcaaattcaagttctggatggctgctcactgccctgtgcaccagctgcagtccctgatgctgccaccaggtggctctaggagacaagacctgaaagtcctctgggctcagtgtcctcagaagggcagctgccccagagtcaagctgccgctcagcactagcagctgcagaaggacttgtttccctgcctcccttctggggtcaggcttcttgagctgccgctggttacatttaccagaggagctaagttccttgtcacaagccaggtgggcatgatgtcagtcactgcagagcacaggaggggctggggagctggagcttgagctgggccccctgacttkgtcccctttgcccagcagccatcggtgggccaggtggcccgtgtggacgtcagcagcaaggtggaggtggtgtgggctgacaactcaaagaccatcatcctgccccaggtgaggctctggcaagacccccctgctgagcttgtgactatggcaacttgggccgggggccacaggcgtgtagccagaagatgggctctcaggtcttcctggtgagatctcagcgaaagcgtgaggggaaaggcaggcattccacacagcccttggtgcaggcctgcagttggcccaccagcctcgcttctcccagcartctcttcacgtccatctctgggtgcatgtagactttcacaaacctccaggattttcctggattgtcagctcactatgctacgaagaatgcaagttccctcctaaaaggagatggagactttcctaccaccctttttagaaagctctaacagagaaggagagaaaggagagagccgacccagttctagccccacctgctgggtsctgagcagaagggctacacgggctctccttccctcgcctcctggttggagccacacagcccagctctcctctcctggtccacacagggggcaggagtgggggcgggaatggcttgccccatcaccttaacggccattccagggaacgcagcaggatatgtcggcccttctacatgtcccctcttgtcatatgttcccagctccccacacaggcctccttggctgcatcattagctgaccctgcgcttttcaggtgtgggactgggcctgccaaggtcccctaacgccttggacagatgctgacgaagtgcacagagcaggaggagaggctggaacagaccactggctggggctttgggtccagctggagggtgggacaggtgaagggcctctcccagagacctagggactgcaaaagccagagcagaggtcagggaaagggtggaatgaggttgccaaggcctcatgagcccagtcgccatcagctgtgcggatcagggatccccagagctcctccttagtggtggggaggtgacttcctgtctgcttaccctggcacttcccttctgcccccagcacttgtacaacatagagtctgagattgaggagtcagactacgattcggtagaaggcagcaccagcggggcatcctcggatgaatgggaagatgatagtgacagctgggagacggacaatgggctggtggaggacgagcaccccaagatagaggagccccccatcccacccctggagcagccggtggcccctgaggacaagggagtggtgatcagtgaagaggcagccacagctgccgtccagggggctgtggccatggctgcccccatggccgggctgatggagaaggctggcaaggacgggccacccaagagcttccgggagttgaaagaggccatcaagatcctggagagcctcaagaacatgactgtggagcagctgctgacgggctcgcccacctctccgactgtggagcctgagaagccaactcgggagaagaagtttctggatgacatcaagaagctacaggaaaacctcaagaagaccctggacaatgtggccattgtagaggaggagaagatggaagcagtgcccgacgtagagcgyaaggaggacaagcccgaggggcagtcacctgtgaaggctgagtggcccagcgaaaccccggtgctgtgccagcagtgtggcggcaagcctggcgtcaccttcaccagcgccaagggcgaggtcttctccgtactggagtttgcaccctgtgagtcagcccttgcctggtcttcgccttcccccgccttctcggggctcctgtttgtgtcaccagatctgggtgcagggtggttagtcccctcgccagaccccagctactgccccagggcaaaccatttccctgtgtggtcacagtgctgaggccagcagcggcgagtgggaagtctgtgggtgtgctcacctgtccagccaggttggcagatggagctccagggcctctccatgagggactgactattctcttcccccctctagcaaatcattcttttaagaaaattgagttccagcctccagaagccaagaagttcttcagcacagtgcggaaggagatggcgctgctggctacctcactgcctgagggcatcatggtcaagacttttgaagatagaatggcaagtaggcttggcatgggcaggtgcagatgtgctgtgtgggcacccagtgcccaagaggccaccaaccttgggtccccaaacctccggggctgactggcacctgcgaggacactcacccacccaccttttacaggggcggtcacaggctcagtcaggtgagggctgactcagccgtgtgtccaggccagatggttctttctttcctccctcctttaaaaaattactttctcggccgggcgcagtggctcacacccgtaatcccagcactttgggaggccgaggtgggtggatcacgaggtcaggagatcgagaccatcctggctaacacagtgaaaccccgtctccactaaaaaaaaaaaaaaaattacaaaaaactctcccgccaccatgcgggcgcctgtagtcccagctactctggaggctgaggcaggagaatggcgtgaacctgggaggtggagcttgcagtgagccgagatcacgccactgcactccagcctgggtgacagagcgagattctgtctcaaaaaaaaaaattactttgaaataggccgggtgcggtggctcacgactgtaatcccagcacttcgggaagccgaggcaggtggatcacctgaggtcagaagtttgagaccagcctgaccaacccggtgaaaccctgtctctacttaaaaatacaaaaattagccggatgtggtggcgggtgccagtaatcccagctactcgggagactgaggcaggagaatcacttgaacctgggaggcagaggttgtagtgagccaagatcgcaccattgcactccagcctgggcaacagagcgagacttcatctcaaaaaaaaaaaaattactttgaaattaattatattaygattactcctcaagcctacttttctttttgaaaaattagaacattacagatcctttgagtggaaatggaagagctaaagttgcctttgaccagacctcacttccctttctccccgaatcataggcctcttcccacacccagaggattgttggaagtttagtgggtctccttccaaacggatgaccttttttttatacttttacattatttatacactaaaaaaatatttttacattttcatgtatcaccataagtacataatattttgtatgatttgtttacacacagaatatgtcgtcgtacacatcatctctaatttgcttaagaccaacctgtgttgattcataatgatctagtttcttcctttttacctgcaaaataggatgacagcatgtggccacaccacattccattttcccactcctctgttcgtggacggggcctagtgtctctgagtcatgtttactgaggcagcgctgagtgcatccttccggaacaggcaagcccgtttgcctgccaccttgttgactccgcagtcccttactgggcctgtgcatcgagccaagcactatgctagactctgaatctgagtctgaggccccagttctggccctgtcctggaaggaagggagtaagaaaagaaagagcagggatcctgagagcagccaagcgatcctgagagcagccaagcgggatgctgttgagatgggcccggagtagccacaaccctggaacagggctaggcagagtcctaaggcccagtgctgcttgagattcttaataacgcttttggttttttcttgggttgtaggaaaattccttttgaaaattctagcctgtctcagctctgctgagggaagatggaaacagtattttttgttttgttctgttttccccacatctcactcaggagaagaaaagtagtgcattccctggaggctcccagggtggcaccgataagagcatgtgcagaggttccctcgccccagctagcgctctgccttccctgcttctcagctcatcactgacctcgcccattgccctgtcrgttgagatcccacacacacgcgtgtgtgcacagatgcacgcaaatagatgcacagattccagatgtctgtggagcggtggtctcccaacctcccccatggagttcaaaccctcactgtcagcttctggttgtgagaccatccccccttccccaggcctcaccagcctggaactgcctttcagcttgaaactgcttgtactacttgccttgttggggataagggttggagcaggtgtttagaggaattgttttgttttgtttttaaaagacagggttggccgggcgtggtggctcacgcctgtaatcccagcactttgggaggccaaggtgggcggatcacaaggtcaggagttcgagaccagcctgaccaacatggtgaaaccccgtctctattaaaatacaaaaaattagccgggcgtgaggagactgaagcagagaatcgcttgaacctgggaggcagaggttgcagtgagccaagatcacaccattgcactccagcctgggtgacagagctatactccatctcaaaaaaatacataagccaaaaaataaaagacagggtctcactctgtcgcccaggctggagtgcagtggtgtgatcatagctcactgcagcctcagcctcctggagtcaagtgatcctcccatctaagctttttgagtagctgggactgtaggtatgcaccaccatgcccagctaattttttattttttgtagagatagggtcccactatgttgcccaggttggttttgacctcctggcctcaagcagtcctcccaccttggcctcccaaaagtgctgggattacaggtgtgagccatcacgtcggctgaggaatacaatctttttttttttttgagatagcgtcgcactgtcacccaggctagagttcaatggcacaatctcrgctcactgcaacctccgcctccgggttgaagcaattctcccacctcagcctcccgagtagctgggactgcaggcatgcatcaccacgcctggctaatttttgtatttttagtagagacggggtttcaccacgttggccagactgctcttgaactcctgaccttaagtgatccacccgtctcggcctcccaaagtgctgggattacaggcacgaaccaccgcgcccagctggaatacagtcttaaagtaatgatttatgaggaaaaacacctgataagataaaaactcacttcgagtatttctcttagccagggttcaatgattccaggcaagggccaggcacagtgacggctcagggctgtaaacccagcactttgggaggccgaggcaggcggatcacttgagcccaggagttcgagaccaacctaggcaacatagtgaaaccctgtctgtacacaaaataaaaaaatcatctgggcacggtggcccacactgtagtcccggctacttgggaggctgcagtgagccattattgcactagtgtactccagcctgggggacacagcaagaccctgtctcaaaaaaaaaagattccaggctgttctgcagagagagatttgtccttagcttctccactgctggtggcatctggagtcccaggtgctgctcttcctgcgtgatctgcacagtgtcctgggaaagagcaggtgcagatgcagatgccacatgtaggacacccccttccacccctgccaacyttggcctccctccctccctccctacctaggacctcttctcagctctcatcaagggccccactcgaaccccctacgaggatggcctctacttgtttgacatccagctccccaacatctacccagccgtgcccccccacttctgctacctctcccaatgcagtggccgcctgaaccccaacctgtatgacaatgggaaggtgtgtgtcagcctcctgggcacctggattggaaaggtgagtatagggccaggcccccagccaagaaggaggaagagccactggtggataggggcctggggaacagaattgatggtgccctgtgtgtttcaggggacagagaggtggacaagcaagtccagccttctccaggtgctcatctccatccaaggtacagttgggctgaagcgggggtgcggacaagggagggccggtggaggaaagtgactctgatagtccccctggcaggtggagggtaggcctgcattgtgggcctctctcacccactgagggaaggtgtcccgcccacacaggtctgatcctggtaaatgaaccatactacaacgaagccggcttcgacagtgaccgaggcctgcaggaaggctatgaaaacagtcgctgttacaatgagatggcgctgatccgcgtggtgcagtccatgacccagctggtgcggcggccccccgaggtctttgagcaggagatcaggcaacactttagcactggtggctggcggctggtgaaccgtatcgagtcctggctggaaacccatrccctgctggagaaggcccaggcactgcccaacggggtgcccaaggccagcagctcgccagagcccccagctgtagccgagctgtcagactccggccaacaagaacctgaggatggagggccagccccaggagaggcctcccagggctcagactcagagggcggtgcccagrgcctggcctcagctagcagggaccacacagaccagacttcggagaccgcaccagacgcatcggtgccacccagtgtgaaaccaaagaagcggagaaagagctaccggagcttcttacctgagaagagtggctaccctgacatcggcttccccctcttcccactttccaagggtttcatcaagagcatccggggtgtcctgacgcagttccgggctgccctgctagaggcaggcatgccggagtgcacagaggacaagtagctgccaggcacagaggaaagagcatcaccgtgggagaggccagccgccgcctgctcactcccccccggaatcacccctcttcccatgcccctctgtccccactgcaaacccactgccctcttctccccaaggtgagtttgatgctgaagtgcaagaagtgtgttgagatgctgccgtttctattttgaagcgagctttcaacaggcgggtcccctgtggcaaagaaaatcggaaccctgttgccgattttccatttgtcaccccagcagaatgtccggcacttgctcccttgctgccccttctcaggtcagaggcgggtgttccagggcctgccgcggggctctctgggccggttccctgcagacccgcaggagagcacatgtgccttgcatgaagtgtgggttgcgccaacaattcccctggtccctttcaacctgtttagttcaactcaagcctccctgtgtcccagaccctcctgctgccaccaccacccaggtcctccctagtcctccagcgtcaacactatcccttgggagttgtagctgctgtcactgactcccggctatacatggcctgtcgaccacgttatagccctcaggcctgttgaacttgctctctaagagaggttgggaccaggctaggktccgggtgacgcccaggagaggtggtggccttcacacatgcacatggagttgaggaccagggagctgcagggaaagcaacagctataggtgccttgctcttctgtcggaggctgctgggggcaagagcagctgcacaaggccagggcaagtgctagggcccctcccccatcacatggtcacactgggacaggcgtgcagctcactgaactccaagcgagccagccctctcttggactagaaggcctactgtcagcccttcgcttacaaactgcaggctcaatccgaaggggacggccggcgggggctctcctagtgcccagagacaggcccagaggtttacaagttttctaagcttttgataatgtgaagctccaggccgagaggatgctgttgagcacattgcagctatgtaatttttggtgtatgtatgtaatatttaaggttggaaaaaaaactcaaaagcaaagatattaactcttattagaaaaaaagacaaaaaaaaagccaaagcatgatgcgtcttgtcagccttaagtgggctccacacctgtgctgtgctgtgaccgcccagccagcagagctgcgggaggatggagccggaccacacaccgtggcatttggaaccgagtcggtatcttgtttgagaaacacccggagtgactggtggggctgtgcttcccagtgcattgtacatgtggagatgtgaatgcctactgcttacgatatctgtataaagtgctgtgtgattaaacttttttttacttgcattttttttttttttttttttkkttggctcattagcaagacaaggtgacaccattaaacctccctctgccattcatctgggctccgttgcctttgtgtccctcacacacacccttcctggggaaggaaagaccttgtttgttgccagggaaggcatgtggcagtgggtcctggctttcctggccaggtgggggccactgtgaacagcacccccacccgcccacactgccctctgcctgccagacctgcttgcatgccttttgtacttcttgtcctggagcagtcctctggcctcctcctggccggtggtgtgcccctcaggagccagcttagagcagcctcccagcagctgtagtctccagagacctacaactgaccagttcagctccttccaggttctgggagagccgacgtcatagcacctggcggtggacaggtgccacaactcctggacgctaagccaaaatggttgcccagtttagacttggatggatccttccctgccacattctttccactcctgcctggcactcctccacagggacaggtagggaaaggagacagctgagggaggctgggagaaccctagaaccctagaccattgtggtggatgacagactccttttaaaaaggtaagataccaggtgtggtggctcatgactgtaatcccagcactttgggaggcagaggcgggcagatgacttgaggtcaggggtttgggatcagcctggccaacatggtgaaaccccatctctactaaaactacaaaaattagctgggcatggtggcatgcacctgtaatcccagctactcaggaggctgagcacaagaatcacttgaacccgggaggtagaggttgcagtgagccaaaaaaaaaaaaaaaaaaaaaaagcaagatattgccattttttacttctgaggtctcctgctccttgccaatttttttgggggggggcgggggcggtggccagtggttttattgtttttgtttttgagacattctcactctgtctcacccagccaggctggggtgcaatggcgcgatctcggctcactgcagcctcaacctcccgggctcaagcgattctcctgcctcagcctcccaagtagctgggactacaggtgtccgccaccacaccctgctaatgtttgcacattttgtagagatgagattttaccatgttgcccaggctggtctcaaacttctgggctcaagtgatccacccacctcagcctcccaaagtgctgggattacaggtgtgagccaccacgcctggcccatcagttttctaatgcccttaactcagatatttcccctttcctgctaaatccacatggggctctgatgagatttgctgggactagctgcttgtgtggccctggctgagacatgccagctccgagctgcatcctgtgtgtggtcaggcagctggctgagctctgaggctgcttcaggttggaggtgctataattatcagggtggtagaggcccccccaccattaggctgaaccagctctggtcctgagtcccccaccagaatgactatgcctggggccagtaaaatccattgcccatcccagggggcaccattggccatcattaccattaaattctatagtcccggccagaacgagaacccattctctccccagtcaccaggacaggacgagcaggctgggaatgtcactttatttggatttggttcgtggggtgggggtctcagaacaaactagaaggccttacataggcagctgggcccagccagctgggctcctgacccaggacttcattctggcctgtccccccaaagcatagcctccaccttctcacccttctccagaggagtctcctccacccccacaggagctgtggacaggccctgcagccctagggaaggaggaagggtcctgcaagtagacactaaggcacagcgcggcccaggggtcataagggctcttctggcggtggcatctgctggggcttccagctgggcgggggctccacgcaaccgctgaccatccagaagtagtttgggtgcacctggccctgcacggcctcgctaaccatcaattccccatccactgcaaacacacctttcccatccttgggctccaagcggaaggcgaccacgggcacatataccaagtaggggcattcatactccatatgcctgcccttctccatggccaggaagaggcgcagcagcatggcacgagacactcccgcccgcacgtagaacagatgcatgacgccagctgcacagcggcccatgggtgcagcaaacatctcactgcccaggtgcgagtgcagcagtgccaggactagcacaaagtcctcgtcgggcaccactgtccagtgagagggcactggctcctccagtggcacaaggtgtgcatctaccgggccctgctggaccacaacgggggaggcaggtgtcttggaacccactcttcctacagggaggtaggccagtcggccgcggtaggtgcgcagggctgccagacgcaggaaggtgcccagagtgaagcgcatctcccccagacgccgatacttctcactctctaggtccacatcagcaatgaagccccaggccaggctgagcacagagaagaggcgcagccccgaagccgtgtgcagagacagcaggttcatgggtgacagcagccggcggcacagcaatagcgtgcagttggtcaggaggtcttcattggtgacctgctcatagctgcagggggaaaaagtcagataaggcaggacaggagcccccatgtatcccccgcttcctcctcccggggagtgggagctggcaaagcgccatgtggtccctggggagttggcaggactggtaggtgacagatggagcaaatggaagcagtcagctggggtcaccaggagagggccccaggactaagggagaaggggaaatggaaatgatctcagcctatgggagcttagacaagaaaacccccgcggtagaggagcactgacgggaaacaggcctactctggccctgggctctcacccagcataatggttcaaggaagctgccagcgcgttgccagagcctgctgggaggctacacaggggcttctggatggcggtctcccagtcaggccgctccatgagcccgttcaccacctgttgaagcacacgtggcctcagcctgggacgcaccgcgccaagccccaggcctagccgcgcagtgcggtcctcacctcgtgcatcagcccgtctccagacatgaccaccagagcgtcccagcggcccagctcctccgaccgcaccagctcccgcgcgtggttccgccgctctgcagggagaccggcagctatcaggactgggggggtcccctgccaggggatgctcccgaaaccccctccgagaggtactcaccagtgagcatcagcgtgaaggagatttcagcctcagccaaaaggggctgcacgtgactccggaagagctgcaaggccttgcccttgccgccgcgcgggttcagcagcaccagcacgcggcagggccgcgggagcacgccccgggggccgcccgctgagaaaacaaaaccaaagaggccacgtccgcaaccgaccactagggggccacgggtaacaatggggcactagtgtgggaacttggtgcccgaaacaccccggtaattgaccctggccagaggagcggcctttgctgggagacctggggtggggacgcggcgcccctgccacccccttccttggctcagattcggccggcttctggcctcgtgagggataatgtttctcccgatcgtccacagcccctttcgtccagctgggcgttccatcattcctggcgaggaacaggaatccccctacagcccttcccagcaggaaccccacaaacctggatccataacctcgacccgcggctcccgctgccagggggtccctggcgctgtgggggcgctgcccgtggcggcggctcctgccttcagctccttatcggtgctgcccaggcgggcgtcgcagggccggctgtggggctcgccttccccgcccggagccgtggctgtaggagcaccggcgtcattccctgcggcggctggacctgagggagagaagacagcgctggcggagtccggggccgcagctgccagaggtggggagcgcccgactaaatcccgggaccacgcgcggggagccaggttcccgggaagtccagagagctgaggtccggtgcctccgagggcgcccccgccgtgtgactaagcctacaatccctgagaagggcgcctgctccggggctttctccctggggcttggggttcggttccggcccgacggatgagtcagagccccgtggctccctccgacggactagctcctcacccctcggggctgccagggggaggggagtccagctgcgtaaaaatcccagaacttgagcggacattgctgggcacgaagttctgggagaggatccctgccccagccatccaggttgccgtgtcccctgcccggagctccagagcggtgggagccgcggcgcgcgcttctcagggccccgctccgttgcgacgcgcgcggcgctcgtgggagccgctcccgggtcgcgccaaagccaagcccgaaccgggccaccagctgccgcctgctctcgcccaagcgacaagtggcccagttcccggggccccgcgagggcgggccgcacaggagccacgagcggcgcgaaggcagggtgggcggccctacccagtcggtccggtttgctggggaggcgccaccgccgttccctacagtggcctggggcggaacgcagctcgtcccaagctcagcccacgtctgagggactggagcgccccgctggagcggactccccggcctcgctccctccggcctcaaacttttcgctcaacttcgcagccggcgccgcggagcggggagggcactgagcctcggcgccggcctggctccgccccgcgctcccgggggtggaacctgagcccggcgcggcctcggcctctgcccgcctccggcctcagcgcgccgcctccggcacggcccgcgcccacggccgggccacgagctggttcccgcccgggtcctaggaagcggcaagcgcgcccccgccgctcgtcctaggcgtctggctagaaggcggcgccgcgacctggccgggtgagctgaggcggcaggccgcgaggcgcggagtcccgggcccggccgcgagcgcagtgtctggggcgcgcgaaagcgaccgcgcagcgcagacggaggcgcgggctccgcgcgaactcgtgtcggagcgagcgccgggcgcgcgcggctccgctctcccgggggacccttggtttcacctcgacgccacgacctcgcccccgcgggtgctgtcggcgccgggatgcagcgccccttttgcgcgctctgccctagcccacccgaaattcgaggcccgcacgccacccggggcgcctctccaggccggggcgtctcgcccgccgcccaccagcttccctctttcttcctcccccgcgctcccacggaggttatttttaacttcccgacgctgcagctgggctaccgagcctgaggccgcctagcgcgctgtcccgggtagagcaggcgacaggccgggggctccgagccggagaggaggcttgacagtgtagatgggcctgggggcccccgtcgggattggaaagccaagcatgtggtacgtgccccccgccccctctggctcagcgtgaagaaggggcgccggaaacgcgctcagaagttgtcacttctttggaggccagtagggacgcgtttgtcagtgtgtttgtgatacacttatcgcggcaagccacagaacgtgtccgcgagcacctcgagttagatccctggggggttacggcggagacggaggaagaagttgccaaggcccattggtgacctgcccaggtagggccagagttaggagaaaccaagcccctgcgggaggctgcggggctcgcgcgcccccgccggccccacccgcccccacacacctctctcatcgcttcttaaagtcgagaagaggcaggtccaggaggagcacgcagccaattagcc

SEQ ID NO: 97948 - DNA, 42513 bp, Homo sapiens
gtcaatctgtcaatcttctggtttatggcttctggatggcatgtctttctagggtggcctcagtattccaaagttaagtaacttgcttaatctcacaagctaattagtgatgagctgggtgtacctgaacatttgcatgcccccgaggccagcgcccttcccccgggcctcactctcctcccagggtgactgaggcctccaaggttggggagggaagatacagcagtgatgggcgcctgaaaaatgagcacagctgggctgagcaggtgacaggggctctggaatagctttcaaagtccattcccaagggctaatgggaatgaccgagccctggctgagactaggatgacccagtggagggctgacagtggggtgagaacactggtgaggagcagcctgctgggagggaggtggagatggatttcaagggcaccatgggggaaggaatagcaccaggaggagatagctgaaaagtatctctgggcctaaggagtctgaccacatccgcctcctccccagcacccaggaatgccaggcaccctggcttctcccctggtggcaggcagctcccaaggtgcctaagggtctggtggcccatgaacccttggagagaggtcactcactggtgccctccccggcatgtcgtaaaggcaggcagggtggcaaggagaggcgttacagaggctttggcatcttgctaaccactgacgagtcctgttgagagcgagcctgtgcctctgtgcccttaaccttcaggctggactgccagggtatctggtgagaaagcaggtggcggggagcactaagactgcggcttccccgggttcccctgaccacgtggattccttggcgcggtacctcttctcgccaccagatggcgatcccgcatcatcaatctctgcggccaggcgggcaagatcctgtggttcctttctctggggctcccacctgggcccactcccgctgccgactctccctgctggaggcctgggggtaaggggaggtaaatccagagcatatatggagaggaagtctgggggcttgtgtcagctaaattccgaagagaggggatgcccttctcatccctccctctactctgctcccccagccactcccctgctccctctcacctggcctccccacctttgcccaaacccatctgtcctgagcacagccagaatggcccttccaaaagatgggaatggtccaccggaatggctggaaagagtatgggtgtggggcccagcacccagccctgctctctctcaccacctgtgcgttcttgggcacagtcctacacttctctgaaccttgacaaggaagtcagcatccagcatcctctcattcaaaagattcactgttcctttttttttttttttttttttttttgagatggagtctcactctgtcgcccagggtggagtgcagaggcgcgatctcagctcactgcagcctccacctcccaggttcaagcgattctcctgcctcagcctcccaagtagctgggattacaggcatgtgcgatcatgcctggctaatttttgtatttttagtagagatgggggttccatcatgttgtccaggtgggtctcgaattcctgacctcaagtgatccaccaccggcttggcctccgaaagtgctgggattacaggtgtgagccaccacacccggccgctcacgttctaaaaatgaaaaaagctaaacatagacccctaatattttactcccgtggacaaataccagggcgtccttcaaaggtgtgttgtcggagcttttctgagtttgctaactaatggcttcaagaccctctgcccttttcttccgaggatcacaaagtgagtcttgagggggtctcagggtgtgcagttcccagggtgggtccctctctggggcatgttctcctgccttcctctaaggcagtactcactgaggaccaacgcttctcaatgtcaaactctgtcgctggtcttaattccacagcagcctcagtgtcctcatctgtaaagcctgacctgcctatctgcagaattgttgtcaagatttaaaaaataaaataggctgggcgcagtggctcatgcctgtaaacccagcactgtgggaggccgaggcgggaagatcgcttgagtccaggagttcaagaccagcctgggcaacatagtgagacctccatctctacaaacaataaagcaaaattagctgagtgtggtggcctgtagtcccagctactcaggaggttgaggtgggaggatcacttgagcccaggaggttgaggctacagtgattcccattgtaccactgcactccagcctggatgacagagcaagataacggcctcaaaaaataataataggccgggcacagtggctcacacctgtaatcccagtgctttgggaggctgaagtgggcagatcacgaggtcaggagatcgagaccatcctggccaatatggtgaaaccccatctctactaaaaatacaaaaaaaaaggccaggcacagtggctcatacttgtaatcccagcactttgggagacagaggcaggaggatcacctgaggttgggagttcgagaccagcctgaccaacatggagaaaccccatctctactaaaaatatacaaaattagccaggtgtggtggtgcatgcctgtaatcccagctacttgggaggctgaggcaggagaatcgcttgaacccgagaggtggaggttgtggtgagccgagattgcgccattgcactccagcctgggcaacaagagagaaactctgtctcaaaaaaaaaaaattagttggatgtggtggcgcatgcctgtaatcccagctgctcgggaaactgagacacgagaatcacttgaacccagaaggccgaggttgcagtgagtggagattgcgccactgcactccagcctggcgacagagcgagactgcggttcaaaaataaataaataataataataaatgaaatagtgtctgtgaaagcatgttttaaaggaggggacacaagcagaaaatatgagggtgcaatttcctagttgaagaatgcctcatgggctcccccttgcttacagaagaaagtaaaaacccttatccagacacacagcagcctccaccctgagcgcccgctgcctccccaggcttctcctgtcctcctcctcacacagcctgcgatgtagccaagccatagcaccagaagcttccccaccacagccagtttcccggctgtgtcttcgttcttgttcttcccactagaaatccctttccttatcccaatctgtgaagatcttccctacacctgtaggtccataaaaataaaaaagcttagacggtgtttttcacttattctttctttttcttttccttttttttttttttttttttttgagacagagtttccctcttattgcttaggctggagtgcaatggtgcaatctcagctcactgcaacctctgcctcccgggttcaagcgattctcctgcctcagcctcccgagtagctgggattacaggcatgtgccaccacgcctggctaattttgtatttttagtagagatggggtttctccatgttggccaggctggtctcgaactcccgacctcaggtgatctgcccgcctcggcctcccaaaatgctggtattacaggagtgagccactgcgcccggccaacagtgtttttctttaagttataaaagtaaaatatgtaaagtgtaatcccaccgattttggaggccaaagcaggatcacttgaatccaggagtttgaggccagcctgagcgacgtagtgaggcccccccccaccgcccaccaccatctctacaaaaaaaaaatttaattagccagaaaggatggcgtgcacctatagtcccagctactcaggaggctgaagtgggaggatcacttgagccccagaggtcgaggctgcaataagccatgagtatactgtactccagcctgggtgacaccaaaaccttgtctcaaaacaaaaacaaagagtttagacagtgtttctctttaagttatgtaagtaatatatgcacatgatacaaaatgaaaagcaagtgcctctctccccctaaacccctgcagggttactccacagatatccttccagaaagtttgtatggatctaccaacatatatatgtctgttctatttaaatttaggtaaataggattatactaaacatgcagcttgctttttttttttaacttactataagttggagataattcctttctcagtacatggatagctgcctcgttgcttttaacagctgtgtgacattatcacaagttatacccctggcctatttaacattcttccctctctggcctcacaggtgcgtgttgctgcagccaaggctgtaatcagcctccctgcacctatgtggccgggcagcacgccatgtttgcatgggacaaatccctgacaccagcttaagcaccaccatgaatccctcccctcctggggactcctgcagagcttccagtagagctccaggagagagaacccagctcaggcatttgcagcagtgtttgttagagtctaaagtcagatcatgaccgagtttaaaccccagctgctcccctcacatctccctctgcctcagttttctcatccctaaaatggggatgatcataatggtacccacttcatagacctgtactgcggattatacagactaaagcactttggaatggctagctgctctcacccttcctgttacagtattgagttccaacgtctccctgtagaatgctggcacttcgtgggcaggccctggttttgttcctctctgcacataaccccaggatgtgctggttgcacaataaatggtcccttacatttgttactaggagcaacccccaccccagctttggcccactccccctccttccagcctgtgccctcctcatggccccagagctggggaggagagatgcatctctcaggataatctccagcagccaggtgctccccacctccacccaggtcagcaataaacaccagagtccttgggttggggggcagggtggctcaggagctctctaagggccagaggttttgccttggccctgacaaccccacccccacccctccaagcctgagtctcttcaaactctgctcctcctggcctagccaggcctcctggagagggacggcgagatgataagcgctggggctgagaacggggcatccagaccttggagttcggtcctagctgccctggccaaggttttgtttgtctagtcccaagaggcaggcccttggagtccagggaagagagaaggaaccacctgggcagacagacccaagccaaggggccaggtgtcgccagcgtccccaatctccagtctggctctggcccgcatggcagctggaagggccagagctgggtgggttctgtcaatgcttctacggggtgtgtaggggggtggcaggagtcacaaatgttggccttagctgcagggcaaatgcagataggacctccacggagtgcctgttcccaacccaagggcacagcagagctaggagagaggcctcagggtccaggagggagaggaggtgttcaggcccagcttcccggagagagtgtgactacagactaaaagggtcaagggaacaggcccacttggcctgaggatgagggcgctggaagaaggggatgggagattgggtgctttttcttgatggggaggggcgacttgaagacggcaatcaagacctagatgacgtgtttggtctggggtggagtgaggacgccaagagggaaaggacggcgccctgaagagaccagctcaggcgaaaacagggctctgcccaggcggggacccagctgggtggagggcggaggcaggaacccaggaagccgactgagcaaagactgcgtccaggccccgcccccatgagcccggccacgccccctggagcccagccccgcctcccggccgcccgcgcgcaggtagggaagaggcggagcgccgccgccccgcccccgaggagccaccgcccagccgctcgcaggcgccgcacggagttgcgtcccggggacttggggccgcagggaggtgagcgcggggcgacgagcggggcaggactcacggccgcccagccgcaggcgccggaagggtcccgaggttgtgcccgagcctgccctggagcggtggtgcgcggccaggaagggtgcccagtgcccggtgcccgccctgcggagcgcctgggtcccacgtgggctcggctggaggcccgggctggctcagacggcgccggcggggccgctggacccggtctgctggcccctagggctcggctcggacaggacgcctaaggggtccctgggcgacggggcgccagatgtaggggcaagacgattgggcagagatttaaacctccggaggaagagaggagactgcgcagggcagtcccgcctgcgtcccagaagtgcctgcagttcagacccttctctcccctccactttctcccgggtgagcaccgggcggaccggggccgaagtttgttggttgagccagccaaggtggaaacaggtgcgggggtggggatgagggactcacacagcagggctggaccggagctcagaaattggacccaggagtcctgacttctggatggaggggctggggaaggttggccctgggcttgccttttacctatttggcccctcggatgttcccccagggcattgggatagagacggataagttccctagggtacagaccccgccccactcccacgccagggcgcaaaggaagcctaggttttggccctgccccattccatgaaagattaacggagggggctctagggttggagctactgagagggtggcagcgggtgtgtctgaggagcagaaggcggtggggagctgaccccacttggggagaggctgctgttgcctgggcggctggcatcaggcccccagtgtgtgccatttgctggtaatataatgagaccagcatctgccttattcgaccctcactgtccgtagggcaggcagtggaaagggaggcgtgttttagagctgtggttctcaaccaggggcgactttgcctgccatgggatatttggcaatgttggagtcattttgggtgtcacacacttgggaggggaagtgagtgttgttgttactggcaggtagtgggtagaggccagggacgctaccagacatcttcagggcacggaacagcccacataacgaggaattatccagcccaaggtgttgggctgtgctgaggctgagaaaccctgcgcagcagctggtccatcrggttccttctcaatgatgctccctcactggggaaactacctcagttttccagagtggttaggggaggaacttggaataaacctgaatgagatgaggggtaaggcagtgtgagggcacttattcccctcacaagagtcttcctttggtgccatgagacaccgcctttcccaatctccactggccctgcaggaagctggtctaggtgctgtgggggagaggttgggaacagaggacccccttgcagcccaggcctggggtgcttaaccccagggcaatctcccaggaaggctgggctgaggcagcccttgagctcaaatatccctgggctgggagggtgggcagagggcgagctctcttcccatagattttcccaaagctggattgctgaagctggcatggttgcctgataccatgtgacctgctggaattttcccttctgaactcacacctaactcctccaattatgtacaccttttgaaagtgacatccaaggagtatcagggctcctaattcctggggggtccccaggctgcttttgtcctgcaataaagagggcaccctgggttagctgacgagccctggagtgggcccagctgctgatggggtggaggcacccctgcccatggtgttagctgagcagaggtgagagatgggagacatcaaagcacaggccaggtggccccccagtagggatgactcagagttgtttgtattgggctggaggaatgtacttccagttttctggcaacaaggaggggtggctggcacggtgggagaggatcggatgaagcagccacgtccatgcccaggagctggggccacctcgctgccctccctccctgttttcttgcagtagccattatacccatcctgttcacttctggacccagccttcttgcctgggaaccctggtggaggtttcgagcttgggttctttttgttggtgttggtggcttttgttttttttgttttgttttgtttttgtttttgtttttttggtctcttgactgtaaaaggctgaagtgaaactcccaccttttcatttgcacaaaaaacaaaagtggcctccattgctgtgagcctctcaagggacagggctgagcacccaggcttgtacaaagttgttcaggaagtcggcagtggagctcgggtgtgaacccagttgcccaccctcaggccccacccaagagccccacgaacaaaccctcagtgactcctacctgtctatacctggtgtaaccacacacacacacagacacacacaaacagacacacagagacacacacaaacacacagacacacacagacwcacacacacacacacacacacacacacacacacactctctttctctccagcccaggagggggacttttgttcctataagaggaggaataaatcacactacaaatgctttgggtgacgcacttggggcccgagtcctgctctggggtcagtggtgctgtttttcctgtggcctcagctctggatactgtggtggcctctccaccaaggtttctgtccttgctgtgtaaactctgccccagacaaggtgacagatgacagcagaagtcaaggagctgtgcacgcctgcccgtgagtgtgcgagtggcatggctcagctggctggtgcttccctttgggcctggcccccgcctgccgctggcacagcacagggaagacgtgtgccctcctggctgcctctccccctccacactctcctcagatctctgtgcctcgcactctggagcaggcctcggcgctgccccatctgccccaggggatttccagagtgagctcaggcatctgcaccggctgtggaagcgctggctgtcggaagcggctcccagtttcctatccagctgagccaggctgggggaggagtggcggggacgtctgcgcctgcccaagtacaggctgacctcggcggtggtggtggctaggcagggacagctctcagggcacgggcggcttcacagggaaaccaagcctgcccggaacgtcgttttgcctcccaggagacctaggatgggtgtaaggaaaaacacatcttccgggaagtacaaagcgccaccgtgtccacggcccctccttcagcaaatgtatccgggcgcccagctgggagttgtttgtggtccaaaagctactggaaggcagttccagccccagtgcccggctcctgcaggaaagtggtttcagccaagtgggcagtgcaggaggtgggccagagacactgtttggagtgtgaggggaaccttgtgaccagcagaaaaggatggaggaggattccaaacttcaggagctgggccaaggtccaggggctgctgggcacagtcgtccatgtgtgtgctcagtaggatgagttcacttaattagtctgtgcctcagtttccccagctgcacagtgggctcactaacagtaatctacctggagggttgtgtgaggtgaggactcccgtggtaaaggtgtgcagcctgcagtgcagtgcccggccatggcaggagcagtgcggggagccatcgtgataatggtgttagggtggcttcaggtaggggcgtggctgccggtccatggcacagacttgggagatggccgaggccctgcctcgtgggctgtcaaggactagatgggaacacgcatatggagcagtggcactgttgttattgttattctgtaggagtggctgtgtctggggtagggggacctcagtgccttgctggccaagggaagtgagggtgggtttccatctgggcatgaactgctgacctctgcccaggggttttcctggcctgccagtgtgtgtgtgtcactgacagtggggtggggggcagctcatggagttggtgcccctcagctgtgctttccctggcgtaggttcctggggctgggagcagggtaaagctgcctcaagtcttggttttctcctctgcctcccccgtgtggccgccaaccctgtgccagcaggtggtgcggggatggcttcctgccccggtctctggcaagaaacccttttccctctcccagtgggtctccccaggttgtcagctccatttagtcataagaagatctggggccaggcgcggtggctcacgcctgtaatcccagcactttgggaggctgaagcaggcagtcacaaggtcaggagatcgggaccatcctggctaatacggtgaaaccccgtctctactaaaaatacaaaaaaattagccaggtgtggtggcatgcacctgtagtcccagctactcaggaggctgaggcaggagaatcgcttgaacccagaaggcagagcttacagtgagccgagatcaccctactgcactccagcctgggcagcagagcgagactccgtctcaaaaaataaaagaaaaaaaaaagagatctggaagaggagggttgaggatctgctgtggggtttggagtgggaacaggactttgaaccctggcctaagccccttttgaccttgccagcccgtgaggatgatgacagccgcctctcacccttagcctcaactaaatgagatcatgtctgtaaaagtcctttgcaagctgagcagtgctgcccaggcagttaggtgctgtcccttcttcatgaatcaaaggcctttgcatgcaggactcactccagcaccccaaacactcagagtcctcacccgttctttttctcctgcccctcaccagttccagggtggcaagaggctgcagagtgtggaggttaagagcgcgggaccctggctggggttgtagccccaccacctccctaactgtgggaccttggacaggtgacttcatctctctgagcctcagtttccccacctgtcgaatagagatctgtcccctgtggggctcgtggctcagatagagactaagtgagcgatggtggcagagctcagccaggaataaaagaaacttccaactgggcgttgggtgtgtgccaggcactgtacattcatatctgctgtcatcttccctggctccctccgtggtrgggcatcaacccatctcacagcagaggaggcaggctctgcagcacccacttgcccaaagtctcccagcaggtaggtggcccaggcaggtttgagtcccatctctggccccttattcctcctcattcctcagcaagagagctccacgctgccccgaagcaaggtgtgggccataagcacgtggctttgcaggcctgcttgggacaagcaacctggtgtccccgtgtcctgaaaccctggcagtcactggggctagggccagcctcttccctgggaagcagggagccccagggcaacgttctgggaaatcaggtttattagttccttaatgaccgtttacaagctcagaagtgtctgcctggcattttccctccctgctgaggggctccatgcagccggaggcagaactgggcctccagaagcgctctgagtgtgtcgaggtgagggcccagggatgccgtcggctccctgggctctgcatgctcacacccagccagtccaggcctatttctggctgggtggcactgggcaaggtgcttacctctctgtacaataggtgagaccttgtacctcagctgagctgttcctggggtgagccctcgttcatggtgacaaagtcacatagatcttagaccctgggaggatactagcatcttatgcatacacaaactgaggctcagagatgttaagtggcttgcccaagatcgcacagtggttagagatgggcctrtgaccctgtcttctgccatcgggacagattttcactgtctggaggcaggtggaaaccgggtgggctcctactttgtaagcacaggacagtgccctgtctgtgtacatgggacagtcacaaacggaaatggcctggtcacaccttagtgtcaaggagcctccagcaggagtgaaacggacctctcacacagaccccaggctgcatctcatcctgccccaaccgctgggcttgtgctggaccaccactgcttccaaggacccgtgaaaacccggctgccgggatgcagagaggcagactttcatgaacgtttgcagcaaagggcagttcccaccgagcctgtgttgctgtggcactgtgtggtgcacaccccaccccggaaaccctccagtgtcctggtgtctgaccccaaatggacagggccttttggcccccaggggccacttctgactcctccccttcacaacgatgctgagggagcaggagaactggggcccggctgctgtgcgtgcccccttcccttcattgccccaaagcctgcagtccagccccaggctcgggagctgctgcctcttccctgggatgtggaaggcacctgcatccccgcccagctgctgccacttgcctgcctccatcagcagctttgttttattttgtctgtgtgttttttgagatggagtcttgctctgtcgcccaggctggagtgcagtggcgtgatctcggctcacttcaacctccgcctcccaggttcaagcgattcttctgcctcagcctcctcagtagctgggattacaggcacccgccaccatgcctggctaatttttgtatttttagtagagatggggtttcaccatgttggccaggctagtctagaactcctgacctcaggtgatctgcccacctcagcctcccaaagtgctgggattacaggtgtgagccactgtgcccagcctccaccagcagcttttgaaatccagaaatttccaggggagggcactgtggtgggtggggcccagcgctgtgtccagctcgaggcctggctgcactgccacctcctttggtgcccaccyctgtgtcttgccagcagctgctgcacattgggcttyggggatgcaggactccagcacccccagctcagcctgcttcctggaccaggaaccccagccgaggagggggcatttgtatctctgccatccctgctggcaactggtcctgagaaagcccagatggttggtgcagagggggcgtcaggggctgcaccaccctaagaacatgacatgtcaccccccagccccccgcaacacacacacacaggttcacacctcacacccctgatcttggcggctccctggagcacagcacccgcttcccgtgtctgtggttggcttatgacgccccagccactctaaccgggttaaggggagcccagagcctggggccggataggaaaaagcccagagaagtcaggggatggtcagtcccctgaagctgcccctgggggttcttgatcttctgaactgagttcgaggcaagccctggaggggcgaggaggagaaagaaacagctctctgggccaggacccgctgttcgtgggatgtctggggagctgtgtgaacccacaggccgttttgtttctctccatcagcagctgtgggctgaagcgtgtaccggcrgagtgggttgagatcgtgtctgcgcccacttgccaccagctccggcctctggggaggtggtgctgagagggagggagagtggctcctgtttggctcctggagacagacagctgggtgtcccaccctcagagtccccagccccctctcccctctgctaactctgccggtggagctcacgccgcagctcatgccaaccctgcccttctgttttgcctctcatgactctccccaaattctgcccccaggcccccagccagccttcttgccactttcctgccctttactcttgccccttctacctcttgccagggcagcgtcactggctacgtgaggcccagcttggggatgcatggggaggtgtaagaacagctgtgccatgagctgtccttccgggcctctggggctggagaaaccccggggtcagcagtaccacgggttttgctggggattgcacagtgggtgaggctcagcttcctctttgcagctttctaaaaatgccctggttcccagcagggccacaggcagggaaaatgagtttcagtttctgtggcaagggagctggggagagaagcagtttccttgtccccagccctcaccctagcatcctgtgattcagccgcgaagacgtggccccaagcctcccaccgccctccttctgtcctgactgcccactcccagggacaccaggtgacgcctcgcccacccgcggctccggagccaggctggaagcagcttcccgcccagggggtggtttccccacatcctgtcttcagatggcttgagccccctaaacttcctggtcatatccagtggataataatggtctccctctttcctgtctggaggggagggggctgcttacttcttatccaagggcctgtcccgtcccacccctgtgtccccatttctggccacacgcaggctcagcccttgcatcaagcctctgcctgtttccctctgggctgcacctgtcacgctctccctgccctgccccataaagcccatagakcccagggcttgtggggactgcacccttcattagcaagactcagagcttctagaaacccacttgtgtgggggtggggagtgcagggagattggtggcaccaggtggagagagggaactgcacctgggggagttgggaggggcagtgggctgggcccgcgtggaggagtgtggcttgtacagtccgcatggcggggggacccttgtaccctgcctggactggctggtagagctgttggggacctccctgggggtggccttgcttacccagctgtgcggaacaggcttggttgggagtgcctggcctcaccctttgtggggaaaccagattctctgggcagcagtggtaaatggtgtctgagtctgtgtttcgttggatgtgtctgaggtccgctgctgccagctgggttatgctgtctccaaagctatctgcagtggsggaggccctgagcctgggcaggggagggtacagaggcctcaacccatgggacctgggggtgatctgaactctgcacttcactttttttcaggatttcccccgccccaccctaaaggaggaggaaatagagtctgtcccaccctaagccccagtccctctccccaggtctctttggcatctcccagctggkctggggctgaaggcccttctctggggttggccacagtgaggccaggatctggctgggcaggtggcagtgttccgcctgtgggctgggtgcggaggcgggcctgggggtcttagagagagagcggcggatgtgactgcgggccaggaggaagcctggtcccaggatgtcaccatttcccctgcagtgagcaagcatctctagggctcggagataagtgctgggtggggtagctccagctctccagcgcttttttctgtctggttcctgccatctggacttgagccatgaggaaggccagagtgggtctgacagtccccactcctttccccgctgagccccaaggaaggggctgggcctttgcacccccaccccaacttctgcacgagttggaggcagttgatctcaatggtggaaagtggctggtgcaaagtcatgcttccatactccatgtttaggcttcrtgggtgtcaaagctgggccgtgaccttgtcccattccctcagagaagggaactgaggccagagggtggagctgctctcaggccgctgcccaggcctcttgtgctctgcggttcagatggcactcccgatgccaggctcctgcccaggaagacatgcccacccgccctggccctgtctctgctgtctggtgtcaggccacctctcttcgggacccccccccaactgattgccctggggctgaccaggctctcctctccctcagtgttgggttttgggagcctctctcatcaggaggttggcacagatgccagccatgcagcggatcctgggcaggggtctcagctgggatggcctggccttgggacagggaggctggctgggcagaaccctagaaccaaaagcggtgcctgtggtgggctagggagctaggtggggagtctagtggggagtctagtggggaggtccactagacactcgttctggcacagcatgcagcgtcctccatcctggccctgctgtgggtacggagccagcagggcaggagctctcagtggagccctccaaagagggctgcttcctggaccagctgcaggatgagggagaccmcttctgtccagggctgacataggctgaccaccgccagccccaccctctcactagcttcccattcagttagccattgatgagggctcactgggtgcaggatcctgggctgcccggggttgggtaggggactcctacatgtaggtaaatccgcgagatgctggagagagcaggcaataaagtggttgattctctctggaggtgacattttactttcctagtagggcttggccaggcaggcaaggtggagcctggtgtgccaggcgcagcgcttcagatgagaggaggtgagagcttggggatggcacagggaagtgttttgtctggtgagggtgtggcagggagggcaggcctgaagggacctccagggaggtgtgatcagatctgggttccagaaagatcctacctgcttggcgaccttaactgagctggagtctggaggccccacccttgcacccagctgcttccactgcttgcctcccatcccccagtgccagttccccagggcagtgccctccccatgccctcttggtgtaccctggtcccaaaggaggccaagctatgaacttttcttgcagaggtcccaggtgaggctgttgtcctggagctgtccccagagcaggcttaggatgaggggacctagccacagcttcaaccgagtggggtcccggtgtggctgccagggctccttggcaccaacccagcccagtgggttgatctctgaggacctcgtcatactcagccgggcagtctgccctggggggtggggtcaggactccccagcacttygggatggaaggaggcgaagccagcgctgctggactagccttaaagaagcgggagacatcctagctccgcctcaagatttctcctctgcacccagcattctgctccccaaatgtcccaaatatgcagggggtcaaggaacattgctcagtggaatcaatggggagcgtgggctactccccagcctctggtttgccccatagcagccccttgggcaccgctggggacccccaggcctctgaggagcttggtttggaaagcgctggaatgctggaccaagttccctctctggctccctgagagggggtcttctagccccagtcttagggcaagaggagcccgtcccctaggagcctccaggccctggagccagacatcgggcgtcctagctacaccctttcctggctatgtgagcttgggcaagttaccgaacccctctgagcctccattcaccatctacagaatggaagagacgctaatgtcaccctggaaggtgttttgaagggtaatgtgtgtaaagggccaaacaaggccccrcacagttaaggacttaatcctgcccggccccgggagggcttccggcatcttggggttcccctcaaaggatggcctgggcaggacttcttaaaaacaaacaggcggctgggcgcggtggctcacgcctgtaatcccagcactttgggaggccgaggcaggcggatcacgaggtcaggggatcgagaccatcctggctaacatggtgaaaccccgtctctactaaaagtataaaaaattagccgggtgtggtggcgggcgyctgtagtcccagctcctccggaggctgaggcaggagaatggcgtgaacccgggaggcggtgcttgaagggagctgagatcatgccactgcactccagcctgggctacagagcgagactccatctcaaaaaaaaaaaaaaaacaggaatgcccctgggtttcgtgctttaaaatggttgattttatgttgtgtgacttttaagttcaataaattaccaatcaaagcaacaaaacacttccagatcatttgaactttgccttaagtatcagaaggcagttagtaattcctggactttgaatgttaaatatgtggggttcttttgttttgttttgttttgtttcgagacggagtcttgctctgtcacccaggctggagtgcagtggcgcgatctcggctcactgcaacctccatctcccgggttcaagtaactctcctgcctcagcctcccgagtagctgggattacaggcccaccacacccagctaattattttgttgtttttggttttggttttggttttgagacagagtctcacactgtcatctgggctggagtacaatggcgcgatctcggctcactgcaacctccgcctcccatgtttaagtgattctcctgcctcagcctcctgagtagctgggattacaggcgcccgccaccacacccggctacttttttgtatttttagtagagatggggtttcactatgttggccagactggtctcgaactcctgacctcgtgatccaccctcctcagcctcccaaagtgctgggattacaggcgtgagccactgcacccagccccggctaatttttgtattcttagtagagacagggtttcaccatgttggccaggctggtctckaactcttgacytcatgattcccccaccttggcctcccaaagtgctgggattacaggtgtgagcgcctgcaccckgcccaaaaatatgtggttttgtttkttttttgagrcagagtctccctctgtcgcccaggctggagygtaatggcacaatctcggctcactgcaacctccgcctcccaggttcaagcaattctcctgcctcaacctcccgagtagctgggactaaaggtgtgcaccaccatacccagctaacttttgtatttttagtagagatgggtttttaccatgttggccaggccgatctcgaactcctgacctcaggtgatccacctgcctcagcctcccaaaatgctgggattacaggtgtgagctactgcccctggccgaaagttaaatgtttctgttctgttcaagtaatattgagaaaaataacaggggccatcttgactctaatgttctgctccaatcaggttcccagaccagaggactgttgttaggtgattggctgtgaacrccctgaggccagtgcccctcgctgcttggcactcggagatgcctgattagcacctttaatcccttaccartgaggcaggtggaattggccccattttacagatggggagactgaggtgaggaaggttaaagcactcagtggtgggcatgccccctggagccggccctcctttcttccagctgtgagtacccaggaagctgcaccgtgtggcctggagctgtctatctgtccttccagccacctgtctgtccagccacccttccacagactgaggcttgacaccggagcatctgtacagagcaaggagaagacaagaacatgctctaaagcccttcacagcaagacccaggaagccgcgggcaaactcagactcgaaggtaggaagctgggcggccgggtggctggacccagggcgctggctgctgtgcccacgtccagatacctcctgcggggcccacgctctctgtctgaacagcggtggacagtgaatgaagaaagtcaattcagggagcgagagggaggaataagggcagggaagggacgggcgcggtggctcacgcctgtaatcccagcattttgggaggccgaggtgagtggatcacctgaggtcaggagttcgagactggcctggccaacatggcaaaaccccatctctactaaaaatacaaaaaatttagctgggcgtggtggtgcgcgcctgtagtcccagctacttgggaggctgaggcaggagaatcgctcgaacctgggaggcagaggttgcagtgagccaagatcatgccactgcactccagcctgggctgcagagtgagactacatctcaaaaaaaaaaaaatttgccaggcatgctggctcacgcctgtaatccaagcactttgggaggccaaggcgggtggaggccaggagtttgagaccagcctgaccaacgtggagaaacccagtctctactaaaaaatacaaaattagctgggcatggcggtgcatgcctgtaatcccaactactcgggaggctgaggcaggagaattkcttgaacccaggaggcggaggctgcagtgagctsagatcgtgccactgcactccagcctgggcaacaagaatgaaactcagtctcaaaaaaaaaaaaaaaaaaaaaaaaggcaggaagcgaggtgggaccggcactgctcaaggtggggcaggagggcacttgaactgcaaccaggaggctgagaagagccagcccctcctctgtgtgatggtctgggacagagtgactggctcggacagaggcccaacattatggagcacctgcttcattgagagagaattcacacaccagtcgattcacccatttaaagtgtaccatcagtgtttttatttatttatttatattttgagacagggtctcactctgttacccaggctggagtacagtggcgcgatcacggttcactgcagcctcgaccttcctagctcaagccatccttctgcctcagcctcctgagtagctgggactatatgcacgcaccaccatatctggctaattttttaatttttttatacagatgggatctcactatgttgctcaggctggtcttgaactcctgggctcaagtgatcttcctgcctcartctctcaaattgctgggattacaggcatgaaccaccgctcccaaccttcagtgattttgatatattcacagaggctgggcatggtggctcacacctgtaatctcagcactttctgagaggccgaagcaaacttgaggtcaggagttcgagactagcctggccaacatggtgaaaccccatctctactaaagatacaaacattacccaggcatggtggcttgcgcctgtagtcccagctactcgggagactgaggcaggagaatcgcttgaacctgggaagtggaggttggcagtgagccaaaatcgcaccactgcactctagcctgggtgacagagcaagactctgtctcaaaaactatatgtgtgtgttgtgtgtgtgtgtgtgtgtgtgtgtacatatatatacatattcacagaattgtgccacyatcaccacagtttcagattgctttcatcaccccctaaagaaagcctgcaccctttagctgtcacccccygcccagtccccaccttcccagtcctaagaaccactaccctgcttctgtctatagatttccctcttctattccgagctttcatatgaatggactcatgcagaggtggccatcgtgactggctcctgtccctggacacaatgttctcaaagctcgtccacgttgtagctttgttaggacttccttccttttgtggctgaaggatgctccattgtgtggctcaaccacattttatatttgtgccttcatctgctgaygggcgcttgtgctgttttcctgctccggctctgcagagccgtgctgccgggcacttcctgtccaggtttctgtgtggacacagtgcttcagtgtgtgaagccatctgctcattttttgttgttgtttgagacggagtctcactctgtcgcccaggctggaggcctggagtgcagtggcgagatctcggctcactgtaaccacaccccccgtcctgggttcaagtgattctcctgcctcagtctcccgaatagctgggactacaggtgcccaccaccacacccagctcttttttttttttttttttttttgagacagagttttgctgttgttgcccaggctggagtgcaatggcgagatttcggctcaccgctaactccaccttccaggttcaagcgattctcctgcctcagcctcccgagtagctgggattacagggatgcaccaccatgcctggctaatgttttttgtatttttagtagagataggctttctccatgttggtcaggctggtctcgaactcccgacctcaggtgatccgcccgcctcggcctcccaaaatgctgggattacaggcatgagccaccgcgcccagcctaatttttgtatttttagtagagatggggtttcaccatgttggccaggctggtcttgaactcctggccttaggtgatccgcccacctcagcctcccaaaatgctgagattacaggcgtgagccactgtgcccggtgacatcatccactcatttgctcctccagacgcttctctggggaggaaccgttactctcccccttgtgcaggtcaggacttgggtgatgagttgtcaggtgactmacccgacagcaaatgcaagaccattggcccagtatgcgctgccggctccattgcttttgatcatgaaccccacccccrgcagagcttggccagtttgagacaatgaggggcccaggaaagctgggtcaggggtaagcaagggcacaggaagagacgaagagaggtcctggaagtcccagtgagacgtttggactttgggtgagaacaggaaatcctgggagagagttgagcagggaagcaacaggtgtgatctrtgcttttgggaggtgaccccagctgcggtgcggagaatgatcagtctcagggggcttgaggcagcaggtagaggaattgagagagtggagtgagcctccaggtgaggagatggtggaggtgaggtggagatggtggaggtgaggtagagatggaggaggaggacaggttcagatggctgctgtctcgccgacccgtgcatgccacgcctcagcccacacacgcccttggctgaagggctcccagggagatgggtatggagtccctggcttcgtacaaggagaggaaaaacaaaacttgcccaggaaccttgggatgtgaaggagaggaaacagctgrgggggtttatttttatttttatttttatttttgagacgaagtttcgctcttgttgcccaggctggagtgcaatggtgcaatctcggctcactgcaacctctgcctcccgggttcaagcaattctcctacctcagcctcccgagtagctgagattacaggcatgcgccaccacacccagctaattttttgtatttttagtagagacggggtttctccatgttggtcakgctggtctcgaactcccgacctcaggtgatctgcccaccttggcctcccaaagtgctgggagtacaggcatgagccaccgcgcccggccacagctgggggttttaacaagaagacggtcatggggcagagcaagagacgaaacgaagagaatgaaacaggcagagggtgttaattctggtggagtcagaggggaactggggactggtggcacacgcacaggaaagccccagatggggtactgggcaacagccactgaaattygggatgtacttactcttcaacccagccattctgcttccagaacttggtcttgtaatagttaaacaagcacacgcrgtgtatgcaagggtgttagttgcaacatcagacccatgtctcaaattccggaaacatcctaaataaccagcagtctggacttaagtaaatcttggtgcattccacttatgaaatctttgcattcatcaaaaaagacaagaggcctagggccaggtgtggtggctgaaacctgtaatcccagcactttgggaggccgaggcaggtggatcacctgaggtcaggagttcgagaccagcctgaccaacatggagaaaccccatctctactaaaaatacaaaattagctgggcgtggtggcgcatgcccgtaatccgagcttcttgggaggctgaggcaggagaatcacttgaacctgggaggtggaggttgcggtgagccgagatcgcgccactgcactccaatctgggtgacagaatgagaccccatcacaaaaaaaaagaaaaaagaaaaaaagtaggtctgtccgtatgtgttgacagggaaagatgtctacaatgcaggtaaaatgatagagtgtgggctgggcttggtggctcacgcccataaccccggctacttgggaggctgaggcaagagaattgcttgaacctgggaggtggagggtgcaatgagattggctcacagcaatctcttcctctcgggttcaagtgattctcctgcctcagcctcccgagtagctggaactacaggaatgaggcactatgcctggctaatttttgtattttagtagagatggtgtttcactgtgttggccaggctagtctcgaactcctgaccttaagtgatccatccaccttggtctcccaaagtgttgggattgtacgtgtaagccaccacacacggctgtgtgattttttttttttttcaatgagcatatgccacttttattgttaaacagtgttctcactatgggggaaaaaagtgccagacaggtggcagtttcagttatcttttttttttgagacattttctcactctgtcgcccaggctggagcgcagtggcatgatcttggctcactgcaacctctgcctcctgggttcaagcaattctcgtgcctcagcctcccaagtagctgggattataggcatgcgccaccacacctggctaattttgtatttttagtagagacagggttttaccatgttggccaggctggtctcaaactcctgacctcaggtgatccacctacctcggcctcccaaagtgctgggattacaggcatgagccacgcacccagccagttttagttatctttgaaaaatgaactggggctgggcacagtgagcttgcacctgtaatcccagcacttgggaggccaaggcaggcagatggcttaagcccaggagttccagaccagcctggctaacatggagagacccccacctctacagaaaaaagacaagaaaaataaactgggtggccttgggggacagggaccagcacagtaggtttctcatctctcggcccacctcggcctccccaagtgctggtattacaggtgtgagccaccgtccctggcctgcatcttcatgctcttttcagggtttggttcttgcctcaagcggagagatcagaaattgaatgaggtagtaagttgaggacctcccagacccatatggtccgggatgcaaatgatggtcagaaatagacctcactccaaccactgggcctgaggttcagcctggttcaggctgggtttagtccccagggatggtttgtttttggttttgtgtgtgtgtgtgtgtgtgtgtgtgtgtgtgtgtgtgtgtgtgtgtgtgttttcagacagagtcttgctctgtcgccaggctggagtgcagtggcgcgatctcrgcttactataaccgctgcctcctgggttcaagccatcctgcctcagcctcccgagtagctgggattacaggcacgtgccaccacgcctagctaattttttgtatttttagtagagacggggtttcaccatgttggccaggatggtctcgatctcctgacctcgtgatccccccacctcggcctcccaaagtgctgggattacaggcgtgagccaccgcgcccagccgcccagagatgtttgaaccaactttaggcaagttggttcttggtctgggctgcgtgccctggcrtcagggtcctgacactgcgccaccccgcaccgcccacygctgctctcccggtctccattccagccctcccrcctcctgcccacaatggcctctgctgacaagaatggcgggagcgtgtcctctgtgtccagcagccgcctgcagagccggaagccacccaacctctccatcaccatcccgccacccgagaaagagacccaggcccctggcgagcaggacagcatgctgcctgaggtaagggggctggcctgggggctcactgttctgccgtaggtaacagatgtacccacgtgacactttctggtcagtttcacttcccagaggggctccttcctgagccacagctgctgyctgtgcagcccttgactcgggccctaccccctccttcctgggcccgaaatatcacagggagtaaagccaggaaccgggctcactctcatcgtggtcaggggcacacaggaagggccagccccaagaaagtgcttgctrgtaaccctggggccctggctgttytcatttcaccccctaggcctggactctcagtctctcttctgagggctgggggctttctttgacatgggtgagcaggggayagtgtctccctggcatcagcagcccgcctaggcagtgtccgcttcctttgggaggacgagaacrgatcrgtgtttctgacagtctggtctagtgccccataaagagctcattgaaaaccggcttgtggcagcgtgggcttcctgcacagtctggagtataaagggaagcratgttaacgccccccgttcacccgagagctctgcagaagacacagcagcaggcaggagcgtcatggtgcagaggggagggactggatgaggagttaggaaaacacacgctggccttgacggagaaaagttagacaatggcgattttaaattcagaatgaggctgggcgmggtcgcctcatgcctgtaatctcatcactttgggaggctgaggcagccagatcacttgagcccaggagttcgagaccagactagacaacatagcaagactctgtctctgcaaaaaaaattaaaaaagagctgggtgtggtggcacatgcctgtaatcccagctacttaggacactgaggtagaaggcttgcttgagcctgggaggtcgaggctccagtgagctatgatggtgccactgccctccaacctgggcaacagagcaagactctgtcccaaaaaatatatatataggccgggcatggtagctcatgcctgtaatcccagcactttgggaggccgaggcggccagatcacttgaggtcaggcaggagttcgagaccagcctggccaacatggtgaaaccccgtctctactaaaaatacaaaaattagccgggtgtggtggcacatgcctatagtcccagctactcaggaggctgaggcagaagaatcgcttgaacctgggaggcggaggtgtcagtgagtcgagaccacaccactgcactccagcctggacaatacagtgagattccatctcaaaaaaaaaaaaaaaaaaaaaaaaatatatatatatatatatatatacatatacaaacacacacacacacacacacacacacacacacacattatatatatatatttccaaatgaaagcaaattggggcataaatsagggttgaagtttgttctcagggttttcagaataggaggctaaagaaaagccagcccaggacctgggctkcacacaccaccgcctgccctccctccttcctccccaagaggaagaacccagcctacttgaagagcgtcagcctccaggagccacgcagccgatggcaggagagttcagagaagcgccctggcttccgccgccaggcctcactgtcccagagcatccgcaagtgagcccccctacacccaagcccagcaccccccacccagcaacctgtggattctcggggcctggacatgattgggcctggtccctgcgtcccctctctggaaggaggaggccggcattaatgagcaatgtctccctgtggcctattatcatggtatagatggggaaatgggtatgtgctttgcggaatatcacggtgtggaggctggggggcttcgaggagctgggtggatcagtgtgggggtgcctggggccctagcctggctcctcacgctcccgtcatcccctgcttctgctcatctggtcactgggctccagccaggggcctcacaggcagatccgccccccacctccctgtaggcacgcgggcacacacgtgccatcaccccttccacacactcaggtgyacaggcgtagacaagcgtatgcccacctgtcccttgtctgcttccgcaggggcgcagcccagtggtttggagtcagcggcgactgggaggggcagcggcagcagtggcagcgccgcagcctgcaccactgcagcatgcgctacggccgcctgaaggcctcgtgccagcgtgacctggagctccccagccaggaggcaccgtccttccagggcactgagtccccaaagccctgcaagatgcccaaggtgggatccatggggaaaggaggcaggggtggggaccctaatggctctgcttaccgcccccctcccttccagattgtggatccgctggcccggggccgggccttccgccacccggaggagatggacaggccccacgcccygcacccaccrctgacccccggagtcctgtccctcacctccttcaccagtgtccgttctggctactcccacctgccacgccgcaagagaatgtctgtggcccacatgagcttgcaagctgccrctgccctcctcaaggtgcggggctccctcctgcagggcccccacctctgcccggcctcccttccttgcccctcccttccactcctcatagtagcatcccctaaagctcacctgggcatctgcctacggtgccaaggacagtggatgtgctgggatccctgggcaaagagggaccccgaagcccagcacccaggcgtccatccttctgtcttaaatctcgtgtgaccccctgccaagttttggaacctggtctctgcactgactcttaagctggggaagtgggaagtgagatgcatacttgctcctcatccacccgggttttccaagtccctgttacgtgctgggcaccgcgtgcagagccatcgccatcctggctgagctcgcagcccagggtgagggtcaccattcagggtggtcagtttaggagagcggctgttatcagggaagacattgagttaagcccagaagacacaaggagacgttcactagggaaggaagggaacagcattctcagcagagggaatggcctatgcaagggccaggagcccagaggaagtacagtgctttgagggggcagcaggcggtttgatgtggttttagtgaggggtggttataggagctgtggcaggagatggggtcagaaaggtgggcagggacctggtattccgtgccaagaaacagggacagggagacatggcccaagcctcgggagtgagggtatagaatgtgggttgctttgagtgttagggtaccagcagcccaaggcagaggggcagcagggaccaagggaaaggtgactccaaactgtgccaagagtggtgtgccaacggaagctggtgtctcatttcctggccttccagtctcaggagctcctcttgcccgttcagcttgcagaatctccacgctttgggcaggatccctcctcccaaggcgctgcctgcaggcggatgggcttgatgattccttcggtgttggggctgggggcctaggtggccaggctgtggtcctgatggctgtgcctctgcccgtgcacaggggcgctcrgtgctggatgccaccggacagcggtgccgggtggtcaagcgcagctttgccttcccgagcttcctggaggaggatgtggtcgatggggcagacacgtttgactcctccttttttagtaaggcaagcatggggtgtgggacagcaggagttgggtggggtggcctgggagctgggtgaggtgaccttggcattgatcatattcaggaacccctgagggacccagaggcccactgctgggatgtggcatggtcctatgtggagctgctgggcccccatctttctgttgggtagggtgaagacctgcggtggggcacagtgccacccgggaaagtcaccattggggctgacgggcatgtggcttcccaattcattgtgaagagcccgtctgttcagctgtgtcctgcccttgaattgaggttccggggggcagtgtttgggacagactccttacactgtattttcttgtcccccaccccaggaagaaatgagctccatgcctgatgatgtctttgagtcccccccactctctgccagctacttccgagggatcccacactcagcctcccctgtctcccccgatggggtgcaaatccctctgtgagtgctggggcagagtccctcctccaggccagccaccagcctggggrcatccccagacctcaccctggcccccaagccccttctgagcaccctggtggggtctgggagtattttggtgggggattcaggctgaaagccaccatccccaccaggaaggagtatggccgagccccagtccccgggccccggcgcggcaagcgcatcgcctccaaggtgaagcactttgcctttgatcggaagaagcggcactacggcctcggygtggtgggcaactggctgaaccgcagctaccgccgcagcatcagcagcactgtgcagcggcagctggagagcttcgacagccaccggtgaggtgtcgccctggagcccccaggagagcctggaaggttccaaattcctctgggccctcctgaagcgcccccttactcattcagcaagtgtttcatgagcatcttctgcggatcaggagtgtagtgacaagctcgaaggcgcaccctgtcccaagggttgtgcacatgacctgggaagggccaggggtgcttgctgcctctcttccaccccatgctttctgagcctggtccccagccttgctcccagacagcagtcagtcaacaaatgttcattgagtgtcactgcctgcaggccctaaaatggaacccccagagggtggagcagggagggcagggtcggtcagaggacagttagaagctggggccagggctgggcgccgtggctcacacttgtaattatagcactttgggaggctgagtcagaaggattgcttgagcctaggagtttgagaccagcctgggcaacatagtgagaccctacctctactttaaaagaagaagctggggctgggagggaggggactctgggagaggctatgcagagcccttggggaagaacagggcatctgatttgcagcagcccaataaacactgggcccaaattagaaaataacaagcaggcagggcgcggtggctcacgcctgtaattccagcactttctgaggccgaggcaggcggatcacctgaggtcaggagttcaagaccagcctggccaacatggtgaaaccccatctctactaaaaatacaaaaaattagccgggcgtggtggtgcatgcctgtaatcccagctactcgggaggcttgaggcaggagaatcacttgaacctgggaggcagaggttgcagtgagccaggatcgcaccattgtactccagcctgggcaacaagagcgaaattccatctcaaaaaaaaaagaaagaaaagaaaaagaaaataacaagcaatggccaggcccggtggctcacacctgtaatcccagcacttcgggaggcctaggtgggcagatcacctgaggtcaggagttcgagaccagcctggccaacacagtgaaaactggtctctactaaaaagacaaacaaaattaggcaggtatggtgggtgcttgtaatcccagctacgagggaggctgaggcaggagaatcgcttgaacctgggggcgaaggttgcagtgagctgagatcgcacaactgcattccagcctaggtgacagagcgagactctgtctcaaaaaaaaaaaaagaaaagaaaagaacaagcaatgataggtgtggtgggtgtcccggaggaggatagagagggagagtgaacagctggtggggaggggtgcagtcaggacaaactgtgatgtcatgtgcaaaggccctggggctggaagggcaaagtacatcccaggaaatgcaggcaaagaggccagagaggtggtcggtcaggcaaagctttgcagccagcaagagggggtgattctggaatttgtcccaaggccagtggaaagctatcaaaaggttttaagctaggagagagatgcttggaggctcgtcttaaaagttcctctggtttgagatgagttgacggggcagaacagggagcccaggcgagccatgtgaccaggcyagggtggccctgtggccgggactgggggttgggataggagctcggctcagctgacccgaggtgtctctgcacaggccctacttcacctactggctgaccttcgtccatgtcatcatcacgctgctggtgatttgcacgtatggcatcgcacccgtgggctttgcccagcacgtcaccacccagctggtgagtcgggtcaggctccatgctgggggtcccagcctctcctaggaggcctcagtgtcgtgggtacctaatccctcccaccgcaacaatctggccccagcagggtggtgctcaccatagcctggccccttcctggaggctctrtcctggggacagctgccccagctccccatgcccagggcccacactgttctgacgccctcctctgtgctacctccacgataggtgctgcggaacaaaggtgtgtacgagagcgtgaagtacatccagcaggagaacttctgggttggccccagctcggtgagggcccaggctgggggacatcatctgagccaggagtccctgtgccctgtcactcccagctgggcaggtgggctcctcacccacccrcaggcccctcatcaggggagactctgcggggcagaggtggagtgatggacccctcccaggtctggggctcaaactcactctctcccctccctttcccttccccagattgacctgatccacctgggggccaagttctcaccctgcatccggaaggacgggcagatcgagcagctggtgctgcgmgagcgagacctggagcgggactcaggctgctgtgtccagaatgaccactccggatgcatccagacccagcggaaggactgctcggtgggggcaggccctccctcctacccctgccagaccctggtcccggactagctccacttgccctgtccttcaagggyagtgaccacgttccctcctccccgccccacctttcccagacccccatagatgagactgagccctggggagatgggaaaagyctctgtccttgcccactccagtgggggtgacctggccccgrcatgacccaccagccttcttctgccctccaggagactttggccacttttgtcaagtggcaggatgacactgggccccccatggacaagtctgatctgggccagaagcggacttcgggggctgtctgccaccaggaccccaggtagggcctggagcctctgctgggcctcagggtcaggcatagccatgccatctgagccacccacagggacgtgggtaggtggacgtggcacgctgggtgtgccacagcccaatctgaaccctgtctccaggacctgcgaggagccagcctccagcggtgcccacatctggcccgatgacatcactaagtggccggtgagtgtcccyggcggggagtggtctgggaaggtcagggatgggggacctgcctgctgcacagcccacttccctgccggtgcccsctcctggcagatctgcacagagcaggccaggagcaaccacacaggcttcctgcacatggactgcgagatcaagggccgcccctgctgcatcggcaccaagggcaggtgagcgacctgggccctggcctcagccatcccactgcccccccgagctgcggcttcctgtgggccctctgctcctccaccgtcaccacccacagccgctgggccgatgccctccaataactgtcctttgctcccctgctctggggctacccatggtgcgagctggaggaaggaagcttgctccagagtcgaaggttctggatgcrgcatcccccttcctgccagcgatgcctcctgtagccaggtgctgggctctgggcaaaggtgggcagtggttattcggcgccctgatgtcccctcttgcctcaccacccccttagctgtgagatcaccacccgggaatactgtgagttcatgcacggctatttccatgaggaagcaacactctgctcccaggtgaggcgaggcaggcctggagtagtggaggagaggacgctgggcatggcagcctgctggggccggggctcacgcactccctcycatgtcggagcctcagactcagcctgcttctggggcgctgagcaccatatgcccactcccaggtgcactgcttggacaaggtgtgtgggctgctgcccttcctcaaccctgaggtcccagatcagttctacaggctctggctgtctctcttcctacatgctgggtaagaggctcctcactgcccccgaacccgacccctgtgatggccacccagccggacccctggggaaaggttcctgggccagggcatggccggcccaacctgccgaagcctactgctcctgaagtgcctggctgaaggccgctgcctggtgtgtccctcccccagcgtggtgcactgcctcgtgtctgtggtctttcaaatgaccatcctgagggacctggagaagctggccggctggcaccgtatcgccatcatcttcatcctcagtggcatcacaggcaacctcgccagtgccatctttctcccataccgggcagaggtaaggatgtggaggatgggaccccttccgcacatagggggccagccctgctgctcctattccacccacctgggatctgccagagggacacggtgcccctcctgtactgggctccacagcggagggacagctaatctgggggcttactggctggtctcttaatcccagtgagagggaacagtgatgctcttgagtcaccctgtccctccaccgccccatttatcttcctaaccgtgcccactgcctgacagtatgctaggtatctgcaggtcgagcggtaggaaatggcctccgtgcgccgtcggcagtctgatcagttccacctgactgatctagtttgttcagtgtccgtcctctccccaccgtgtgcggcctggaacaggcttgtctgtcttgcttattgctacggacccacaccaggcacgtacacagtaggcgctcagtgtttgctgaaagaatgggcggagcaggcccagctttggtccagcagctccagccgaccccctgcccctcagcctcaggggtccccatgcctgccagggaggagctgatcgatgggatgacccagggtgcaggcccggcccaggccacccacctgatgcctgaagccacgtctcccctgccccgccccaggtgggcccggccggctcacagttcggcctcctcgcctgcctcttcgtggagctcttccagagctggccgctgctggagaggccctggaaggccttcctcaacctctcggccatcgtgctcttcctgttcatctgtggcctcctgccctggatcgacaacatcgcccacatcttcggcttcctcagtggcctgctgctggccttcgccttcctgccctacatcaccttcggcaccagcgacaagtaccgcaagcgggcactcatcctggtgtcactgctggcctttgccggcctcttcgccgccctcgtgctgtggctgtacatctaccccattaactggccctggatcgagcacctcacctgcttccccttcaccagccgcttctgcgagaagtatgagctggaccaggtgctgcactgaccgctgggccacacggctgcccctcagccctgctggaacagggtctgcctscgagggctgccctctgcagagcgctctctgtgtgccagagagccagagacccaagacagggcccgggctctggacctgggtgcccccctgccaggcgaggctgactccgcgtgagatggttggttaaggcggggtttttctggggcgtgaggcctgtgagatcctgacccaagctcaggcacacccaaggcacctgcctctctgagtcttgggtctcagttcctaatatcccgctccttgctgagaccatctcctggggcagggtccttttcttcccaggtcctcagcgctgcctctgctggtgccttctcccccactactactggagcgtgcccttgctggggacgtggctgtgccctcagttgcccccagggctgggtgcccaccatgccccttcctctttctcctcctacctctgccctgtgagcccatccataaggctctcagatgggacattgtgggaaaggctttggccatggtctgggggcagagaacaaggrgggagacacaagtagacctcaggtagaacgacactgggcggagccaccccagggcctgctcccagggrgtgctcgaggcgcatcaggcccgttttttaccagtttatatcacggtcttcatttttaaaagtaacgctaactttgtasggacgatgtctcatggattaaataatattctttatggcagtacattgtctttaacggagacctcaggtagcatgaaactgggatttgggggtgaggtgaggggtcagccatcagccgctcagagacagcagtttggcccggtggacagcagaaaacttgtggagcatcttggggaattagttgggccagaaagcagattggggtcacgtgggagaccccaggggtccacttgggagggctgggttgaatccttagggccctggggttcccacccctacctgttctgccttggctccagagcagggaaggggctgcctgggcccagggtggcctgccctgatggggatggcactgaggggacctgtcaccccacccggggacgagtccactccctgtgccagtgcctcacccaccacactgaggacggccagtgaggcaccgggtatgaccacttgattaccatgggcagagggccctgcaccagcttccctgccccaagctgcctctacagcacaggcctcccgcctctgccccatcctgctgctccccactctcccccaccctaggggctaagggtgggaagcggcatccatgaggctggggagaataaggacaccccccccccccaccgagcaatgggctactgtgaggatgccgccttggtgcctttgcccacctgccaggaggaaaggagccaggaaccccacagcacctcccattgtccccgcttaccaacccagcccggtctcaggtacagagttcagaacacaggaggtccagaggcctcgtggggacagacaagacacaccactccagctcaggccgtgagaagccaccttatctcctctttatttagccctgctctctccactctctggaaactgctgtctccatgctcagctgagctaagaggagcccagggcagagacggggatcatgttggcagccaggtgggcagcccagttcagcagccgctgttcctgcgcaggaaggggtggccccgcagggagcagtggagctccatgaaggtgagggagcccacggtgatggcgcaggggcccacggcgtggaagctgaacctctcatagaagggtaccagcgcgtcctcgcacatgagcgcggcccggcgcacggccggctggctgcccaggtggtgcaggtagcgccacagcaggatggggcccctgccctgctgccggaaggcgcggtgcacggccagcacatgcaggtgggctatgtggcccccagacctgtgcagcgtcagtgactcctgggagcgagcaagggatgagatcccaggtcacttctgctgacacgtgctcccccccaaccaccaacccaggcagggagcaggtgtcccctgggtgcctgtggtcagggcacccaccccagcaaaggagggccccaaattgggagccatacccccaaccccatggagaaaacttgaagacccagaaggtcttgctctgggaggggcctgtggcctgtactcatctctccagttctggaggaagaaatcccagcccctgggctcccctccccgccatctggctgacctctgtcttcagaggcctccctggagctgggcgtcgcagccctgtcctcacctgcatgagtctctccttgtcccagagcgagccgatgatgaaggccacaaggcagccctcctcgaaccagcccagggacagctctggacatagggtcaggaagtgccggatctcatccaggtacagggggcagacgcccaagacggagatgaaggctgtggcaggaggctcaggtgggtgactggtagtcgctgtgcctcgcgtccactgtctgctgcaccccgagtgtccactcagatgccccgttccccacaggaaaatgggggttagggctgctgtttcccccactttcttgagcgcacacatggtctgatactctgggacccagcctccaaggacaggagactaagggtctcctccccacaggataactggaccagagtggagcatccctctgaccctgtgcggggccactcaccttcacgctcgatctcaaaggcgctgacagcgtcctccggggtgaggcagcgaaactcactggcagggagtgtgtggcgccgctgacagctcggggactcggggatcccaggtggcagacgtggggcctcaggtttcagggggtgggtgctctgcgtggacattctggccactggtgcctccttggggcgccccagctttggaagtgtcctcctaagccaaggagggcctcccagcacctgttggagaacagcaagggacaggggtctcatcctcatctccagggaggcaggccccagagtatgtatctggcctcttttgtagcaggaactggggtggagacagcccctaaatcaatgggcacattccccaggtacctggtccccgaggctgttaccaggcattgcaaacattggcactgtctccccacctttccctctcagccagaaggatccctggaggtttgccaccttgcagacctgcagacattggtctcagggtgccgtctgggtgcttctgagccccagagatggtggcagggatgagcagggctcagtggagcctggggcaccccaaccctgctgcccacggtgggaggggaggcaggactcgtgaccctccactgaccacgtctaatgcaactgtgcagtgggtgggcgcccggttcccccacaccaccattcatgtggtttatcttacctccccagagggaggcttctggtcctttgggtgcaagatcctgtggcagagagctttttaggtagcctcagcccttggtcctagagagccccttaatcaaagtgggcccttagggagcctctacttctatccagatggcctcagactgggccacacacatgcaggatttgtggtggggggtggggaggttagagggagccgggggctgcagagggcctggggaatggggaggagcaggcaaggagagtgcataggacaccccctgccccacacatccagctcatcagacattcccctctgggcactcttgtctcccaagacaccctgcagatttgcagttcttagaggaggccatccctccctccaccttccaagacacttaataaactccatggcttccatgtttccctccatgtctagaagctccaagtagagaagctcctgttcctaaaggctgagagccaggagtgggggtcccacctacctggactgtggagaggatacccagtgttccctccacaaagccgctagccctgggggcctgtccgcaggcacgggaaccagtaaaatccgggactccgggctgcaaggctgtagtagcagatgttccccgggcagcctgtggtgctgttagaggtttgtaatccccccaccccacctctcgagctatcccaggcaggatgacgccagcagggctctggcagcctcggcccctgccttgctgaagggaaacgtcagctctggtgccctgggcacagaagggattaccagaggctgactgaggccccagggtttggggaagagagcgtggggctaagcctcaggggtccatctctaatccctgctctgtcaccgactggctgggcaccagcgattctccctctgtccctcggagtcttggacaaccccacctcttatgtggggggagggggtgggaattcaagctaccaatttgtgcactttaagtacgttctacttcaagtttatttaaatatttaatttaattaaatatttaaatattcaggaggttgccctaccaaacatctcaactacaaagctctctgctattgaccttggctccacccattcccagggctgcccaggccttggcacttggtgctggcattccctcgggatgcaggcccctctccctgttggctctgactaccccctgccctccagctcacaccccatcctgcaccccttagctcttctctcgccagcacctgcctctccgccccacccagcagtgcagatcctgtgtccatctcgggctcctgggggtcctggaggttggatttcacaggtgcactcttttgaccccctgcagaggaagcttctgctcctacccacacagcttgggacggacctctgagggtccttcctgtcctggcagcctgtgagtgccactgcttacagcacttgctatgtgccgggccctggatacgcgtctcctttaatccacacggaagcccggccaaatgagtattaaccacgttatagagaaggaaaccgaggcacagacaggttcagtaacctgctcagagccatccaacaagtgaagggggaggggcaaagccgggtcagcctcctgacatgcactgccacggctgcactggtgggacccactcatctcacaatgagactcctgtttcctgtcttcatgattctcctgctggttttcagtgtcctcacaggtgcactctttcgacccccccgcagaggaagctcctgttcctacccatacggtttgggacacagcccctgaccgtggagtgaccccgtcccgatgcccccgcccacccaccacatgcattcctcctgtctctgggtccccttctcccagggcccctctgcactctgaggcccacctgcctgctagaagggaccctcaacagacctctcaggaccgaccagagacctccttgggcttggttggtggggtggtcatgtccaagacctcagctgggcatccccaccttcaacctccagggtcccccaaaaggcctcttctgtcccttcatagactgtggctccatggcaccccctggtggccaatcctaatcagtcacttggcgatgcctgagaagagcctgctgttcaatcggcctctctctttgctgacttccacatggccctgttctttccggacaacaccctagaggtctagaacctcagggaacaagatgaggcagtaagccaggcacagtggctcaccgctgtaatcccagcactttgggagacagagacgggaggatggcttgagccggagaggtcgaggctgtagtgactcgccactgcactccagcctgggcgacagagcgagaccctgtctcaaaaaaatacaaataaaaataaattttttttaaagatgaggcggtatgttaaacatggtgaaactgggaagttcaaacccttgtgggacaggagaggagacaggggagggcagggtgatcgctgggacctttgtcctggtcaacaggaagaaaaccacataccaccaccaatgagaaggaaaataaggagggtgaggggcccaacagggtgatgggtacagagagaaggagatccctggggctgggcatagtggctcacacctgtaatcccagcactttgggaggccaaggcaggaggatcacttgagcccaggagtttgagaccagcctgggcaacatagcaagacccctgtctctacaaaaaatttaaaaatcagccaggcatggtggcacacacctgtagccccagctacttgggaggctgaggtgggaagatcacttgagcctaggtggttcaggctgcagtgatgagccactgcactccagcctgggtaactgagcaagatgttgtctcaaaaaaaaaaaaaaaaaatcctgacctcaggtgggctctaaaaaagaagcacctccgagatcatcctcacgccagggacaccgattgcactgtttatcagatgcccagtcttgtcctgctattgcagttaagagtgctggcaacgcctctggtgactgcctctcaggtggatcttggggatgggggggagaatgtgtcctttgccccccaagtcgtacctgttcagtcactctagacagctgataaacacctaacctgatgggcaaggccgggcacggtggctcatgcctgtaatcccagcactttgggaggctgaggcgggtggatcacctgaggtcaagagttcgagaccagcctggccaatatggtgaaactccgtctctactaaaaatacaaaaaatcagccaggtgtggtggtgggcgcttgtaatcccagccacttgggaggctgaggcaggagaattgctt

SEQ ID NO: 97949 - DNA, 45616 bp, Homo sapiens
  misc_feature (1)...(45616): n = A,T,C or G
gctccagccgtaatgtcacaggtgcttgactgcgcccgcctctgacagacacacaaggtactgtcaggtgcttctgttgccatttctggatgctcgttctttgacccaggcacacagctctgattttccatcagaaatcctctgaaactgagtgcagaagagagtagagtggtgtgtgcattgacagtatgggctagagggtgtttctttcctaccaactcactctgttctcctcccaggatgacattattgacgatgtggagagttttgttgctgccgcggagatcctgaaagagagaggcgcctataagatctatgttatggccacccacggcatcctgtctgcagaggcccctcgcctgattgaggagtcctccgtagacgaggtcaggctgcttctaaatcttgagccaagatttactgctgtgttttctgggaataataaaatgattcagtcaatactaaattgcttaatctgtctatagcttttctagcttttgctggctagcagttcgttgggacagatacatgtttaggaatacagatagtccacgacttaccatggttcaacttagaagtttttgactttatgatgatgcaaaaccattgcaattacgatgtaatgtatagtattcgataaattacttgagacactttattttaaaataatcgcttttattataaaatgaaagcctttgccctagatgattttgccacctgcagtctaatgtaactgttctgggcatgtttaaggtagggctaggccaagttaatgatgtttagtaggttaggcgtattaaatgcttttttttttttttgagatggaatcttgctctgttgcctaggctgggagtgcagtgtggcaatctcggctcactgcaacctctgcctcccgggttcaaacgattctcctgtctcagtctcccaagtaactgggattacacgcgccggccaccaggcctaatttttgtgtttttcttagaaacggggtttcaccatgttggccaggctggtctcaaactcctgacctcaggtgatccacctgcctcggcctcccaaagtgctaggattacaagcatgagccactgtgcccggcctaaatgcattttctacttaaaatattttcaacttataatgatgcgtttatccagacataaccctgtcataagttgagagttatgttgagggtctgtatatgtctatttgcataacggtttgcttgggtactttaatttgacaccctaggagcatttctcttgaggctggaattcttcccttatgatctgagagttttgcatagcactggggctcactgtgtttctgcatggagaccatgccattcctaagatttttgtcttgtgttctgaggccatgtaacttttcctttgcataaaattagttaattttggtttataaaaactatactcggtggaacaaggttttgtagtttggaacttaggctgtgggaactcaatgttagataagcttttctgtgtaaccagcttggagaacagacttcagtaacagcgtttgttttccatcactgtgtgactaggtggtggtgacgaatactgtccctcatgaggttcagaagctgcaatgtcccaagataaagactgtggatatcagtttgattctttctgaagccattcggagaatccacaatggagagtccatggcctaccttttccgaaacatcactgtggatgactagctttcacgagggtctcgaccctggacctcctgagggaaacatggaaaaagcagtgccatgagtgatacagtgtttccttgcaagggaggactcgaaacagcctggagttagatatcttcttttgcccggattgatggggaggagggattaaaagagtcaggaagaagacagagctaatggataaatatcataacatggccttacatgtctgctgtcatcagccctgttccttaaaagttctagctgctttcttaaaaataatctgaaaatcttattgatactaaagaggagttaaaggcacataaagtcttaactctataatgttcatttagttgtttcagctccagggaaatggaggtattgatgttgaacctggttagggaagctgagcgcctgtggccctattactatccagttggcctctcccaaatcaacttcaagtcttttatagagaatcgtatttttctttcagaaattgttatgcctacagccattgaaaaatgaagcattcatgttgttacatcttccaaggatgtcagattagaaaatagcatcccacctctgggtatctgagtggctctgaagttgcaaataaaataatttgttgtcttgctagtcttttcattagacagcagaagaccatggatacagaacagcagtcaggtctgtggctggacacaaacactttcccaggttccaccctcttcctaagtgttgaagctaaatccttgttgaatactgtattttaaatctttaaaaaaaaaaaaaaaaagtctaggtgtggtggctcacacctataatctgagtactttgggaggctgaggcaaggaggattgcttgagcccaggagtttcagaccagcctgggaaacatggcgaaacccccatgtctacaaaaaatacaaaaattagccaggcattggtagcatgtgcctgtagttccagctaccttgggaggctgaggtgggaggattgcctgagccaaggaggttgaagctgcagtgaactatgattgtaccactgccatccatcctgggtgacagagcaacaccctgtctcaaaaaaaaaaaacaggccagggatcgtgtcttatgcctgtaatccctgcactttgggaggccgaggcaggtagatcacctgaggtcaggagtttgagaccagcctggccaacatggcaaaaccccgtctctactaaaaatacaaaaattagcctagctaagttaaaagcataaaaagactacaaagaggccaggcatcatggctcacgcctgtaatcccagcactttgggaggccgaggtgggcagatcacttgaggtcaggagtttgagaccagcctggccaatatggtgaaaccctgtccctactaaaaatacaaaaattagccgggtgttgggggagggggtgcacgcctgtaatcccagctactcgggaggctgaggcaggagaattaattggttgaacccaagaggcagagattgcagtgagctgagattgtgccactgcactccagcccaagtgacagagcaagattccatctcaaaaaaaaaaaaagactgcaaagaactagttattttgataaccccttaaaggcctactgtgtcccaagttattggaatataatgatgatcgaaaatccttcaattaaataaacagtacctctcaggctgaagtgaaaaatctgaacttgaacagtagttaaaatagtacagttattccttacaatccatgggtgattggttccaggactcaacctcctgcccatggatgtgcaagtccctgatagaaaatggtgtagtatctgcatataagctatgcacatcctggatgacttgtaatacctactgcaatatcctgtgtagatggtggtcatgctgtattatttagagaatcatgacaggaatctgtacgtgttcagtcgtggttggttaaatctgcagatgcagagctcacggaggaggctggccatgcatggcacacattcataggttctctttaagtagccttgctgtgcttctgttaggaagttttatttatacgtttttgggaagaatcttgtatggggaagtcatgtctcaattgttaacaccagatttgtctcgtgctgtttaatcctgctttgtaatgagctcaagcacaggcgcttgaccaggtgagtggtttcttttcttttctttttttttttttttgagacagagtcttgcactgtcgcccaggctggggtgcagtggtgcgatcttggctcactgcaacctctgcctcccgggttgacgcgattctcctgcctcagcctcccgagtagctgggattacagatgcgcggtaccatgcccggctaattttttgtattttaatcaaaaaggatttactatatgggggagggggtggtttaaaacttcagatcaagagagatatgcccgtctgggtctcaaaaagtgctgggcattacaggcgtgagccactgagccctgccttcaactggacttttgttttcttggagggacaaatgcatgtaatcattgagtataagtattgtccagtgaacagcaggaagcaacgcaggtcagcgccaggaggtaatagacacgtgcatgtctcaaagccaccttaggttggttctgaaagaaaaagcagaagcaactaggaaggcagctgggtggggaggccaagaggagagacaggaggggaaaaagaggccgggaagaggcaggaagaagaggccaagccccagcaggggagccctnnnnnnnnnnnnnnnnnnnnnnnnnnnnnnnnnnnnnnnnnnnnnnnnnnnnnnnnnnnnnnnnnnnnnnnnnnnnnnnnnnnnnnnnnnnnnnnnnnnnnnnnnnnnnnnnnnnnnnnnnnnnnnnnnnnnnnnnnnnnnnnnnnnnnnnnnnnnnnnnnnnnnnnnnnnnnnnnnnnnnnnnnnnnnnnnnnnnnnnnnnnnnnnnnnnnnnnnnnnnnnnnnnnnnnnnnnnnnnnnnnnnnnnnnnnnnnnnnnnnnnnnnnnnnncctggccaacatagtgaaaccccgtctctgctaaaaatacaaaaaattagccgggcatggtaccacgcatctgtaatcccagctactcgggaggctgaggcaggagaatcatgtcaacccgggaggcagaggttgcagtgagccgagatcgtgccattgcactacagcctgggcgacagagcaagactccctctcaaaagtaaaaaaaaaattatggcagcacagaaaagggacaattagccaccagttagtcatctagtggctaattggaactgcctgaatagtgagtgggttgtcttttccaagttgcttcacctttgattgaacaaaatatgtggactgtctgaggggaccagggccccaggactgcatcccttagacatggggccatagacatggggccaccactctggaatggacgcagctgatgacacaaagcatggttgccaggaaaccctcaagtctttccttatgtggccccgccaagagtgagtgaatcctggcctttctaggttaaggggatggatggagtctagctggatcttaggaggcctcctcagcccgttgccaaggctccccttgtgatccttgtggtggcctttacttccccccgcccccgtggctcgcagggaggcgtgttgttacgtggaatcttcagggcacgcgggggcccccacgtttcaaacgtccgccggcgcggggactgggagtccagggctccagctcggggacccgaggccagcgacagacagcggaggggtggccatcgcggaccccgccggggagcggaggcgcagattccctggaggcaggagctctgtccagtgactcggccggacccggggcaggggcgccccgaggacctcgcagggcccccgaaaggccccaaggcgcggcgtgcagtgagcgggaagtggttggccggcgccccgcggcggcgcacagctcctgacagccacgatgccgcccgcgaccacggtctccctccgggagctggcggacctctccatcggcacgccagaggtgggcgccgtcaacttcacggccctgcacacgctcatcgtggccatgctcaagaacctcgacctccaaaatacccggatcgacttccagccctcgtcgcccgagcccagccgctcgctgcagtccgtccggagctcgttcagcatcccgcacctgcccgcgcccaaggaggtgcccaagggggcgccccgggagaagcgcaggggcgtgggccaggcgccttcgtcagcgctggagagccaagtgaaggacctgggcggccaggtggaggacctgagcaagcagctcaagcgtgtggacggccaggtgcagggcatcgccacgcacgtgcagcacttctcccaggccagcgggcttgacctggccgcgctagagtggccggaggagcaggaggtgggcgtgcgggcgttcgatagggtgcggactgggagtatcatgaaggacgccgccgaggagctcagctttgccagggtgagcaygcacacggaggcacgcgcaggccgtctgcctcctccaggccgccctccaggcctagccgagtccccaccaccctggaggggtgagcggtggtggggacggaggggatggggaccgaggaggtgccagacctcagtgcgactggctaaatagagtggcccatgctctaycttgcagtccacggggctgcaagacgtgaaaatcctaaaagaacgccaccaaaaggcctagggcctccccgagctggaggggcctggggaccccacctcctaagtgtagtggccccatcccaccccctccttcctagcccctgtttacgggagaggttcgcccaccacttatcagacatccaaggacccagagctggctcagagtggggccggcaacttctcagaagattcttagagtgaattccctttttaaaatgaataaggacatgaagagatacgtgttgaggacaaaggctcccagagaaggggagtcaggatggagagttggacctcagcttcctatggccatgacacaagccacagcaggcaggggaccgtttcacttggactttttttttttttgagaaggagtctcactctatcacccaggctgaaatgcagtggtgcagtctcggctcactgcaacttccgcctcccagactcaagcgattctcctgcctcagcctcccgagtagctgggattataggcgcgcgccaccccgcctggctaatatttgtgtttttagtagagaaggagtttcaccatgttggcggggctggtctcaaactcctgacctcaagtgatctgcccgcctcggcctcccaaagtgctgggcattacaggcgtgagccactgagccctgccttcaactggacttttgttttcttggagggacaaatgcatgtaatcattgagtataagtattgtccagtgaacagcaggaagcaacgcaggtcagcgccaggaggtaatagacacgtgcatgtctcagagccaccttaggttggttctgaaagaaaaagcagaagcaactaggaaggcagctgggtggggaggccaagaggagagacaggaggggaaaaagaggccgggaagaggcaggaagaagaggccaagccccagcaggggagccctggccgctcatgccctcctgccatatcaccccaggtctcgagaccgcagcaccaactcacttttgctctgggaagcatgtctgctttccttttcaaactttaaagtgtggtgggggttttttttgttttaatttttttgggtttttttttttttttttttttttttgagacacattctcactctgtcacccaggctggagtgcagtggtgcattgtcggctcactgcaactccatctcctgggttcaaggaattctcctgcctcggcttcccgagtagctaggattataggtgcacaccaccatgcccagctaacttttgtacttttagtagagatggggttttgccgtgttggccaggctggtctcgaactcctgacctaaagtgatcctcctgcctcggcttcccaaagtgttgggattacaggcaagagccactgcgcctggccttttgttttaatttttacgtaatcttagattctagaagtttgcaaaagttataaaaagtaacttgttttatttttgtttattaatatattttttcttaatcccaaatatgatagcaccttatgttgtagcgatttgctttggttcttttgaggtgcttttctctttagatagcacagatgttcagctactgttgaggtacctggcacccttccttccttgtaaggcaaggtgggcctcatcctacaggctttcacaagtgggttggagcaaactgaatcccaggaccaaagggtcccatccctgcagcagcacttactcctgccatgctaccagccaggtcccccactgcatctcacttcccttcctgcacttggctgggaaaagacccaggagcctgggctgactggccaggtaaaaaccaggtagaaagcaggggctcctgcctgtaatctcagcactgtgggaggccgaggctggaggattgctcggacccaggagttcaagaccagcctgggcaacattgcaagatcttatctctacaaaaaaatgtttaaaattagctggatgtggtggtgcatgcctgaagtcccagctactcaggaggctgaggtgggaggatcgcttgagcctgagaggttgaggctgcagtgagctgtggtggcatcactgcactgcagcttgggtgacagagcaagaccctgtctcaaaaaaaaaaaaaaaaggaaaccaaaaaaacccaagtagaagaagaaaccctccctttccataagagccacacaaattccccctttcctcgtctcctggcactgagtcagtgtgtgaatgtgcgtgtatgcatgtgtgtgtctgagtgtgagagtgtgtgtgcgcatctgtgtgtgtgtgcatgtgagtgtgygtgtgtaggggccactgtcattcycctttcctgaactcttcttccaggtacttttacagcgggttgatgaactagagaagctattcaaagatcgggagcaattcctggtaataccagccagttccatgggaaagggctytccagggggctggcsgtctctcagtgtggccctctctccagggcttgtccatccagggcaggcagtgtgtgccctctgcctctcaagtctctgccccagggttggagggaaatctgccccagccctgcccagcgctctgctgggtgctcacatgggacagataactggctgcccaaccttcactggtcacttgaagggtgatgaattctccctggggctggggctgtgaaggacccacccagatcctgttagaccaagtctgttcctaaagctgcttgggattaatcaaggggtgtatgtgtgtgtcttttctgtcactgtcaggaactagtcagccggaagctgagtttggttcctggtgcagaagaagtcaccatggtcacctgggaagagctggagcaggcgattacggacggctggagagcctcacaagyggtgaaccagtgggggcctgggccgtggtcttgggtggggctccccagaacttctcgctttgtacrgctgcacaggattctgttctatggatattcatagttcgcaagtttcattgatatgggtgttttaaatgctttttccaatcttaagaacaaggtgtcattcacgtgtgaataacatgcatccctagaaagggatgtrtgttagtgatttggctagccattgataaattgccttccatggctgctgttccagtgtagacccccaccatcaatgggagagagagcttgttccctgacatccccccagcgctgtatggttggtacccaattttttkagctttgccaacccactggatcaatagaaaaatcgtacctgagtgtagtttttatttgcttttataccttctcaaactttctttacagtctgtcctgaaatgcagggatctttccttattagtggaccatggtgacagaccctggaagtaaaacctctgtagggggccctttgctggtggcgactttttttttttttttttttttgagacagagttttgctctattacccaggctggagtgcagtggcgcgatctcggctcactgcaagctccgcctcccgggttcacgccattctcctgtctcagcctccagagtagctgggactacaggcgcccaccaccacgcctggctaatttctttttgtatttttagtagagacggggtttcacggtgttgcccaggaaagtctcgatctcctcacctcgtgatccgcccgcctcggcctcccaaagtgctgggattacaggcgtgagccaccgcgcccggccgctggtggcgacttttgcacacaggcatgcatctgtctgtcttgagacagtgtacagatgaccaaattgttttccgatccccgacctactttcatctgattaaaatcaagctggatatattcaaatggccctcaaagatgaggcttaacttcccttttggtcttgacatccctcccgctggctttgggctagtgggttatcaaaacaagcaagccaactttgagggccatttgaaaatgtagacggaagcagggtgaagagtaaagcttttggcgccaccaagtggccatcttggggagcgccaaatatctgggtacaaaaaacaacctgggatctccaggaccattttctgatttcagggctcattctcagaggaaagcggcatcagaaagatgttgcaagaggggccgggcgcggtggctccagcctgtaatcccagcactttgagaagtcgaggggggcggatcacttgcgttcaggagttcgagcccagcctggacaacatgatgaaaccctgtccctacmaaaaatacaaaaattaggtgggtgtggtggtgcacacctgtaatcgcagttactcaggagactgaggcagaagaatcgcttgaactcgggaggcggaggttgcagtgagctgagatctcaccactgcactctagcctgggccacaagagcaagaactccatctcaaaaaaaaaaacaaaagtaggtaaactggaaagactaaccagtcagtcatgcagtgcctcgggaggaaaaaggggacagtatgcgcttcttgtggctgttccaacaaatgaccagagaccgatctgtgtggcttaaaaccacacagatctgttatcttacagttcgggaggacacaaggccagtaccagtttcactgggcagaagtcaaggtgttggcagggctggtttcctctggcagctctggggggagaatccatttcctggtcattttcagcctctaagtgtggctggcagcccctggttctggccatatcagcttcagcctccttcttgtaaagacctttgtgacttcatcactgcatccacccggataatccgggatactccctccgtctcaagatccttaattgtacctgcaaagtcccttttaccacgtaaggtaatgctcccaggttcaggggatggggacatggatatctttgggagtttatattcagcacaccatagtgactaaaaccaaaataatggtttttcagaacaaacaccttgaagtcctagacaaatggacatgacagctacagaggtgggggtggggtgggggggaaacggggtcctagaaaggtcggtacagttttcattaagggcatcagatgagactcctgtcatttctgaggatgacaggaattataaataatgagtgccggccggcgcggtggctcacasctggaatcccagcactttgggaggctgaggtgggggatcacctgaggtcaggagttggagaccagcctggccaacatggtgaaacgccatctctactaaaaatacaaaaattagccgggtgtggtggcacatgcctgtaatcccaagcacttgggaggctgaggcaggaaaatcatttgaacccgggaaacgaagttgcagtgagctaagatcgtgccactgcactccagcctagctgacagagtgagactctgtctcacacacacacacacacacacacacacacacaaaattagccaggtgtggtggcaggagcctgtaatcccagctacttgggaggctgaagcaggagaatctatagaacctgggaggcagaggttgcagtgagccgagattgcaccactgcagtccaacctgggtgacagagtgagaccctgtctcaaaaaaaaaaaaaaaaattataaaacaccaccaactctaagatacatcctgatttcagagatgttaaaatgtatgtgtgggtgtcggggcaggatgtccatcttaraatcagtgaatgtattttgagtcccaaatggacttcttcattttttttgagacagagtctctgtcgtcacccaggctggagtgcagtggtgtgatctcggctcactgcaaccttcccctctggggctcaagcaatcctcctgcctcagcctccccggtagttgggaccacaggtgcgtaccaccatacctagctaatttttgtatttttagtagagacaaggtgttgtcatgttgcccaggctggtctcaaactccagagctcaagtgatccacccgcctcggcctcccaaagggctgggattacaggcatgagctaccgccctggcctatcatatattttgttcaagattttggctcatttgttgtaatgttagggcatgttaaagaaaaaatatttttgagacagtcttgctctgctgcccaggctggagtgcagtggtaccataagggcttactgcaacctcgacctcctggactcaagtgatcctctcacctcagcctcctgagtacctgggactacaggtgcatgccaccacacctgactaatattttgcatttttgagacagagtcttgctctgttgcccaggctggagtgcagtggcatgatcttggctcactgcaacctccacctcccgagctcaagtgattctcctgcctcagcctcccgagtagctgggattacaggtgcccaccaccacgcccggctaatttttttgtatttttagtaaagatggggtttcaccgtgttggccaggctggtcttaaactcctgacctcrggtgatctgcctgccttggcctcccaaagtgctgggattacaggcgtgagccaccatgcctggtcatattttgtattttgtagaaaggtttttgccatgttgcccaggctggtctcaaactcctggcctcgagcagtctgccagccttggcctcccatagtgctgggattgagccactgcacccagtctcaatcctggccctctactcatgatgcaggcacaccgcacaatttccataaagtcaccactgtctgccaaaacccataatggaggttaacacccagtttcaaaatctttattttacgtttatgctaaaggactctaccaaccatgcaggcaggtcaaattggtctcaggtcatatttgtctcaggtgtgttgtatgtgcttacctggggctagtggcactcccccactgctttcatcctggtctgtgcgagggctgaagtggccattaccagagcttgttctcttgcttctcaacaatcttttaatatttatatttatctttatttgcttttggagttgttcataattatgagcagtaatcaaacgcacatgctttcttacctctggagaagtaaaaatgtttaaaggtgtctatgcttatgtgtaagtctcatggtgtctgccgccatcaccctgagaagatgtactgctcggtaaaaacagtacgatagtggcatgtgcaaaaaagatttggcttggccaggtgcggtggctcacgcctgtaattccagcactttgggaggccgaggcaggcagatcacaaggtcaagagatcgagaccatcctgaccaacatggtgaaaccccgtctctactaaaaatacaaaaarttagctgggcgtggtggtgtgtgcctgtagtcccagctattcgggaggctgaggcaggagactcgcttgaaaccaccggaaggcggaggttgcagtgagccgagatcgcatcactgcactccagcctgggcaacaagagcgaaactccgtctcaaaaaaaaaaaaggtttggctttaaaaaagtgaaagtggaggccacttttttctagtccattccttttgtgttcagggtcctcttgcaatatcgtttagttttgttttttgagacagtcttgctttgtcgcccatgctggagtgcagtggcgcaatcttggctcactgcaacgttcacctcctgggttcaaatgattctcctgcctcagtctcccgagtagctgarattacaggcgcccaccatcacgcccagctaatttttgtatttttactagggacagggtttcaccatgttgtccaggctgggctcgarcttctgacctcaggtgatccgcccgcctcggcttcccaaagtgctaggattacaggctggagccaccgcgcccggcccctcttgcaacatctttctgatgccgctttcctctgagaatgagccctgaaatcagaaaatggtcctggagatcccaggttgtcttttgtacccagatatttggcgctccccaagatggccacttggtggcgccaaaagctttactcttcaccctgcttccgtctacattttcaaatggccctcaaagttggcttgcttgttttgataacccactagcccaaagccagcgggagggatgtcaagaccaaaagggaagttaagcctcatctttgagggccatttgaacatattcagcttgattttattcaggtgaaggtaggttggcgatcggaaaacaatttggtcatctgtacactgtctcaagacagacagatgcatgcctgtgtgcaaaagttgccatcagcagagggccccctacagaagttttatttccagggtctgtcaccatggcccactaataaggaaagatccctgcatttcaggacagactgtaaagaaagtttgaaaagctacaaaagcaaataaaaactacactcagggccgggcgctgtggctcacacctataattccagcactttgggaagccgaggcagacggatcacttgaggtcgggaatttgagaccagcctgaccaatatggtgaagccccatctctactaaaaatataaaaattagccgggcgtggtggcatgcgcctgtaatcccagctactcgggaggccgaggcaggagaatcgcttgaacccgggaggcagaggttgcagtgagccgagatcgcgccactgaactccagcctgggcgacagagcgagactctgtcttaaaaaaaagacaaagaggtcagacatggttgctcacgcctttaattccagtacttaaagtcaaggcgggagaagtgcttgaggccaggagtttgagaccagcctaggcaacatattaagaccccgtctctacaaaaagtttttaaaaggtcacgtggccgggggcagtggctcatgcctgtaatcccagcactttgggaggctgaggcgggcggatcaccaggtcaggagatcaagaccatcctggctaacacggtgaaaccccgtctctactaaaaatacaaaaaaattatccgggcgtggtggtgggcgcctgtagtcccagctactcgggaggctgaggcaggagaatggcgccgggaggtggagcttgcagtgagccgacattgcaccactgcactccagcctgggtgacagagtgagactccgtctcaaaaaaaaaaaaaaaaaaaattagccagaaagccaggcagcgtggctcatgcctgtaatcccagcactttgggaggctgaggtggatggatcacctgaagtcaggagttcaagaccagcctggcctacatggtgaaaccccatctttactgaaaaattcaaaaaattagccgggcatggtggtgcgtgcctgtgatcccatctactcaggaggctgaggcactggaaacttggaggcggaggtttcagtgagctgagattgtgccactgcactccagcctgggtgacacagcaagactctgtctcaaaaaaaaaaaaaaaaaaaaaaaaaacagattcctaagtagtcctagctacttgggaggctgaagggggaagattgcttgagcccaggagttaaaggttgcagtgagctgtgatcatgccactgcactccagactgagtgacagagtgagaccctgtctctaaagtgtgtgcttgtgtgtgtgtagccataataactgttttaatatccatctctgctaattctaacacatatgccagtgttgagttggtctcagttggttgagttatctcctcattatgggtcatgtcttcctgcctctttgtatgcctggcaatctttgatcaggtgccagccattgtgacttttcctgcattggatggtacatatttttgtattttttttttcttttgagatggagtcttgctgtgtcgcccaggccggagtgcagtggcacaatctctgctcactgcaatctccgcctcctgggttcaagcgattctcctgcctcagcctcctgagtagctgggattacaggtgtgtgccaccatgcctggctaatttttgtatttttagtagagacggggtttcaccatgttggccaggctggtyccgaactcctgcactcaggtgatcctcccgcgttggcctcccaaagtgttgggattaccggtgtgggacaccacacccggccatatttttgtattcttatacattttattgagcctgtttcccccaggacacagctacttaaaaacagtttgattgcttcaggccttgcttttatgattttatgatttgttaggtgggtccataggtgtgttcagtctagggctgattattctccatttctgaggcaacacttttctgagtacactctgctctgtgctacttgaatgaygagtttttccaaactggttgataagaacaggcaccatttccagccccatggcaggcagggcactgcttcttcaagccctgcaggtggttctttccccaatcttgggacgtctccccacatgcatgtactcatcaaatgcgtgctcatcactcggaggggatcctccacagacctctggagtgggagtgggctttctgtcatctcccttctttctggttatttttttttttttttttttttgagacagagccatgctctgttgcccaggccggagtgcagtggtgtgatctcagctcactgcaacctccgcctcctgggttcaagtgattctcctgcctcagcctcccaagtagctgcgactacaagcatgtgccactgtgcctggctaacttttgtatttttagtagagatggggtttcgccttgttggccaggctggtctcaaactgctaacctcgggtaatccacccactgaaagttctgggattacaggcatgagccaccacgcctggataactcccttctttctgatactctatcctgtgaccttcagttgcctgaatctccctgaatgctcacttctgtctcctcaactcagagagtctgccagactccacctcaattccccctccctgcactgcagtctggaaactccagcaaggcagcaagccagggtgatacaggcttcccagttttcctttctccaccgcttggggattattgtccttcataacttgatatccagtatgtaggaaaccaccgtttcatagctgttgttgggtttgtttgtttttttgagatagagtctcactctgtctcccaggctggagtgcaatggtgctatctcggctcactgcaacctccgacttctgggttcaagcaattctcctgcctcagcctcctaagtagctgggattacaggcatgtgccaccacacccagctagtttttgtatttttagtagagacggggtttcaccatgttggtcaggctggtcttgaactcctgacctcrtgatccacccacatcggactcccaaagtgctgggattacaggcgtgagccactgcgcccagcctcagttttgttttttcttgtcacagacaggagggtaaatccagcccctgttaacttcatcttggctggaaatggcagtggttcattcttctttttcatggattcatagcatctactgtattggtgaccagaaatatctcagtcccttattgatgatctattttatcaagatgctgcagaccccatcattgtatgtatagcttggcatcctttggtgaggattcatagagaaaattcctgtctatggagtttctgggtccatgggtttgcatgtttacattttatttatttmtttctttttgagatggtgtctcgctctgttgcacaggctggagtgcagtggcgtgatctcggctcactgcatcctctgccttttgggttcaagtgattctcctgagtagctgggattacaggtgtgcagtaccacacctggctaatattttatatttttagtagagaccaggtttcaccatgttggccaagctggtcttgaactcctgacctcaaatgatccacctgccttggtctcccaaaatgctgggatgacaggcgtgagccactgtgcccagcctatacattttaaatatatggtttacatgcattccagtatacacttttatcagcagcaatgggtcaacaatggagcaaactttatattttattttattttatttatttattttttgagatggagtcttgctctgtcacccaggctgaagtgcagtggtgcgatctcagctcactgtaacctctgcctcctgggttcaggcgattctcatgacttgtcctcccaagtagctgggacgacaggcacgtgccaccacacccagctaattttatttatttatttatttatttatttatttatttgtttttagtagagacggggtttcatcatgttggccaggatggtctcaatctcttgaccttgtgatctgcccacctcggcctcccaaagtgctgggattacaggcatgagccaccgtgccagacccagactttatattttaaacttaataaattacttatgtcctttatttaaaggctaagcaaaagtccagagagatcacttgtattttgcagttttccccatcttttatgaagaaaaattacacttttttttttttttttgagaaggagtctcactctgtcacccaggctggagtgcaatggtgcaatctcggctcactgcaacctccacctcccgggttcaagcgattctcctgcctcagtctcctgagtagctgggattacaggcatgcactatcacacccagctaatttttgtattttcagtagagatggggttttgccatgttggccaggcaggtctcaaagtcctgacctcaaatgatccacccgccttggcctcccaaagtgctgggactataagcataagccaccgcacctggccacaaaaattacatatttttgtacatgccattttcaaatatgcagaktctcaaaaatatggagacctagcctcccagaacgtcagtgtgtttcttttccttttcttttttttgagatggagtttcactcttgtcacccaggctggagcacaatggcacaatctcacggcaacctccatctcccaggttcaagcaattctcctgcctcagcttcctgagtagctgagattacagacacatgccaccacgcctggctaattttgtatttttagtagagatagggtttcaccatattggtcaggctggtctcgaactcctgatctcaagtaatccacccgcctcggcctcccatcagtgtgtttctttatgtcaagcttagcttttaggaccagagggcttttttctccaggggccctaaatcatcctagtcagaacttccagatttcctttcttcccactctgatagtgaatattttgactgttattgatttccttcttcctctccaaccagggctcwgaaacacttatgggattttctaagcacggagggttcacttccttaacatcacctgaagggactctaagcggagactctaccaagcaacmaagtattgagcaggctctggattctgccagtggtcttggcccggatcggactgcatcaggatctggtggcacagcacacccctctgatggggtttccagyagggaacaaagcaaggtcccctctsgtactggragacagcagcagccgagggcccgtgatgaagctggygtgccacgactccatcagtcttctacattccaattcaaatcagactcagatcrtcacaggagtagagagaagcttacctcgacacaaccaagaagaaatgcacgtcctggtccagttcaacaggacttaccctyggccagagaccagcccagtagtgtgcccgctagccagagtcaggtccatctaaggcyagatcgtcgtgggttagaaccaactggcatgaatcagcctggattagtgcctgctagcacttacccacatggtgtggtacccctcagcatgggtcagcttggtgtgccaccacctgaaatggatgatcgggaattgataccatttgtygtggatgagcaacgtatgttgccaccatcagtacctggcagagaccagcaaggattggaactacctagcacagaccaacatggtctggtttcagtcagtgcatatcagcatggtatgacatttcctggcacagaccaacgcagtatggaaccacttggcatggatcagcgtggatgtgtaatatcaggcatgggtcagcaaggactagtaccccctggtatagaccagcaaggattgacattgcctgtcgtcgatcarcatggcctggttctaccttttacagaccagcatggtttggtatcacctggtttgatgccaattagtgcagatcagcaaggttttgtgcagcccagtttggaagcaactggcttcatacaacctggcacagagcagcatgatttgatccagtctggcagatttcagcgtgctttggtgcagcgtggtgcatatcagcctggcttggtccaacctggtgcagatcagcgtggtttggtccggcctggaatggatcagtctggtttggcccaacctggtgcagatcagcgtggtttggtctggcctggaatggatcagtctggtttggcccaacctggtagagatcagcatggtttgatccagcctggcacaggtcagcatgatttggtccaatctggcacaggtcagggtgtcttggtacagcctggtgtagatcagcctggcatggtccaacctggcagatttcagcgtgctttggtgcagcctggtgcatatcagcctggcttggtccaacctggtgcagatcagattgatgtggtgcaacctggtgcagatcagcatggtttggtacaatctggtgcagatcagagtgatttggctcaacctggtgcagttcagcatggtttggtccaacctggagtagatcagcgtggtttggcacaacctcgtgcagatcatcagcgtggtttggtcccacctggtgcagatcagcgtggtttggtccaacctggtgcagatcagcatggtttggtccaacctggagtggatcagcatggtttggcacaacctggtgaagttcagcgtagtttggtgcaacctggtatagttcagcgtggtttggtgcaacctggtgcagttcagcgtggtttggtgcaacctggtgcagttcagcgtggtttggtccaacctggagtggatcagcgtggtttggttcaacctggtgcagttcagcgtggtttggtccaacctggtgcagttcagcrtggtttggtccaacctggtgcagatcagcgtggtttggtccaacctggagtggatcagcgtggtttggtgcaacctggagtggatcagcgtggtttggtccaacctggaatggaccagcgtggtttgatccaacctggtgcagatcagcctggtttggtccagcctggtgcaggtcagctgggtatggtgcagcctggaataggtcagcaaggtatggtgcaacctcaggcagatccacatggcctggtacaacctggtgcctatcctcttggtttggtacaacctggtgcatatttgcatgatttatctcaatctgggacatatccacgtggtctggtgcagccaggaatggatcagtatggtttgagacaacctggtgcatatcagccaggcttgatagcaccaggcacaaagcttcgtggctcttcaacattccaggcagattctacaggttttatatcagtacgtccatatcaacatggtatggtacctcctggcagagaacaatacggccaggtgtcaccactcctagccagtcaaggtttggcatcacctggtatagatcgaaggagtttggtaccaccagaaacttatcagcaaggtttgatgcatcctggcacagaccagcacagcccaataccactgagtacaggtttgggatctacayacccagatcaacagcatgtggcatcacctggcccaggtgagcatgaccaggtatacccagatgcagctcagcatggccatgctttctctctctttgacagtcatgattcaatgtatcctggttatcgtggcccagggtatctaagtgctgatcagcatggccaggaaggtttggatccaaatagaacacgagcctcggaccgacrtggaattcctgcccagaaggccccaggccaagatgtcactcttttcaggagtccagactccgtcgaccragtcttatcagaagggagcgaagtctcgagtgaagtcctgagtgagcgacgcaattcactgcgtagaatgagttctagtttccccacggcagtggagacatttcatctgatgggasagctcagtagcctctatgtggggctaaaggagagtatgaaggatctggatgaggagcaggccggccaaaccgacttggagaagatccagttcctgctggcacagatgggtgggtgcygcttgccgatagaggagaaaccattgtctctgttttcagttggtttcatccttttcttcccctggcctcaactcctggctgctacacatctccctgagtccctgaaaacagcatgtcattcagagcatgtcccacagccttcagagtccaaaaaaatgggtgggcaaaggagagaactaagccccaggagaggagtggagcgggttcttgtggctttgtcaggctctctgcacagcagtgggggaaagtgtctggttatagagagcagtagcattgggaggtgggcgggagagaatgttgaagaattaaacttaacattttgactgggagcaatggctcacacctgtaatcccagcaccttgggaagcagagctgggtggatagcttgaggccgagttcgagaccagcctaggcaatgtggcaaaactctatctctaccaaaaaaaacaaaaaaaaaattagccaggcgtggtggcacacacctgtagtcccagctacttgggaagctgaggtgggaagattgttggagccagggaggcagaggttgcagtgagctgtgatggatcactgcactccagcctgggtgacagagcaagaccctgtctcaaacaaaacaaaacttaacatttgcctgttcccaactccaagcccagagagtaattaagattttttgcagtggttggaattcgggagtcagttgtcccaaagccctttaggatgtcaggcattaggtggatgtttcatgggctaaggacagctctctctcccttcttcccacctccctttcccagtcaccaggagacacaggataaagtaataggtcctgctgtcctctagggtagcttcagtgttacaggggctggaaatggagattgggagcccactagagatctaacccctctgatcataaggcttctgctttccatagtcaaaaggaccatacctcctgaactgcaggagcagctgaagaccgtaaagacgctagccaaagaagtttggcaggaraaagcaaaagtaaggaagagtcaacccactttgtcttttttttttttttgagatggagttttgctcttgtcgccctggctggagtgcagtggcaccatctcagctcactcaacctccacctcccaggttcaagcgattctcatgcctcagcctcccgagtagctgggattacaggcatgtgccaccatgcccggctaattttgtattattatttgtattattattagtagagatggggtttctccatgttggtcagcctggtcttgaactcccaacctcagatgatctgcctaccttgrcctcccaaagtgctgggattacaggcgtgagccaccgtgcccagcccccactttgtcttttaatgctaataatagcactttccatttgtattttacggattaaatagctctttcttttacattattatctaattggatctttgcaatcttatcagataggaactgcaccttgggtatcatcgtgttcatttcctggatctaaaacctgatgctcaggctgggcacgctggctcatgcctataatcccagcactttrggaggccaaggcaggaggatcacttgagcccgggagctcgagaccagcctgggcaacatagcaaggacttatctctacaaaaaatttaaaaattagccagacatggtggtgcatgcctgtagtctcagctacttgggaggctgaggcaggaggatcacttgagcctgagtttgaggctgcagtaagctatgatcacgccatggcactctagcctgagtgacagggcaagaccctgtctctaaaaaaattttttttaaaaactgatgctcaaagctattatgattyagctgagccaaataatgagggctttgctcttttctttttttctttttttttttttttgagacacagtctcactctgtcgccaaggctggagtacagtggcgcaatctcggctcactgcaagctccacctcccrggttcacgccattttcctgcctcagcctcccaagtagctgggactacaggtgctcgccaccacgcccggctaattttttgtatttttagtagagatggggtttcaccgtgttagccaggatggtctcgatttcctgaccttgtgatctgcctgcctcggcctcccaaagtgctgggattacaggcgtgagccaccacacccggccttgctcttttcattatctgtggcagccttggagtccagtttgtggattttctggggccagaggtcattgcaagggacggccagatcccttcagacattctcctttttttttttaaattgagacggagtctcgctctgttgcccaggctagagtgcaatgatgcgatctcggctcactgcaacctctgccccctggrttcaagctattctcatgcctcagcctcccaagtagctgggattacaggcatgcatgttcatgcccagctaattttagtatttttagtagagacagggtttcaccatgttggtcaggcttgtctggaactcctgacctcaggtgatcctcccacctcagcctcccaaagtgctgggattacaggtgtgatccaccaygcccggcccagtcattcctttttttttttttttttttttttttttttaaractgattcttgctctgttgcccaggctggagtgcagtggcacaatctcgcctcactgcaacctytgcctcctaggttcaaatgattctcgtgtctcarcctcctgagtagctgggattacaggcgccagccaccacgcccagctgatttttgtattttttagtagagatgggtttccccttgttggcaaggctggtcttgaactcctgacctcaggtgatccacccgcctcggcctctcaaaagtgctgggattacaggcgtgagccatcgtgcctggcccagtcattctcttaatgccagctttctacatccatgggatggatgaatgggcggatggatgtccacaagggctcctggcttttgtcggagggggttgggttagtagagggaacggggagggctggcatgagctgcatgcaagggcacacttgggaagcgggagctcaggcctgcctgaccctcctcattcactgggtttgtaggtggaaaggctgcagaggatcctggaaggggaagggaatcaagaagcagggaaggaactgaaagctggagagctgagattgcagctgggtgtcctcaggtaaaatgccccagctaagagcagctggtcccctggcatcacgaattctcagccaaggaggtgatggcggccagtggctcccttatgcccctgaatggaccactgtctttgrcctggattgtgtctgctcttcacattgtccatgtctagttcaaggaactggtagaagttccccaggttcccaaagcaactcaggaccaggtcttggaaaygcaaaaataagcttcttagactgtgtccccagtcggaggctgaaggagacaacttctgacggcccctctgagctctctctttgcagtgcccagtcctaccgcccagaagcctcccaggacagaggcatagcccrggactccctagacaaaatccattggaggggggtggagggtgagagacctccagctgtgtctgcatccccctgcgtccctgatggcccaggctctgcatgggtctggcctgagtgtggagtctggcagtctctcatcgtgcaccacagagtcaccgtggctgacatagaaaaggagctggccgagttgagggagagccaagacaggggcaaggctgccatggaaaattctgtctctgaagcctccctttacctgcaggaccaggtgaggattccccactcttyagctccagggaccaagggcccttctcagagctggcttgrccctgccctcccacctctcatcaaaaactaggtccctcccatcatgtgtgtgtgtgtgtgtgtgtgtgtgtgtgtgtgtgtgtgtkttatgtggtgtgtgggcagggggtgggggggcggtggcgaatgtgtccaggatccagattccttatccaaagccagctctgagtccacaagtggcaagggaaaggaacccctacaacacctgtttacctcccattcgatctttccctatctttttttttttttttttttgagatggaatttcgctctcgtcatccaggctgtagtgcagtgtcgccatcttggctcactgcaacctccgcctcccaggttcaagcaattctcctgcctcagcctcctgagtagccaggactacaggcatatgccaccacgcccagctaatttttgtatttttagtagagacggggtttcaccattttggccaggctgatcacgatctttccctatcttttttatgatataatcatatatcaatgaattcacccttttaaattgaataaggtagtttttagtacaaagttgtgcaactatcaccacaatctaattccaaaacatttaatcaccccagaaagaaccctgtgactcttagcagtctctccctgttcccttctgtccctcagcccctgacaaccacgaacctgctttctgccactatggatttgtctattctggacatttcatataaatggaatcatgcaacatacacttttgtatctggcttctttcacttagcatgatgttttcaaggctcatccatgttgtagcatgtgtcaatactccattcttttttatggcttcatagcattccattctgcgtctatgccacaatttctttatctagtcatcagttgaaagacatctgggttgtttccatcctttggctattatgaataatgctgctatgcacattcatgtatacattttttttttttgagacggagtcttgctctctcgccyaggctggagtgcagtggcacgatctcggctcactgcaagctctgcctccygggttcctgccattctcctgcctcagcctcccgagtagctgggactacaggcacctgccaccacgcccggctaatttttcaaaatatttttagcagagacggggtttcacygtgttrgccaggatggtctcaatctcctgaccttgtgatctgcccgccttggcctcccaaagtgctgggattataggcgtgagccaccgcacctggccataataagttgtttttttgttgttattttgttttgtttttggagatggagtttcgctcttgttatccaggctggagggaaatggcacgatcttggctcactgcaatctccaactcctgggttcaagtgattctcttgcctcagcctcccaagtagctgggattacaggtgcctgccaccatgcccaggtaattttgtatttttaggagagaatggggtttcaccatgttggccaggctggtctcaaactcctgacctcaggtgatccacccgcctcggtctcccaaagtactggcctggcctcatgtataagtttttgtgtggggccggctgcggtgactcacgcctgtagtcccagcactttgggaggacgacgcaggtagatcacttgaggtcaggagttggagaccaacctggccaacatgatgaaaccccatctctactaaaaatacagaaaataggccaggtgtggtggctcacgcctgtaatcccagcactttgggaggcccagacgggtggatcacgaggtcaggagttcgagaccagcctgaccaacatggtgaaaccccgtctctactaaaaaaatacaaaaattagccgggcgaggtggcacgtgcctgtaatcccagctactcaggaggctggggcaggagaatcacttgaatctgggaggcagaggttgcagtgagctgagatcgcaccatgcactccaggttgggtgaaaaagcgagactccatctcaaaaacaacaacaacaacaacaacagaaaatagctgggtgtggtggtgcacacctgtaatcccaccttctcaggaggctgaggtaggagaatcacttgaacctgggaggcggaggttgcagtgagccatgatcgcgccactggacgccagcctgggtgacagcgagaccctgtctcaaaaaaaaaaaaaaattatagccactttagtgggtgtgaggtgggatctcattatagttttgatgtgcgtttccctagtgactaaagatgctgagcatcttttcatgtgctttttggccatttgtatactttctttttcatcttttttttttttctttgagacggagtctcactctgttgtcaggctggagtgcagtggcgcaatctcagctcactgcaacctccgccctctgagttcaagtgattctcctgcctcagcctcccaagcagctgggattacaggcgcctgccactgcacccggctaattttttgtattttcagtagagacggggtttcaccttcttggccaggctggtcttgaactcctgacctcgtgatccacccgcctcggtctcccaaagtgctgggattacaggcgtgagccaccacgcctggcctgtatactttctttagagataaaatatacatatccaaatccttcatccattttttcaggtgagttatttgtcattttattgttgagttgaaagagctctttacatgttctggatgctacactcttatttgatagatgacttgcaaatattttctcccattctgtgggtcatcttttcatyttcttgacagtgtctgyctttaagccttgcaatgcaattcttggtcattttctcactaaggaktgtctgaatcaggagcagccctctgagtgctcacagaagaaccacctaggaaaagccactgggccaagcgggttcatgtcaggaacctctttgtgcattttttttttttttttttttttttttttggagacagagttttgctctgttgcccaggctggagtgcagtggcaccatctcagctcactgcattctccacctcccgggttcaagtgattctcctatctcagactcctgggtagctgggactacaggtgcacaccgccatgcctgggtaatttttttgtatttttagtagatacagggtttcaccacattggtcaggccggtcttgaactcctgacctcaggtcattcacctgccttggcctcccaaagtgctaggattataggcatgagccactgcaccccgcttttttttttgagacagagtttcgctcttgttgcccaggctggagtccaatggcatgatttcagctcactgcaacctccgtctcccaggttcaagcaattctcctgcctcagcctcccaagtagctgagactacaggcacccaccagcacacctggataatttttgtatttttagtagagatggggtttcaccatgttagccaggctggtctcaaactcctgacctcaggtgatccacccaccttggcctcccaaagtgctgggattacaggcgtgagccacgtgcctggcccgctttgtgctttgagccacattccaggctcccaagttgctggaactgtggtgtgccccatgtcatgaccccgggccaggagtcctgcctgaggagcagctgggagcgtttaagagtcacctgtcagtccaagctcatgtctggctgtcccaggaccacactcaggagacaatccacttcctgttgggctggcctagcctccttttgcaggctttttttggaggccccacttccacatgccccatctttagccaccttggcctcctgcctttctctgaacacactcctattctttcctgctgttctttacacagatagctgcggcttagtgttaagactccactgaaatgcccatttttctaggaggcctcttcctcttttcgagagagaactggccagtccttctgcatccggggccctcggaggtacctgcctccgggcaggctcttctggttgtaagtggcagcatctctgtgagcccaggcaagaggatgctgccctggggatgtgcagctgtaggccgtggaggaaaagggaacttccaggccatgggggcaggccagggtgggccaccccacctgtccctctgcatctgcttttgtgggtacctgtgtccctctccttacccatcctctcagcccccacgtcactctcccattccactctcaatccaccttgctctccctcgcgctctgcagtggctgccccagccctgcagagtcctttctgttccatcacccactccccagagaggagcccaggttggcccagcctctctttttgagccaagcaacatgtctcaggtctttggccagttgagggaccggctgcccttggatcagctgtctacctgggaactctcatttggggtgacgaatggggcctgcgggatgcagaggagaacaccagggcagccttcaaggcacttgccctggaaggggtttgcaccgcccagccttggagaggcccctggagcagtgtcagcacctgccaagttcctgtatcgtgagttatttacatgctaggtggatggagcatgtccgttccccatggcatgtgagcaggagcgtgtgcaagcccacccctcacagccccagagcctggggcggggcctgtgtgtcattasggtcctctgtgtgtttatggcccggctaactggcagcagcactttacgatttagctaaagaagagatgttctcatgctgagctggtgggctggctggagaaagctccagaggccttcttctggcaagggcttggttcagtgttgacactgtgttctcggagaactctctctactcaccgtttactggatagatgcccatgatggcacatgctctgggaggcactgaggatgcagcaactgcccagggcacgacaggggagaggcacacaggctaggggcagtgccagcatgggcagagcgtggccgtgactggcctcactgccctgctgctgcygtctctcctgcacgcagttggacaagctcaggatgatcattgagagcatgctgacctcctcctccacgctcctgtccatgagcatggccccgcacaaggcccacaccttggctcctggccagatcgaccctgaggccacctgtccagcctgcagcctggatgtgagccatcaggtcagcacgctggtgcggcgctatgagcaactccaagacatggtcaacagcctggccgtctcccgaccctccaagaaggccaagctccagagacaggtggggctctgctcrcctccctcctgctgcaactggacatggccccacagaggagggccaccctgctgcagacccacagaagtggggcgggtgtttgggcctcaaggtcagctctccgtggcggagccctttagccagatcccacaagagtccctggtctttctgcaggtccacagcgagggtagcagcagaactagctttggggacaggagaccatggggaagagctggcttgatggggtgggacagcacaggccggctgaggacagatcagtgcccttcgcgtgccctggagacacaggcccaactgtaggagatgttgactccctggcacgcgagtcttccaaccccttctcaatttccctmgaaagggcaggcttgctggtgggggcgggcacagccacaaatcctgggtcctgcctcttgggctgaggaactcagatttgggccaggagaggaggggagaataaagcccacagcccagctctcaagtgccccgggacagcacatcactcctgagcctccatcacctctaatgacccctgaccggcaggccagggtcacaaggctagtccatggggatgtaggtgactgacgcttgtgtccygtgggggtggacacccagaaagggcagacagagggcctcccgcactgttagtggaaaattgttttccattgtttttgagacagggtctccctatgttgcccaggctgttcttgaactcctgggctcaagtgatcctctcgcctcacctcagcttcccaaagtgccaggactacaggcatgagccaccgctcccagccttgcagatgttttaagggccaacttacctggggcagcaatattatggcagcagggggtgggatcgcgccagcagcctccgagagccttcccatccctcctgccgcaggacgaggagctgctgggccgtgtgcagagtgccatcctgcaggtgcagggtgactgcgagaagctcaacatcaccaccagcaacctcatcgaggaccatcggcagaaacagaaggacattgctgtgagcggccgcagggtggctgggatggggcyggggctcaatgtggtgccctagccccgcagctgctggctctytttttctctgttcacttggcctccccagatgctgtaccagggtctggagragctcgaaaaggaaaaggccaacagggagcacctggagatggagatcgatgtggtgggtgccaggccccaggagccaygctgtgtcccagggcggtctcgctgactgttctttgagagactgagtggaggggagctggcgagacgagtgtgggctctsagaaacctgcctggtgataggggtcgacacccccagggaatggggcccctccatggccatctcccagatgcggggacctctgtctgtctctgggcagaaagccgacaagagtgctctggccaccaaagtgagccgtgtccagtttgatgccaccacggagcagctgaaccacatgatgcaggagctggtggccaagatragcgggcaggagcaggactggcagaagatgctggacaggctgctcacagagatggacaacaaggtgaggcaggggcatggcggggctctccatcccacagccttgcccccaggatygggacagcaccaccttctcctgggtcagccccctacctgcttccttagaggtcccctggcccctctttccccgccacagctggaccgcctggagctggacccagtgaagcagttgctggaggatcggtggaaatcgctgcgacagcagctcagggagcgccccccactctaccaggcagacgaggcggctgccatgcggaggtgaggcctgggaggcaggggaggaggctggcacgctcttcaggggrtgagggcagagggggctgggggtctccagacaaacagctcctgccagcacacagcggatcctgcccaggactgtcccatggttggagggacagaattttagagcttgaaacgctcttctagctcaggccccttcgtattacagcagagaaagggaggaggggaggcttaaggctctcagggtttggctgagctaagctgggcctttgggacagggagaggtcctcagtacccagagctgagacagctcctgggggcctggcccataggacctggcccgtggtaggcttgaattccaggattcccattygtggccgccagggggcgcccgagacttgcacagggcaccctcaggggcccatgggaagcctgctggctttgggttaggacagggaggtctgggatgtgagcccagaggtgggagcagatggattcctggggagcagggacatgatctgcaccctggtgggctgagcttccaggggcctgcagagccccaagcccttctgggtcttccgggcagagcactcaccctgcgtgtgcgtcccattcctaacaggcagctcctggcacatttccactgcctctcatgtgaccggcccttggagacacctgtgactggacagtgagtgcccacaccgccggcacgtggcctcgcatggcagggctgcgtctcctcccttcacctgtgtccacctgtcctctccctttctttcatgtgtctgcttccagccctcgctcccttccaggccgggggcgggtgggaaggttctttaggcaggtggatttgggggaccggacttgtcccactctgacccgccccttctccctctgtccctgcccagtgccatccccgtgacccccgcgggtccaggcctacctgggcaccattccatccgcccctacacrgtgtttgaactggagcaggtccggcagcatagccgcaagtatgctatgggacagcatatgggacatatgggtccggggccagggctctggatggggaaggcaggggacagggatgactccggagggccyrgcggaacgtgacagaaggcagtgctgtgggayagtgtggagagcctcctccttggaatgggacagtgggggccgcaggccgatttctgaactagctccctggcagttcccaaggcatgagcgtaggaggcagacctagtcacacctgcttttgggagttacggtgggacttcgtcaagggcgccagctgcctctgagagctcctctacttctcaacctcttcctcagccttcggctgtctcagcaaccccgggattagagcggtggggggagggtccggtatagctcagccagagggtgggctcagccaacgaaggaggctggcggtgggcatctcatgctccctccggctcctgcccacctctctgctgctccccttctcctaaggatgggagtccatagttcagaggacttcaggctgctcttggagccctrtgggttccaggtatgctaggccaggtgcgccgagatgggaaggcccggggctgccctcagctcctccacccacagctgcagacaggcagcagggctttcttccatttggctggcctgcacttccccatctgaggaaagccttcccggcaagtctggccctcagatgctgtggaaaggactactgctgaggggtcaagctgcccagcgacccccagcctagctgggtcctgcacaaaagggacccggaactgaaggattcggcttacacaaggtcaaggcccccgccatgggccaaccctccctctgttctgctcacaccctgcagcctcaagctgggcagcgccttccctcggggtgacctggcgcagatggagcagagcgtggggcgcctgcgctccatgcactccaagatgctgatgaacattgagaaggtgcagatccacttcgggggctccaccaaggccagcagccagataatccgcgagctgctgcacgcccagtgcmtgggctccccctgctacaaacggtacaggagaggcgggcgaggccatgggagcaggcacccagtgaccaggcttggcttctgctcgtgcacggctgtgcaaatgccttgccccactgctgggggagaaaagggagtgtgtgtgtgtgagagaaagtgtgggcgaggggtgttagtgtgtgtgatgtgtgtaagccatgtgtctatgggtgtgtcaatgtatgagtgtgtgtaagggtgtgtgtgtatgagtgcgtgtgtgtatgagtgtgggagtgagtgcgtgagtgtgggtgtttgagtatgtgtgtgcatgtatgagtacgtgtgtatgagtacgtgtgtgtgtgtgcatgtgtatgagtatgtatgtatatgttcgtgtgtatgtgcatcttcgtgtgtatgtgcataagtatgtgtgtgtgcatgtatgtgtgtgtgtgactgtgtgtatgagtacatgtgtgagtgtgtgggtgtgtgtgtgcacgcctgcccatgtgcacagtcactggggtggcccggcctcacggctgctctacccccgcccgcctgttctgggcccctgctgctcagcctcccggcagcccccgaagagaagctgtgccccttccctctggtcagccccatgggtgggtgagtcccaggtgacatccctggtggtctgctcccaatgactccatcctgtcttcatcacagggtgacagatatggctgattacacctactcaactgtgccccggcgctgcgggggcagccacaccctcacctacccctaccaccgcagccgccygcagcaccttccccggggcctgtatcctactgaagagatccagattgccatgaaggtcagggccctgcctggagccaccagggagggaggccctgacatggctccagattcytgagtcattctctaaagccacyagaaaatcagccagccctcygccttgaggcaattccttaatcagacccagtcaaagcctcaggttcttacccttttctgggaagaaagattcacyccggccacctgcctgcccagcagcattccggcctcccaggcctcccaccgtggcccagatactgtttcacctccctccaccttctcgctccaccctagtgcctcccagagccccccaggagggttctgagaccacagtgctctgtgcctcagtcccgtgtgaaggggccaggggagggctgtggctgctacagtggcgacggtatctgttcacttctacagcatgatgaggtggacatcttgggcctggatggscacatttacaagggacggatggacacaaggctgccaggcatcctccgaaaagacagtgagtggagtccagaggcccccaggcacctcacgtgggtcccacagggcgtgcatccattgtggggcctggcacttttatgggccactagaccctgggtgtcttccttctccattcccctcactccaaatgtgcaggtctctcgaaaagccaccaagtaaatgttcacaggtggaggacagctgtccagcctcagccatcagctgggatggggtggccccgtgttttcttgccagcctccatcccggctgcactgctgggctctcctgtcttggcctctgtccatggcatcatcagggcctcctcctccttcaaaactcagcacagtgccctctgctgagccccaccgcttcagcccccgaatgcccgcctcccgtggcaatgcccgaagcctgcgctttgtcacttcccatcatgcatttagctgtgtatgcgcctttctagatgcctcccttcctgccctggaaaccccaggtcagaactcaccccacacctggcacagggctgacgtgtgcaggtcctcagggactctgtgtgagtgggtgggtggccacgagaatgaatgaagaccgcttctctggggcatagccacaaattcagaatgacgaggaccccactcagctgaggccggccatgaccagcagccctgcggccctctccccacccccaggggttcccacagagctctcacygctgcctcagcactgacccttccctcctgtcccccatcaggctcagggacctcaaagcgcaagtcccagcagcccaggccccacgtgcacaggccgccatccctcagcagcaatggccagctgccctctcggccacagagcgcccagatttcggctggcaacacctcaggtagcttccctctgggtggggcgtcctgccaggcctccccgctggccctgccggccccctttcctgctcatgtagggcctttatctccccggagaggggagggcctgggagccgaagggggggatgggtgtggaaaagaggaaccccgagtgactgagtgatttgtgccccttctgggaggtgggtaggtgctgttactgtcccattccacagaagatgaaatagggacagggtcaccacccacatctctggctccaggtccatgcccttgccctgctcacgtgcactcactgtcatggagctcgtgcgcctgggctctgcatggtggctgctgggcacaggccatgcccgggtccccaagaggccacgaccctgtcatggaggaacctctctctgcctcccgcctggaagatcccttgggtccttgatctccgcaggagctaagttgggcctgaaggtcaggagggtttggtaacaaggccctgcagccaggaggctggatcactgacaagtgaccctgggcaaggtcactcttgacaagggctctcccctctccagacctcagtttcctcgtctgtcatcaagggggtgctgggttagtgctgcttggagtcaggccccccccaagaatctaataaaagctgccgaccttcctcctgtaaaacagttatgcacccacattccttgtgaatgtctgtgggaggttcagggaccctccccaaccagagcctccaccctcccctgcccctcggctagatgctctccagcatcactccagccctcagtgaggacccggcgctgagggaggaggaaatcacaacagaaaagtggctgcggtgctcatggctcctcagcatcatccagggccccccacagaccaggtagtttaggagctttacatggacgaaccactttcaatctatgtaccagcacttagaggtaggggccgttagcaccacttacagctgagaaaactgaggcacagagaggtgaaggtccttgctctaggtcacacagccaggaagcggcagagctggagttcaaagccaagccctctggcccagaggctgtgctgggaacggcaggtctcagtggtggacagtgagcacatgactgtcaccctggctcccagaactctgttttcttgggaatacttagctcccttctcccagtgtctactctaagggcactgaaaatgccctggaagcaggagagagggactggtagtctcaggaaaattcctgtgcctgttggtgtggatgtcacctcgtgtctgtattaacaggaaacagtaccaaagaggcagctcttggctcctgcagaaggacgtgtttgcttatttttcattcacaagatcatgaagggtgcttcatgactgcttaggagctcagatgggcctgcrccgtgccccccggccccggcagctcccctccagcctgtgtcagcccagcatggcgaacagaactgctctcaacctccctgggcattgggcaggctggggtgacccctggtgggcttggggaatgtgttgagcaacctcagcacccctgtcttacagtttcttctcgtcaacagaaagatagaccttcctcygagggccgtctctcccagccgaacacagcccacccgcccagctccgcckcggtggcaaacagggggctggagaggcacgtggacatgcctcctggggaggggctcgaggagcccacgcgggggccgcggtccagcaccgctcagtgagcggaggtgtaaataaacattcaggaggaagcttaggtgtggcgaatcgtctctgacagtcctggctcaggaagatggagggaaagggaaatacccgctgttggccaggcagccccccacgtgcctccagaccacccccaggcccgcccactcggtagaccttctcttggacagtgggtctggtttgtagcctgaaagtgagtcctcagcttccattcttcaagggcgccggggcttcggagggctggacactgcactggggacagggagactcctggccccgggaccagctgggccggtgctcaccccaccagctctctcctggcctcagctagattgggggtgccctgccttctggctctagacctgccttctagcctggggtgctggggcccgtgctgtcagtgtccagcactctgggggtgagggtggcagctgcctgctgcgctcttgctgctggctcagggtggttcctgacccctggcgtgggattccggggaagcagtgccaatggctggaggcgaacccctgcagccggctgggcaggtttctgtttgccgccctccgcttctctcccttgagtgggctgctgcagagacagccggggcctgaaggcacagagcaggggctgctgtggctgtgacccagtttccccattcccctcctagaaaaagacatccaggcggcgggtggagaggtggtgcgagcctggcgcttgtcgcttgtgatttgcttccctctgccctagccccaacacctgcaggcaagggactcactaaaggtcttggcaggtgaggggacagaggactgcaagtgagactgagcttgggccagtgcagcaactgctagagacgagcccctatcactgctgcaacccacttgaagctcctgagaccaaggagtcccctgacctcctgagcttgggctccagccagattctaggggtcccccagtagatgagagtggcccccccaccctgaggtttataaagccctgaggtcaccaaagcctttctgcctcagaggctccctcctcagagaaaaggaagtgctcagagttgacaaaggggctccccccacccccagttcccatctccccagcatgggaaagggatgtctagagtaagaggcccgctttggggtgtgaggagacaaaatcacacaggaaaggaaaatgtggcgagaaacagcccagaaacaggtttctggcccctgacccccgcgtgggcaaagcggggcaggcttggctgggtcgggtggccgctccctcctggcctgctcttcagagaccctgggagtcttcatgtgatgatgtcatgctcagagctggacagaagagaggagctgctcagacagcggagccccgggcgggcacccctgggccccagcccctttctccccgggcaggaggcagaggcagggccacccctcccaggctccagctgggctcctgttgctctcggccccaccctggctgtgaaatgtcagaaggtggctcagtttcccgggtctagaagccaaattcaccagcttggcagggaggtgcagcccagccctcctcacccaggccttccccacgcccacagaaggtcccagagcgacattccctaagccggccagggcaacccccgaccattcccgcacctgggcatggcccacacctgggtggaccccggtgcaggcccaggaggcctggggacgtcacagcctaaccacccacgtgctgagaggggctgccccttccagcctgggaaagcacaggtgggcaggggcggggggagggggaggagtctcaggggtttccaaccaggaaacaaaactgaaaggacgaacccagcttccaagcacgtccgtgtcacacgcaggggtggaggggcagcggggcccaccgttccgctccactggaggaggggctgccccaccgtgtgaggggcccgaggaggcccggaggcaggatgcggtgggtgccgggcccggcccctctcgacttttatttcacttccggcctgaacctccagaacccttgtcctgcctgtgttccagcaagacttgggccccgtagaccccagcagagggcgaggcaggaggacgggacaggaaggggctgcccagactgtatggcggtgaagggcagggctggaggaggaatcccagccacgcggccatcacccccatcagccaggtggacaggctccccacgcagctgacctcccgagcagcaggaccacctgaggacgagctgctgggtcaggaactggtaacctcgccccatgctgacgcctgcagggctgcggggaagggggaatggaagcaggcccctctggggacccgccagccttaattgaactttgggtcatggccactccacaggccatgacccaaagggacatactgcccccgggaagctgaggagaggagtatcggagatgagcccagctggaagatgcttcctgggagggcctgggggggccatcaggaggcccccagctagaaggaagctctccccactgtagatgaaaatggcttccagctcttctcactagggctctgtgggtgggggctacaccgatggggccaagaagggaaggtcacagaaactcaggacggaccccggcccctctctcctccccacaccaacctggaccttgctgtcagagcccctggtgtgaccatcccacagcaaaaacatccagaccagcccagtggcaagggacccccaccacccctcttctgaggagaccgcttttcccaccaacggaaataaaagcaccgcaaaccagggaagttagaaaagtctctttttaagtttttaaattaaaatttcgccctggtgagatgggattctgattcgggaactaaacccaaaggcaggctctccactttggacctggacacgcagcgggaggggcagggcgcccagggcagtcaagtcccctgctgggcagagcctggcctttgaccaaagtcagctcctcagtgccacatcagccctgcacattcagcaggagacaggggtgatgagctatggggccacaaccagcaatcagaggtggggaagaggccatggggagagagccctgataccaagagggccttccacagctttgacctcaggccctcctgggacctgcagctgctatgtggctgcccagtgactgcaggagtggtgtcctcttccagattccagaaggcatggctgttaaaggaggcagctgacagatgccttgtgcccacaacatcactccatcagctctgcagcatggcagccctacccccgagcaccccaggtgtgccaggcccattctcacgcacattagttatatttatctattcatatatattatagttatatattaaaaacagaggaaaaacttgcctgaaaaactcctgaaggacccacgtggcccaggaagtttactgtccccccgacccacaaaaattcttttataaaatcttccagtgcgatcttcgggaaaccccctgccctccccggctcccccctccctggccctcctgtgtccccacaaccctgggctgcccccagctccagcccagcgcccggcggcgtccagtctcatctctggccgtccatggccgccatggctttctgctgggcgcccccctgctgtgctcctgggggccacgtgggctgtgggcggtggaggtggtggaaggtggtgggggaggagggcgggatccagggcgcctggtggctgggcggggacgaggcccagaaggggctgaagtttgcaggtggggagcaggctgcggctgtcatggggctgttgctgctctgcaggccctcggaggcgcggagcttggagaacatggccagcgcatcggggaagttgggcggcgtggcaggggtgttgctgggagtgcacatctgcgggagagaacacgggtgtggggaggctgcctcgggggtccccgagccactggatggggcttacccaggccagccgctcctttactcccatttttcagcttcattcattttcgcacaagcagcttccacaggacaaaagtgccctctccccgaggcaatacaaacagaaaacaaggacaaaacccaagaaccttatcaaaaccaacggggtttcatgaggcctggaaatgacaccccgaggagcattcaaagtaaatggttaattgcacccaggagctaaggtgtcagattaaagtgaaagggcaagggggcagcccaggacaccactgttccgcaccttccctgggcagggagaccagctgactgccccaccagccaccctcagatgctcccaggctgctaggcaagggagagcggccagcggggaggctctccctcctgtgccaaccctggaaaagttaagccaccttggtggatgggttcacaccacactaagggtgacagccaccaggccttgaaggctttgcctcccttaacaatgacacttagtggcttcaattatcctctctttatgacaaatgaggaaactgaggcccagaagtcaagtcacttgcccgaaaatgcacccacagcagagggcaagttgagaagacggacctccccagctcccaagtctgcaggcccaagctcttaacatctactgggccacgctgcacagagtcaagagcccctttatatctgggccccttgaggacacaaaccagggatttcaatgtcctgtgtctgtagcctcaggccacaaacacagctggcctgcccttgcctgcaggctggcagtttctcagtctgtccagcccctcagtcctcttcctgggggtagctacagtcccccatctgctgtcttctgtcactaccctgggggcaggggctggagtgccatccaggagcacctcgtcagcagcatgggcaagaggcaacacagagaacaagaccacacaaaactggctgggacctcaaagctgctttctccctttcccaggaagccacaggagtccttctttgaatttctcctaattttagcaacactggcccctcccccaggcgcaggagttgggggaacgacttgagggctcttcaccttgaaagagggagctttggcagggcgcagtggctcacgtctgtaatcccagcactttgggaggccgaggcgggtggatcacctgaggttaggagttcgagaccagcctgaccaacatggtgaaaccctgtctctattaaaaaatacaaaaattagctgggtgtggtgatgggcgtctataatcccagctacttgggaggttgaggccggagaatcacttgaacccgggaggtggaggttgtagtgagctgagatcacgtcactgcactccagcctaggtggcagagcaaaactccgtctcaaaaaaaaaaaaaaaaaaaacagagggagctttcacagctagaaaccggaggttgtgtagggggtgtgtaacatacatggaatggggacactagcacaccctgtccattgagccccacaccatgtcagcacccagggcaccaagggagctctgacccttgcctttctaggggtcctcagggggaggccaaaggacccaatgcagaggcctggccccacccagacctttcccctcctccctccactactccctgccccccccccaccctctggggatgacttctcggcagcaggaaacaatgaatgaagggtgggggtggaggccaattgcatcacagcatcgtgaccgacttccccagttccccgccagccagcgaggcctgtctcctcaaacagccgccagagaacagcagggatgatggctggcaggcctgtggtggcctgcctgtgtaagcttgggcaagttcctgaacctctctggagcttctctctgcttttgtaaaatgagggttttgaaccagatatgccctctcggccagttctcaagaaaacccattgtcccctgtacctttgtcctcccacttcaagtctgtagtgcctttctccacttccaactgggaagccctccttatcaactgggaagcttccaactatgggaatctacagtaatgtacgggacaaccatttatcagttactcatgac

SEQ ID NO: 97950 - DNA, 25759 bp, Homo sapiens
cttagttgatacatgaaggccaagttcaaatcctttctctgtgacaaaatataaagagcactgcatcaggaattgagaaacccatttcttacttacgcactaactatccataacaattcctagcttcacctttttattcacccataaaactggtgataataccatttgtcctatttcacaaggcactgtaaggttcaaatgaactgatattccaaaaactttaaggctaaataaatgtaaagtattatttaaaaaaatacctttcacataatttgcgatggcttcttttgtgtccctctctgggtcaatgctgatgaaaagtggagttagatctggcagagttgtaatgctatctgaaagagagttccaattagtccgtattcacaccctaagggaaaagacaaagaaaaccagcaataacaggagagtataggacgtgctggacagctaggtgttttggaagcagatggacatcttaacattcaggtgaagaggaagaggacggggaaggggatggagaagggatggcctttaggaggaggagacccatatacagtagtattatctgtggtggataatacaaggttacatatcctatcaaatgcctgcaccagcacataaatgttcttcccctggataatgtcatgtggctatcttatctctgaatccactccagtatctgtagtttttttcactcccaccatatctcaagggcaagaaggtaaattgttaataagagctgaatatcctgaaataattcactgtatggaggaggcacccttccttcttactagtactagtaaaatgccacagactgcagaccattgcaaagatttcctaatttaattgtcacaatcagtggggaagaggcaatggcagcatcagtgatgcaaaggaagggacacaaaagtagagttaagggagaccacactgacatttttaagtgatctaacatttaacatcaaaacaagcttctttcagtggagaataaggtcacaagattcaaagcaacaaacaagccaaatgctgagattttatgttcttacaaatcacataattgcaaaaccccacctaacaataatacaagggtgtgaaaaacctggtaacatgaagtaaacatatactttgtttagttagtgatggctttcttacctatttcatccacgacttgaatcatcttttctagttcttctggacagacatcagggcaatgagtgaagccaaaataaatcaataaccactgacccaagtagtccttgtcagttttacgctccccagtatgagttgtgagggaaaacggtcccccaagtaaaggcttgccgatgtgtcgctgccgttccttctctaactcttaaggagacaaaaacatatcgacaccaaaaaaaaagtcaatttaaccagaggtactcaaatacctgacatatggcccgtactatgctactcatggtgggggcacaaaatgtggaaaaaacagtttcagttttcaagaagctaaaaaaatcttttcagaaaaataagcacaaaacattaaaacaaaatcaaatgaaatgctatggtatgttgtaaaaaaggaaaaaatatttcttctttttcaggaacaattcagtcctaagccattagctgtgtccatgctgggggcagggaggggctgcagtggcctagagctgaatgtctaaacaagtggggtgcggtgggtggcctggcatagggagtctgatcctgagggtgctaaggagggcagctgggtggggaggtgatagtggtgacgggaccttagttacacacaggaaattgatgaaataaatgagtatattaaagagaagagagttacaataggaaacaagagtcaactatggagagaaagagagctaggctgaaccctgcagtactgcaaatacactgcaggtactagtgtgaacttctatctatatagatataaataaatatagatgtacataaatatatctattttctcaccatgtccactgagaggaccagggagcagacacactccaagaaccatgagcccagaacctgacttctaaatatcattcttcactaaaaggaaacagctttttggagaaatggctgataccagggttgcggcaaagaaagtgtaaaatgaggctggaacctcttgttgtggcagaaggaaagcagaacttagagaatattggagacgtgtcaaagacacagaagcctgctccaagggggctcccgctgatcaatctgggacaacttgggcatcaaaataaagagaatatggatttaaactgaatgaatatataggaaacaagtccacagatataaataaatgaatacattgatagtgggatggggaacagaatatgtaagtatacgtatgtcaatacaaatcatgaaacaccattaattacatgagtaacttttcagtagaaaacctgttagacacacattaatcaagtgatcaaactggacattatcagtaatgggacaactggtactatgtggtatctgaccagatgcacggagaatacagcatcacttttgtgatattcctgccaaaggtacacaacccgaatgacctgaatgaggaaacatcagacaaatccaagctaaggggcattctacaaaataactctcctgtaactgtcaaagctgtcaaggttgtgggagtcagttaaagcctgggaaactgttacagatgaaggaggctaaggtaaacaactagatacaaggtggtatggttctgaaacagatccttttgctctgaaagacatcaagtggcaaaacttggaagactgaactgtaatccagcctgggcaacaggagtgaaactctgtctcaaaaaacaaacaaataaacaataccctgaagattatctgaacactgaacagcagcaaaattatcagcgtcaattttctaattttgatggttgtattgtggttatgctagaaaaggtccttgtttgtaggaaatacaccaaaaagtgtttggagctaatgacgcaacatgtcagcaaataaatactctcaaattatttaggaagacttttcagattatttaataatacattttttaaataaaacaaacgttagaattgcacttgaaattccaaactaaagtcaaaaaaagcttccatattctagaattttcccgccacaactttcctagcttttgtttctttgtgaaactaaagaaacttactgcttattagactatgaaaatcttacccaatactacttattatgccaaagagtctcatatatatgtatgtcagtacaaaacttaacactgctaagttcctaaagcctatgaattcccagatttaatcattaacctttgtatataatgttatcaaaagagactccaaagaatggaaagatttaagcaatactttaaagatttacctaaaacctctaaaccaaatcttaaaagtcctaggatattcactaaaatgcaaagttcttataaataatttctaaatatttcaagatgctaatccagagcagttcctggcatttcctgaccaggctcttttcacctccccctcatccacagagggcatgcagtatctactcgcactatgctccttgcctgatctctaggaagccttctcaaatctcaaggctgggacttgcttttgctctcacaacatggtaagcttccttctggcctggcagaatcgcatctagtaaaatactttacttctgtgtctgtttcccttccgtgtgcacctcaaaggctcgactacatcttactcatcttcgtaccctccagatttcatcttgcccagtcaaatctatccacagtatatcttttaacattgttatgcagtggtatcctagcttggatcctggaacaaataaaagacattgatagaaaaacaagtgaaatccaaatacaatctgtaatttaatagttgtgtgccatttaaaatttcttagtcatgaaaaatgtgtcatggttatacaagatgttaatattaggggaagctgggtgaaaggtatgtagaacctatgctatctttgcaattttttggtaaatctaaagttgtttcaaaacaaaaagctaaaaaacaacaaaaaaggtgctagtccatagccaggaagacctttatacagggctgagcagatgataatctacttactctctgccttttctttcttgacgtgcttcattccagccagtaaagctcctccaatagcaaatgtgattgctaaagacttccaggaaacaggctactggggcagggatttcaaacataaaaattctagtaagatgcaaacatttaaccatacaaacttattaaagtagtttttaatatacatacacacaggccatgatgttaaatgtgcaaaatgtttcagggatgagaaaatgctcaaagtttctgtggatgcagttaggtctgggatctgaactacaaaggcattcatctccaggggaaagttccctaagtcagttctcttcatgtaaataaaaaaaaaaaaaaaaaaaaaaaaaagctcaagtaccacgattgttactatgtgtgaccctagctccagtaatgactttaaaaccaattatggccgggcgcggtgggtcacgcctgtaatcccagcactttgggaggcggaggcgggtggatcacctgaggtcgggagtttgagaccagcatggccaacatggtgaaaccccatctccactgaaaatacaaaaattagccgggcgtggtagcggacccctctaaacccagctacacgggaggctgaggcaggagaatcgcttgaacccgggaggcggacgttgcagtgggccgagatagggccactgcactccagcctgggcaaaagagcaaaactccgtctcaaaacaaaaaccaaaatccaaaaacacacacacaaaaaacaattatctgcttatgctgatactgagataaatagaccaaacgaaatttgggaggttaacttaactctggcttccagaagtaacaatgccaaagtagaagaggaatctaaaagtggagcttcttgcaaattacacccattatttctttgtacccttattcaactccccaaatgaagatgatgttggccaactagactaggcctaactcattaaccttcccgtagctccaaaaacccacttctcttaccacagggtagtggctctcaagttatttctgggtcagaattagaactcgagagaaccccaagaaaaaggcagatccacacataactaagttccactttttgtttcaatttcaacgtatacatggaactctggatggggctcaagtgacaaattataaaagtcctctgacttctcaatcacggtaaactttaggttcatacccttaagaaaacctgaaacttaattttttttttttttttgatggaaacgctaacataaaatccaagtcggggcatccagccacgtggagagggtgtaaagtctcaagttctctgtggagaactgggactacccgcaaggcacgggaaatgtaggatgaaattccatgacccaggtaaggcgcgcaagctaaggacaactttaggggaggcggagtagtgtctgaggttacgaccaagtgggatgtggccgctgggctggccgacagccgcgacgagcaccagaagggttccaggtgtgcactcaccccgggcttcgaggggcgcgtggagtctccggggcccttctgcgaccacgggggtggcggcctcgcagtgctgaggggccgggttcccaggcaatagccagggcgccccgaggcacgccacgcctccgcttgccgcgcgcagaactgcctcagcaagactctcgcagtcccctcggctgggccccaaaactcgagtccgcgaggcaagaagcgccaaagttggccacccagaggccgcataactcgtccgggtactaggaccagcatcgccatgagcctcggagaccgggtctcctttgaccctccccgcgatttccggtagcgttccgcttcctccggaagtcggaaggagtcgctctgtccgtcccgctcgttggtggcgctgttacatagcccgtagtcagaggcctttcagcccargggccggcgcacggtaggtagttccctgcggctggaggcgggtctggcgcgggctgggcggtgctgcggggccgcgggacagcggagcsccgggaagggggctgccttaggggtccaggtgcgcggctgggccgaggcaaggcggcccyaagcgctgggggcgccccgctttggtcgtgggcttcggtgaccacagctagctcctcgcgccggggacacccccacctcggaagagagaacacactgcctagagacccacgggactgggcagcccccataaccctaccttgtctggccgactttgtcaacctcgtcctgccggccaagaggaagtgccagaatgttgactcctttacatctttgaaatagaaaccgacccattgcgattgaaatagtctttaacttaaaaaaaattgctaattaggataatttgagtggttagggcggtctggaagaactttaaatgcccagcgcttctagttatttaacattataatgtaacctaattaataaagcatagcagtgtgtaaagaaatatagacagcatgatatcccatccgttaacttagtcttcctgggtcccagtttcttaaaatactctcacggactcccttgctccctacagtttcgttatttgaagtttgttatgggttcctcatctggaactgcttatgttccttgttaatgaggccaagagcattcgtaggtttttcgttctttgtgaaagtctaacttcatttcatctgcctttatttatatcttaatatccgcaatattaaccactccctccccgcccctacctcggtggttgctttacaaaatacagagaaataaaaaaaggaaaatcgtcctctarttatcttccttaactacagatcccgctcctgtgtggcttttttttcccccatgggaccgactctgagtaggagaaactcgtgctctgatgattgttggaccagagcatggttgktttgcttgttttmtatgagttagccaaactagccaactgttctgttctcyaacccagtaacggaacatagtgttacctgtgtttcttgattcgcggttggactasaattttcagaaatttctgccaaagttcttaaatgtttgttcagcacttcaagtcgttaatcaaactatttttttctrtcttatagttgcctgtgggtaggatttttgctcttttatctttgtgtatttgtttgcccagggataattttttcttgtaattgacaaaaagacataaaagtaccttgtgtagtcaggcagatagcatacaaaattattgttcatctctgattgcccaattgtaggttacctgatcagccacccaaattaagattgaagtcagtgtttctacctgatctattaaattttatttgctaaagtgcttcttttagtagcaacttcttcatattaattttataatattaaataaaatrctatcattgaaaacagttcttggggccagatgtggtggctcacgcctgtaatcccatcactttgggaggctgaggtgagtgggtcactggagcctaggagtttgaagctgcagtgagctgtgatcgggccactgccttccagtctgggcaacaaagcaagactctgcctctaaaaaataaataaaataaatataaaatatagttcctggctcaaagtaggtgttttataactgcattttggatgaattgctagtaacacctgagcctgatggcaaggacccatgaaactttagtgccagaaggcgcctacagtgttatcccttatagaccttatcacttttattactgctgtgaaaccaccaaagtcaccaaatgaggtttatrttttgttttccaagttagatatttttcttttctttcttttttttttttttttttttttgagacaaagtctccctctgtcgcccaagctggagtgtgcagtggtgcgatctcagctcactgcaacctccgcctcctgggttcaagcgattctcttgcctcatcctcccgtgtagctgggactagaggtgcgtgccaccaggcctgtctaatttaaaaaatatatatatttttagtagagacagtgtttcaccatgttagctaggacggtctcgatttcctgacatcgtgatctgcccgcctcggcctcccaaagtgctaggattacaggcttgcgccaccacacccggccccaatttagatatttttcttgagagaagcagggcatggattagtatcatctgatattggttctatcaatagtgatcagattttgttcttgacataactttaggctggtttgactggggacagctaggccctaacttttgtgaacttcccagcaccctaatgtgtttacttcawttttgttccaggcccctgccccttgtgcctaactcctaaccacaaacatttcctgccccaacttaactttccttttggtatggtatctgcgtagaaaacrtwtgctgcacccttaggctaggagcctctgttacaatagtttctcctaacaaagtctctctttattaatctctagactttccctgctgcccccttcacctttgacaatagagtgaagaaatcatactcttttcagggtagagctacttcttttacaagttcattattgatgcttgaaggctttccacaaggaacttcagccttctgccaatcttaagtattggaaaagttttattagtatgatcttatagcaacttttcagtaattaagcatccttgggtatgggaggcctgaggcaggtggatcacttgagctcaggagcttgagaccagcctgggcaacatggcaaaaccctattagtatgatcttgtagtaacttttcagtaattaagcatccttgggtatgggaggcctgaggcaggtggatcacttgagctcaggagcttgagaccagcctgggcaacatggcaaaaccctatctctacaaaagaaaaaaaaaaaaaagccaaaaaaagtcaggtgtggtggtacatgcctgtagtcttagctaccagggaggctgaattaggaggatcacttgagcccaggaagtcgaggctacagtgagccatgatygcaccactgcactccagcttgcgcartagagccagaccctgtctcaggaaaaaaaaaaaaaaaaaaatctctcatgcctaaggtagttttctcaaaatactggctgcttatcctgtactatgayrtgataggamttttgagagcaactcttgtaaacttttctacattattctcttctattaaaatgttgcagtagtttcagttatgaggctcattagacagattttcagatatataattttaaaattattttcttaacatgcrtatagtactttatggtttagagatttacagagtaatagtttactgtgatcataactcagttgaagctcaygataacctattgagggttattttgcttcaggaaacacgaggactataattcagttctgggtttttcatttcaaagggttcagcacttcataatacctctttaaaacttagacagcgtagcatgtaataaatggtgcaggcaaactttgaaaacaaagttcactaaaaacttgccattctcctttctattcaaaagcgaaatatttccttaggtcttctaatttttccagatttgattttctctaaagttttgaattttcttttytaaaaaaactttatgtatactttttttttttgagatggagtctcgctctgttgcccaggctggagtgcagtggcgcgatctcggctcactgcaagctccgcctcccaggttcacacyattctcctgcctcagcctcctgagtagctgggactacaggcgcctgccaccacacccggctaatttttgtatttttagtagagatggggtttcaccatgttagccaggatggtctcgatctcctgacctcgtgatccgcccaccttggcctcccaaagtgctgggattacaggcgtgagccaccacgcctggcctatatrtacatttttaaacacacataaaagtagttagaataaacttcatgcacccatttctagcttccacaattatcctgtactcactgatttttttgtgtgtctgtatttgatggagggagggagctattttgaaaamatttcctgacattagaatgcttattaattctaagtttcctcactggaggtggctttgagtttttgatctctctgttcaccaggaccaatctttctgagctccccctacatgtccctgaaccaagaaaggaaaggctaaactcgccaggagagtcaattccctgaccacctggttctttttgcactgccgtactcacttctgatcctatctttccctgaatatgtttctgaaatctgaaatggccccaaatcagaaatttgagcaccaacatgaagctcaaaggaaatgttmattggagcattttggattttggattttcagatcaggaatgctcaactgttaagtatattccaaaatctgaaaaagtccgaaatctaaaacacytctggtcccaagcattttggataaggagatactaaccttatttttaaaagccatgtatattcaacactttggatctctctttttaccccagaacacatcgctgttttgaagtgtgtgccccttggtgcttctctccacattaactttccttaaaaattgccagttcttaggatagccttgagtttttctaaactgaacttgttccagtggaaggtgtatttgagaggattttggtatcaaatgacagaaaatcaatttgatttagctttaagcccaggagaatttatgtgctgayatgtgtaactaaatgaccagtgttctagcagggacaggtgaatttaggtattcaactaatgttttcagaaatctccatctttccatcattcagaattgtttctttctatgttggatttcttgtcagttcattttctccaaaaattgaagccttagtttatcagcgtttgtagtagtggcagtgcctgtcccagggctgatgcttattgtgacccaggttgagttacatgcctacccctaactggccagaggaaactgggtttttacgggccaggtctgggccatgtgtctgctatttcacttccccagccagtgaatggggttggaggtcagaccacaagaactgagagtggggaattggataaatgcctagagaaaaattgggtgctgtcaccttaagarcaggaaatgaatgctgggtaggcaaaaataacagctgtccactggagagaagatccaattcattgggactaaatcccctctaggagatccacaatacatattatcaccataaaggctctgagtttaaagataaaaacaagctcacttggcaggggataagatcacccccagaaatagttttctcttaagagttaatataactcttaatggttaatataaccttaatggttaatatcaccaaggttaatacaaccttggtgataatattcatgttatatacttgctaagttatcttctgatttgattcttctattaatctgaacttggaatcgcaaatatttgaaacctaacataaggctaaagatttttaaactgacttagatggatttttgtcctgtaattgtattgaagttacccacttttcaaatcagattacctctcatttatacaccctcatacatactgacttgatatctaatgagattttcaggtaggggctgcaggaagaaatgggcaaattaaaaaaaagtatgagaacaccatgtttaaggatttccatctctttctggtgctgttacctattttagggctagttatacccaaccagattaaggaagaaagtagctgaaactcataattaggtggattaaagagtgtatcattagtaacaacagttttaggatgaaaagaggcccctaattctcaaatargtcaaattgaagtyttatccttattccaattgtggagttgttcttttcatctcttataggagtactcttagagttgggattttacatgtccacagaggattaagtaggaactctgtagatatatttgtcaaatgactagagatggggagtctgaaagtaattttagaaagtcaaatgaatttttaggttttaaataattcagacaccacagcaacagtttattactatagtctttatgacaaaaatcgttgacaatttagaatcttggcctttgagttttgtttgaatcattagcgttctgggctcttttaagagattataatttacagtttaaacaatcgaataatagttttttcaagtttaaatcttgctctttttggccactgaggcagggcagagatcatttgtaagaagaaaagatttcatatttttggttttgattgtggggtagcttaatattcaagttaaaaagaaaaaaaaatcctggttcaaattaggatccagggctgggtgtggtgtctcttacctgtaatcccagctacttgggaggctgaggtggaaggattgcttgagcccaggagtccacgaccagcctgggcaacatagtgagaccctgtcaaaaacaaaaacaaaaaccacaaacaaagcaaattttaatcccagctattgaagaaccgggaaccactgctcacagaaatgataatagtcatgtcagttagtttttgtgctggatttttgttgttgtttaaaattattcctctcctttcatatctgcattgcctcccmctcacctattcagatataaaatatgagaaactgggtgacctacccaccaaggaagagaaaagattcagcctgacacaaaataacccataacaggaaccttttacaaagtacatacagtgaatgaatgtaatacacagctttccaaaaaaaaaaaaaaaaaaaaacttgaagttttgatagaattatttggtgtttgtgggacaggggtatatgtgtgtgcgtgtgcatgtgtgtttaaaatgagtatttcttaaaaattagcaattattccagatttaaattgggctttattagcattagaatrtctrtttattgataggatagtaccttttgtaaattgttactcttctgaaagagwttatcatctgttttacagaagagaaagcaagtgttttagagggttagtagtttagacctaagactgttgggctctaaagcccacgtactttttcctgtaccaagctgcctaatgaattaacctttaacattccctttatcattttcttaagtgaaattgggaaattaaaacgtttataatttagttatcgtctttttactttatttagaaacctgtttggaggttatggatgataaacccaatcctgaagccctaagtgacagttcagagcgtcttttctcctttggcgtcatcgcagatgttcaatttgcagacttagaagatggctttaatttccaaggaaccaggcggcgatactacagacatagtcttcttcacttacagggtgccwttgaagactggaataatgaaagcagcatgccctgttgtgtccttcagcttggagatatcatcgatggatataatgcacagtataatgcatccaaaaagtccctagaacktgttatggacatgttcaagaggcttaaagttccagttcatcatacatggggaaaccatgaattctataacttcagtagagagtatttaacacactctaaacttaacactaagtttctagaagatcagattgtacatcatcctgagaccatgccttcagaagattattatgcttatcattttgtaccattccctaaattcyggttcattttacttgatgcatatgacttgagtgtcttgggcgtggatcagtcttctccaaaatacgagcagtgtatgaagatattgagggagcacaatccaaatacggaactgaatagtcctcaaggtgaattattcctttgagctgagaatctaatagattgtctttaaattcttcagctaccttttattcagcaggaagatggacaattaaggtaaaagtatattgtcacttgttcagggtcaggatttctcacaagccttctcacatggattggttacagttgattcaagattgatttaacagatattttaaatgcctattttaggccaggcactttttctaggggtagatattccgagctgtaaacaatactaacaatattacttttttgatggatggaatggagggaacaaacacagtacgtgggcaagacagatgataaatgaaacagaaacaagattatttccacggtcrtaagtgctgccaaggaaatagagtatgatgttatagagtgttacggaaaaggattagggttgctattttagattaggtgattagggaaggtctctccaaggagaaagatatttaagctgagacctaaatgacaaggaggagtctcccttggaatgaatgggcatagggagttagcagactgagggaaaaacctgcaaaggcactaaatggagtaagacttgagcattgttgaagagcacaggaaagggccagtggggtacaaggtgattttagagtgtaaacggggccaagaatatgtagcggctgagtggacttaagaagtttgcatttttaatataatggaaagccagcgaagtaagcaggggactgtcaagagtgagatgcagtgtgatatatatatatatatttctctaaatgcttgtgatttcctattttaagttgattgttgctaatcagatattcctaaagaaaaaacaagtgtccctacattaactaaatttgaatgtccaaatgaggggaaaaatgacttgatggggctaacttactgaattcatttcaggactttctgagccccagtttgtccagtttaatggaggattcagccaagaacagctaaactggttgaatgaagtgctaacattctctgacacaaaccaagaaaaggtggtgattgtgagtaagtatttaatttatctgattacactaacattttagagattgggaaaagttaggcgttaaagcatactaacaatatttgtgtttcgatatcctctttctataaaatggacacttagtttaaaaatttctattgagaaaccacctgaatrtaagattaacatttaaggatgaaccaggaaaaggtaaakaacagaaacatcttgccatatattggagcctgtgagttggccttttaggttcaaagtcgaatttcctcaaatgagatcagtttatgaagtaatttcttttttaaacattaatattattattgaaatcattgtagattcacgtgcatttgtaagaaataattcagagcaatcacttatatgctttgctgtttcccccaacattaacattttgtaaaactttagtataatatcacaagcagaatattgacattaatacaaaaataaaaactccagaagtttggctttttctaagtttcttttgttttttgttttttgaaccttctctccataagagaagcaagaacccaaaggtgagatgacttcaccatgataactaagacataaaaattaccaagaaacttgactcaaaattaagaacaagctgaattcagcctggccaacatggtgaaaccctctctctactaaaaatacaaaaaagaaattagcagggcatggtggtgcgtgcctgtagttccagccacttgggaggctgaggcaggagagttgcgtgaaccgggaggtggaggttgcagtgagccaaggttgtgccactgcactccagcctgggtgacaaagcaagaccctatctcaaaaataaataaataaatacataaataaataaaaccaagcacaaacaaaaaacaccaagctgaattctaaagtgtggaatccaggttgcaatcagcttataaaggagcttgacaccacactaaacaatttgttagtggaagtcattaccagggcttggatcctttcctcaaggtagggaagccctgagtttcataaactctaatgaagtaatttctaagtgagaaattcagttaggggaccataccaaatctcagccttagagacctgcctatcagcaaagtggccaccaaacagaggccactgctgcccagatgcagcaaaactggtatcacagggcatgtgtgctacaggctcggctggcactgagcactgtgcaagctgtgcctcccacacrgtcacaaggaagttagatttgtattttcatwtagaatcatttttgatgggtacactgccatcagagattgtaggaatccaggggtgcttaaaacatacaagcgtgtatgtgcgcatgggcacgtgaaaacatacacggaactgaatttgggtttgcagcatggctgggagacttggtttggaggttgagattagarcccttggtttagagttagaattgatgtgggataacaggtgagaaggctagactgagagcyggaaggacaggatgccattctggctctggtttatatgaactgtgtagtcctgggcaaatagcaaacctacaaactgcagtgttctcartagtgtatctaatgaaattatgaatatgaaacccctggccaagcacggtgactcacgcccgtaatcccagcactttggaaggctgaggtgggcagatcatgaggtcaggagttcgagaccagcctrgccaacatggtgaaaccccgtctctactaaaaatacaaaaattagccgggcgtggtggcaggcgcctgtaatcccagctactcgggaggctgaggcaggagaatcacctgaaaccagaaggcagaggttgcagtgagccaagatcaccccactgcactccagcctgggcaacargagtgaaactccgtctcaaaaaaaaaaaaaaaaaaaaacctttgaaaatgataggctattcagatagttgattatataaaactatatttctatctgtaaaggtagtttttacttactaatcttccactgatgtggtaaaaacacgtagaaggagcagaagtgtttctgctaacactggaataccaggtgtcattcaagggttggaagagatgagtgcccttgggttgttggaatgatgtgacaccttttggctctataataagtggtctcagaaactaggatacttcttgacttgtgtctgcttttaagttttccactctcagcctgttctggagctgaaaggaagctagagtcatatagccaaacctttgaattttaaagataaggaaactgaagcccaaagagactgaattgcatagcagaatcatggagctgctgacagcactgagactagaatccatgctttatgtctccatcccctttcccatgtgatcctgtgttcttcccttttctttttactcatggcggtacacctatctaatttagcagtctcttacatttcttctaccatttgatgtaagcctagaaactggaaaagcaaacttttaaaaacggaatgattgaagttttctttagtaaagtttaaaagttaaagtgtaataaaaarwttttcttttgctttttaactttcattatggctactccaaggtcatcctataccttttgaattttggccgtgcagttggaaggatagaattgccattagctgagataggggacactgcaggatgagaagtgcgagtggagagggtagggsttcaggtttggaaatagaagtttcagatgcctactagacatcagtggagatgttgagtgggcartttggacattagaagtctgaaattcagaatagagatttgggctagataataaacgtggaagttgaaagagtgtagatgacatttaaggcatgtaaatcactaagagatcaccartgcattcagtataaatagagaagtccgaggaccaagcattcaggcactcctggtaagacgttggggaaatgagggggaaccagcataggagactggaaattagtggccattgaagttggggaaaaactrgaaagacacccctgggagaaacagtggtgtcctggaatccaagtgtttcagggagaagggaacaactaatggcgtcaaatgctgcagggacttgatagatgagtcaatatggcttcgaggtgctggaaagcagcacacgcctttggacgcttagccctaaggtggtaatcagcacatgtatgcactttaaaaaaaaaattgtattacaaacagatattaaatagaagcatgtttaaattttggaataaaaatgaacggtaatagacaaaaagtgatttaatgggaagatgcaacgtgagctgtacttcagagtgagaaccgtggcttgatcatagatgtgttgctgtcagaaattmgaacttctcctaactctacttccacgtatctcctgtggatgccagtataaatcttccctgttttaactcagtttttcatctgaaaagtgggtatggctaccttgatctcatgagtgtttaaagtcccataaatcagttcggaggcattgtttatgtcaatgacacataatccatggcccatgcctaaactgtttgtttatttatttatatttacatttttattttttgagatggagtctcgctttgtcacccaggctgaagtgtggtggtgtgatcttggctcactgcaacctccacctcccgggttcaagcagttcttctgcctcagcctcccgagtagctggaactacaggcacataccaccacgcctggctaatttttgtatttttagtagagacagggyttcaccatgttgtccaggctggtcttgaactcctgacctcaggtgatccggctgccttggcctcccaaagtgttgggattacaggcatgagccaccacacccagcctgttcttttatttagtgttacatcattctgtgtatataacattcatatttaaggaaatcaattggattggattccagcacagcatctgcccagtttcaggctgcctttgcagactgccctgcataggacacccttgatcttcctcggtgtttcggcaacttgagatgacgtaggcctcagagattcagggttttgcctctacagcagcctgtcgcgcctcatgtgaactgtcttacccttcttctatgctccagagatgtggctgtagatggcctagttttcttgtgtgtgaattctctctggtctcagttcatttgcataatgagatagcaatttttttttctttttctgagtactagcttttagccatttatttttatagaagagatatttcttaattggctcataactcttcttttctttaactaacaggccatcttcccatttacccggacgcctctgacaatgtgtgcctggcctggaactacagagatgccctggcagtcatttggtctcatgagtgtgtggtgtgtttctttgctggtcacacccatgatggtggctactctgaggatccttttggtgtataccacgtcaacctagaaggagttattgaaacagctccagacagccaagcctttggcacagttcatgtctatcctgacaaaatgatgttgaaagggagaggcagagttccagatagaattatgaattacaagaaagraagagccttccattgttagtctaatttattttaacttgatagaaaatgagctttgtgtttgtccctcctaaacaaaaaaataaaaatcctctgtctcattgtttagtattcagcttgcataacaaaatgtatttatagtttcagtgtgtgatggttgataaaatactcagaaatgttattttggatcatgtatccattgtaagttagaaacaaaccagggaggaaactgargcaggggtgtatagtcctcataaggggcatatagtcctcatgagggatcttatttggccctacctgattttttttaactttttacaaggagattgtattcacatgtgttaactatgtaacttcaagttcagcatataagctcaggtaagctttttctattcaccctgctgtgtaaatgagctttggacaatttctgctcagaacacctatacttggatttttataggcttgtattcccattttgtaaacaaaattaccaatagttatttcacgggtaagcgtgtggcactcccatccctgtaagaagggcctccagaaaagtcatgtagtcctcttgggattcataggaccaagtggcagtgcagccatgtgccacctggcctggtctgtttgggccaccagccattgctgtgtgaagctacagcaggtaaataaatttacactgactccctttatacactaatgggacatgtttaacaccgttttcatatatgctaaggcttatgtgtagaaacattagatggcaaatggggactattcaggtgtggagaaagtttgattcagggcctaaacaactataagaaataagcatgcctgttgaatacatgggcactatagggatataaaggagtgttagctttctatggctgctgtaacaaattcccacaaacctggcgacttaaaccaacatatacttgttctcttgcagttctggaggtcagaagtctgaaatcatttccacttggctgaaaccaaggtgttggcatggccatgctccctgaggagggtctaggacgaatccttttccagcctccagagctgtacttcttgcattctgtggctcatggccccttcttctgtcttcaaagccagcagtgtagcatcttcaaatctttctttactgtcgtatcatattctctgctgtctgtagtcagatctacttcagccttcgtcttgcaaggacacttgtggtaacattcagggcccaaccagataatccaggtaacccccatctcagggtgggttaatcacatctgcaaaatttattttgtgatataaggtaacatatatccagggattaggacatgtatctctctgagggccactgttcagctgaccacagaggtgactataatgtactcttgcactcatagaccttaccatgaattagacagacatccatgattcaagtgtgtgaaatttgctgtcacacaaagaaaggactgagggaacatggaggatgaatttaattttgttcgaagggattggggatgacatgcaaaatgaagaaaaatggcttgaataagtggggaagagtatatcaagtaaaatagcaaaagcagaggcattgaaggatatgccaaagtcagacatggcaagtcatgctgtgacgattcaccagaaaggtgccgggctgggagaagggggatgtggcaagaaatatggcagaaaaggacaggctggggccatattatggagagccttgaatgatgagccaagagttagaatttaacttgccagatagtgtggagcccttagggctttctgagctggggaatacgtgattagatttgtgtgaaatagagaaaaatggaagaaaaatgtgaaggtgtgaaagattttaataatagaggctgggtatggtggctcatgcctataatcccagcactttgggaggccgaggtgggtggatcaccttaggtcaggagttccagaccagcctggccaacatggtgaaaccccgtctctactaaaaatacaaaaattacctgggcatggtggcaggtgcctgtagttccagctacttgggaggctaaggcaggagaatcacttgaacccaggaggtggagattgtagtgaactgagatcgcgccattgcactccagcctgggggacagagcaagactccatctcaaaaaaaaaaaaaaaagattttaataatagaaatattaaatttaataataatacttaaattcaatttcattaatactcttcaaaagactattccaccaaaagtgccttttatatgcttaactgaagatgcgaaagagactatgaatagtcacataatttcgtagtctgatatgggagaggcatacatgatgaaagcacatcttgaacattactgtctttaagcacagaagtaaacatgacttggtcaatggatagagcccacagggaatttgcaaatgagtctgttttttttttgcatgtgacttcagtagtttattaatactaaaggagttataaaagccacaaatatgtaagcaaaatatacactggaaaactcaaatcctttatgtgtattttactgacccttaagtttcactttgactgttttaatatcaactagatttgttttccccctttttactcattcaagtcttaatcttagataatttctcaccattcagtggccactgtgccaataacaaaaacaaaatacacatacctcctttaacaaatatttatagaatatttactatagtaataaagacaataaaaatagacaaactaccagactcatttacactctcctaacctgtggaaggcactactcgttctttttgagtgaagtatttcccagatctctttcctagatcagaaaaaacagtatctgaccacagagtttgatgcttgtgtatgtaaaatgttgccatctagatacttaaatacaggactgtccaacagaaatgcaatgtaagccacgtaaataaaagtaaacagaaacagataaaatcaactttaatagtatatttaacccattatagccaaaatattgtttcaacatgtaatcaatacaaaaaatattttctgttctttttctaccatgtctttaaaatccagtgtattttacatttatagccccactcatttggacactaaattttcattggaaatactttatctgtatttaggtatcataaaatttgcaattggaaaattagattcaaatacccaagttgttccaaacacaattgtaagttttccaataatcaagtatccatttttaaatgaaaatggaaatgaaaaaaaaaaaagctctcctccctaggattactttggacatccatttataaagaatgtatatagattttgaccttatttctcatttagaatgtagttatagtccctattgccttcttgtttggtccctaattcctttattctatccagcttccctttctttccaagacatgcctgctcatttgattcatctagagttctcctttagttcactgcactatgccagctctggataagattagtttagggctggactgggcatggtggctcacacctgtaatcccagcactttgggaggccaaggtggacagatcgcttgaactcaggaattcaagaccagcctggacaacacggtgaaaccctgcctctacaaaaaatttaaaaaaatttagccgggcatggtggtgcacacttgtagtcgtagcttcttgggaggctgaggtaggaggatcacctgagccccgggaggtcaggactgcagtgagccatgatcatgccactgcactccagcctgggcaatagagtgggactgtcttaaaaaaaaaaaaaagatcggggtatagccctctcttgaatgtctatttcagtatattacccaatccctgctcccctctattttaatcatgggcagccctccgtaatctttccaaacactttatatcttcagagtgttcttacattatctagattgatccttgttactgtgtaagtaagtagatctggcattaatcctattttatagataaatatccaccaggaggtttatatatttgcccaaattacatagttacaaagttaagttagaactcgtatttttaaacttctattctctagccttttccactacattatgacacaagaccctgcagaaagtcgtctggaaaatatcagaccatctcttacttgtcccatccaatcttacatcgaattatatgcacccttaaaaagttatttggagttttaaaactattagcccaaattacctgaaataaactcctggcttgttcccctaatgtttataaaaaattgattgaaaatattcattttaaaaacgaagttcttgaatttatttaaattactgtcttgcagtgagttggccaagaggaccgcatttccttgttaatatatatgtagacccatgagataaatgggaaaagtgtgattacaatggcaatagccaattgaattcttccaccaactggattcctataaagacacaaaaattattataaataaaaatcatggattgctttggaaacaagtataaagactgaattgataaaacacataattacattttagtatgttctcatctcagttgttttattgaaatataacattgatttatagaaattatttatatatatgctaaatataaatccttgtttatatgtgttacaaataccttgtcccatttgatgtcttttgaggaagagaagtcattgattaatttgacaatgttaaagttgatcttttcctaatgatttttgtgctgtttaagaatttccctcaccaaggttttgaaggtattctctagaagttttgttttgctttttttaaattttatcacatatttattaaagataatcatttatagtttataaaaatatactgccctgacacaaaatgttcttgataatggtaattaaaaactactcccacccccccatgtccacatcaatattcagtttagattggtttaatcttgaagtgtaatccagtaagactgaagaccaaacacttcagggtcctggacaggataataaaatactcataagccttctggatccttggattgactgacatcaataagggaaccaatttttgatgttgtaaaagaaatgtgttcatctccaataatgatttcaagctcctgccggccctctcggttgggaggaggccataacgcatcatcctctttggtaatttcactgtcatcaattatactcttcagttcctccatcatacttttatgtacataagcctcttttctgatcatgacatcattcttgtaattgctgtgttggcttatcttaatttcccgtccggtcagaactcaaactccagaaactcgtggctgaacttgcccttgtgccccacgtagtagcgcagataaaagtcactcttcatggcttgcaaaagacaactgagactgaacttctaaaagaaagctgcaccaccgcggtctgcacccaacactctgttttgcttttttataatagacctgtgatccccttggaattgatttttatgaaagttggaaagtaggggttgtttcacttttttccaaatggacattgaatttatcctagcctatttattgaaaagactgccttctcagctaccctgaagtaccatctttgccataagtcaaaaccctacatatgtatagatccgtttctaaattctattgttctatcattttatttattcatccttttgtcattatatgtttagccctccaattatttaggtcttcttcaatttctcccataatgtgttatagttttatgtgtagagattttgcatatctctgctagatttattcctacggagtggattttttgaatgtttttataaatgttaactttttgttttatcactttctgttacttcctgacagaaaagcagttaactcttgtatcctgatccagtgatcatacaaaattcacttattctagtaattttttagattcttttttattttctacacatgtattcatatcacccacaaatcatgaaaattttatttcttcttgtccaatcattgggcattttatttctttctcttgccttattttaccggctgggacaatagctgggacaatagctagcatggcattgagtacaagtggcaatatggccagcctcatctcattcctgatctcagagggaaagttttcaactgttcaccattaagtctcaggcttcagtgtagatatcttctatcaggttaagttccctcctacgcccattttctaagagct

SEQ ID NO: 97951 - DNA, 32682 bp, Homo sapiens
  misc_feature (1)...(32682): n = A,T,C or G
ggggagggcctcagctgcagggagacagggcaaggacaccttgagacactgcccccagcaccgaggcatgtcccccaagaatctaatacctgggcccaacctgtccagttcacgttgtagcacagttcagtctcgacgccctgcagctctggcagtttcccttgcagtttcctccgagtgtgtccagaggctgccccctcatggccagagggacgaacatagaagtgaaggactggggacatctctgcaggtgtcctttgctggagagaggtgtcctttgctggagagatgtgtcctttgctggagagatgaattaggttcctaaaaaataacattaactaagccgggcgtggtggctcacatctgtaaccccagcactttgggagactgaggcaggtggattgcctgaggtcaggagttggagatcagcccggccaacatagtgaaaccctgtctctactaaaaatataaaattagctgggtgtggtggcgggcgcctgtaatcacagttactagggaggctgaggcaggagaactgcttgaacccgggaggcagaggttgcagtgagccgagatcgcgccattgcactccagcctgggcaacaagagcaaaactccgtctcaataaataaataaaataaaaataacattaactatggcctatctgttgaactgatttcagatttcaaggaaaattgcggcgttatggatagggtaggggaaagtaatatggacatttagagaaacaaggtaacctgaaaaatgtaaccttggagattttaaggaatcttgcaaaatgtggtctttattaatgtggtagggaggtgtacaggcacacacctgacacgtgttcctggagtacatgcactttgctgggccccagtcaaggtcttagaaacaccgctgtgaatcaagacagaaactctgtctgctctcacagggtttatattttattgggggagaaaggccaagtacccagacatttccagtcccgtgtggtgaaggtcaggggactgtggacaccaatcctgcacttcaggtgtcaggaaaaatttcctgagagaaatggtatcagccatggattgaatgtttgtgtatctccccctcccaattcatatattgaaaccctaatcctcaatgttatggtatttggaggtggggcctctgggacgtaattaggtcatgaaagtggaactctcaagaatgagctactaatctcaccaaacctcttataatctgcccttataagaagaggccagattgggcggggcatagtggctaacacctgtaatcttagccctttggaggctgaggtgggaggattgagcacaggcgttcgagaccaacctgggcaacatggcaaaaaccccatctctctcaaaaaagatacaaaaatttgctgggtgtgctggcatgtgcctgtagtcccagcaactagggaggctgaggtgggaagatcacttgagcctggggaggcggaggctgcagtgagcagtgatcaagccgctgcactccagcctgggcaacacagtgagaacttgagatcaggagttccagaccagcctgaccaacatggtgaaacctcatctctactaaaaaaaatacaaaattagccgggcgtggtgatgcgtgcctgtaatcacagctaattgagaggctgaggcaggagaatcactcgaacccgggaggcggaagttgcagtgagctgagatcgagccattgcactccagcctgggcaacaagagtgaaactctgtctcaaaacaaacaaaaacaaacaaacaaaaaaggatctctgatcacaaagcttttgtttaagaatttattgcttgatgatatcatgtcataaattatttatttatttatttattttctttttctttttttttgagatggattcactctgtcaccccaggctggannnnnnnnnnnnnnnnnnnnnnnnnnnnnnnnnnnnnnnnnnnnnnnnnnnnnnnnnnnnnnnnnnnnnnnnnnnnnnnnnnnnnnnnnnnnnnnnnnnnnnnnnnnnnnnnnnnnnnnnnnnnnnnnnnnnnnnnnnnnnnnnnnnnnnnnnnnnnnnnnnnnnnnnnnnnnnnnnnnnnnnnnnnnnnnnnnnnnnnnnnnnnnnnnnnnnnnnnnnnnnnnnnnnnnnnnnnnnnnnnnnnnnnnnnnnnnnnnnnnnnnnnnnnnnnnnnnnnnnnnnnnnnnnnnnnnnnnnnnnnnnnnnnnnnnnnnnnnnnnnnnnnnnnnnnnnnnnnnnnnnnnnnnnnnnnnnnnnnnnnnnnnnnnnnnnnnnnnnnnnnnnnnnnnnnnnnnnnnnnnnnnnnnnnnnnnnnnnnnnnnnnnnnnnnnnnnnnnnnnnnnnnnnnnnnnnnnnnnnnnnnnnnnnnnnnnnnnnnnnnnnnnnnnnnnnnnnnnnnnnnnnnnnnnnnnnnnnnnnnnnnnnnnnnnnnnnnnnnnnnnnnnnnnnnnnnnnnnnnnnnnnnnnnnnnnnnnnnnnnnnnnnnnnnnnnnnnnnnnnnnnnnnnnnnnnnnnnnnnnnnnnnnnnnnnnnnnnnnnnnnnnnnnnnnnnnnnnnnnnnnnnnnnnnnnnnnnnnnnnnnnnnnnnnnnnnnnnnnnnnnnnnnnnnnnnnnnnnnnnnnnnnnnnnnnnnnnnnnnnnnnnnnnnnnnnnnnnnnnnnnnnnnnnnnnnnnnnnnnnnnnnnnnnnnnnnnnnnnnnnnnnnnnnnnnnnnnnnncactccagcctgggtgacagagcaagaccccgtctttctttttctttttttgagatggggtctcactctgttgccaggctggagtacagtggcacgatctcggctcactgcaacctctgccttgcgggttcacgcgattctcctgcctcggtctcccgagtagctgagactacaggtgcacaccaccatgaccagctaatttttgtatttttagtagagatggggtttcaccatgttcgccaggatggtctcaatctcttgaactcgtgatccacccacctcagcctcccaaagtgctgggattataggcgtgagcgactgcgccaggcagacctcatctttcaaattaaaaaaaataaaaaaaaaaaagactcccacagtggaaccaagtgagcatgagaatcagtttcttcatctccctgtttcatgacctcaccctgcactcttcaatcaatgattttcacacttcatcctaatcctattccaaactcttttttaaaaaccctagccccaaagtactctgggagatggatttgaggtttcctcctgtctccttgttcagcagccctatgattaaacctctttctctgctgcaacctggtgtcttggtgtattgacctccagtgtgcatcaggcaacagaactattacagttaatacttttagcctaacattcaaaggccctccccatctatcccaaactacctatccaatttctggtcccactgcctctcagcgggaccctggctttactcaccaaactctgctgttcccctagtcttgccactcagtaaacactaccatcatccaatttgttgctcaagacaaaaacacagaagtcatccttaattctctttccctcagactctctaaatccaatccaccaggaaatctatttccaatcatgtctcaaatctctcatctcttcatctctactacctcactctagttcaagtaagccaccaccatcactcacctggaccaatgcattaacctcctgaccactgcataaccacaattcatttgtcacacatcagcataaagtggattatggcttcccattacacatggtataaattccaactcagcatcctggtttaccaagtctggccactctctggcctacctttccaaccctatctcacaccattctctttttcacccacaatgcaccaaccacacattagcttcttttttatttctctaacttgccaagctcagtcctggaaggcatttttttcaccctgacatatgcatggctagctcttgttatttagatttctggtgattcgccttcgtggaaaaggcttcactagccactcaagtagttactatcagatggccggccctattttaatttcctgtaaagcgcttatcactattggatgtttttatttttcgctctatattccccactagaaaaaaaatctctacgtgggcatgggatgttgctgcttcgtttccattgaattaccaaggcttagaacaataccagggcttgaaacgcaaaaaaattctaaaacttgtggaatgacttaatgaactcttgattctcaccactcttcagcccctccccaactttcaggacagtcttcctgaaggcattttgtttattaagccacttgatttccgtctatcattcccagtaaaatataagcttcaagagctcagagacagggtttgcgtgcatgagggctgtattccatgaccagcatggtgcctgctataaagtaggcggccggcagtctttctgttagctgaatccatgaatgggacaatggggctaaatttacatgggggtcggccatgcctggggtctgcggaacgcacgcaagataggacgaatggacgcctccactaaagcaaatacgcgggcaccaagtagacacagctcggcccggtggggatactgaagccgccagaccaagcttgggctagatgacgaaacgctgcacctggaggaggatccaggtccgcacgcggtaactatactcacgtggaagatgcactcgcggccacagagcacctcgaatcgtcgcgcgcgtttgttacgtcatccgcgtgcgccgcgggcagagactggacctgccagcgccggggcgactacgccccgcccacttttccccagccacccggccgaattctaggttcttggtggggagaggtttatccccaggtggtttctcccacaaatctgtcttgaactgacgtttgtgaaaatacattcagttccccgtccccgcggggacagttaagtaatgacatcagttagttaaggccataaagcaagcatgtgaaagttgtgctttggtggcattacgaggaagcccttctctgcttggcaagatcagggagactgaaagatgcttagaagtcatccaccaggcgggctgtgtttgagttcctgagctctcctaccccatccatctgaaggcctgcgggatgccggacaggatgtcacttaggagggagacggaggctgggcgcggtggctcccgcctgtaatccgagcactttgggagcccgaggcgggcagatcgcttgagcccaggagttcgagaccagtctgggcaacatggcgaaaccatgtcgctacagaaaaatacaaaaattagccgggtgtggcggtgcaagcctgcgatcccagctacttggtgggctgaggtgggaggatcgcttgagcccgggaggtcgaggctgcagtgaaccgagatggcgccgctgcactccagcctgggcgatagagcgagacctcgtctcaaaaaaatcagagagggccaggggctgtgtttcacgcctgtaatcccagcactttgggaggctgaggcgggtggatcacctgaggtcaggagtttgagaccagcctggccacatggtgaaaccccgtctctactaaaaatacaaaaaaaaaaaaaaaaaaaaaaaaaaaaaattagccgggcgtggtggtggcaggtgcctgtaatcctagctactcaggaggctgaggccggaaaatcccttgaacctgggaggcgggggttgcagtgagccgagatcgcgccactgcactccagcctgggcgacagaaccaggcttcgtcttaaaaaaaaaaaaatcagagaaaagagacaggggtgtcgggagttgggatggtgcaccgaggcgcctcgcggagtctctaggaagcgagggggtgagcagcgagaaggagctggaggtggcgaggaaacccgctcaccggtgacgtcaccgagcgcccccccacccccatccccacccccaagcgagcacctgcccctcccgggggcggagctccggcgcatcatggcggctggccgggcccaggtcccttcctccgtgagtgctgctattacgtctcttgttccttttttcttgtttgtcacagatactctttctcttcctatttcctctgccttgtctctctgggctcgctggccgcgtccggcccatgggtgagggggttgtgagtcggtccgctcytacctcttactggttctgcgaatgtttattccctcattcacgcggcgcccgctgtgagccttaaactggtctccgttcactctctagggtttaatcctggtgggaaaccaggagcaggttaatgggggaactatggggctgtgggttcctggagaagacccttgacggagctgtaggggaaaagggcaaccataataagtaaaagcgtctgagacccgaagtgcgtgtagaaggcaaaaagcgccgaaaggggctgggtgtggtggctcacgcttgtaatccagcactgtgggaggcggaggcgggcggattacttgaggtcaggagttcgagaccagcctgaccaacatggtgaaaccycatctctactaaaaatacaaaaattagccgggcgtggtggcgcgcacctgtaattccagctactcagaaggttgaggcaggagaatcgcttgaaccgggtagacggaggctgcagtgagctgagattgtgccacagcactccagcctgggcaacagagcgagactctgtcaaaaaaaaaaaaaaaaaaaaaaaagcgccggaaggggtttcaggacggaagcaaacacatattcaaaggcaggaggatagagcaggtgtctgaaaaactcaaaagttcagttgggtggtggtggaggggtcagagctgacagttttgtacctcttgctaagcagcgactttaacatgagggtaattgggtgtggtggcacacgccggtaatcccagctgctcaggaagctgagcagggaaccacggaagtggaggttgcagtgagccgagatcgcgccactgcactactagcctggacgacagagccagactgccatctcaaataaataaataaataaataaataaataaataannnnnnnnnnnnnnnnnnnnnnnnnnnnnnnnnnnnnnnnnnnnnnnnnnnnnnnnnnnnnnnnnnnnnnnnnnnnnnnnnnnnnnnnnnnnnnnnnnnnnnnnnnnnnnnnnnnnnnnnnnnnnnnnnnnnnnnnnnnnnnnnnnnnnnnnnnnnnnnnnnnnnnnnnnnnnnnnnnnnnnnnnnnnnnnnnnnnnnnnnnnnnnnnnnnnnnnnnnnnnnnnnnnnnnnnnnnnnnnnnnnnnnnnnnnnnnnnnnnnnnnnnnnnnnnnnnnnnnnnnnnnnnnnnnnnnnnnnnnnnnnnnnnnnnnnnnnnnnnnnnnnnnnnnnnnnnnnnnnnnnnnnnnnnnnnnnnnnnnnnnnnnnnnnnnnnnnnnnnnnnnnnnnnnnnnnnnnnnnnnnnnnnnnnnnnnnnnnnnnnnnnnnnnnnnnnnnnnnnnnnnnnnnnnnnnnnnnnnnnnnnnnnnnnnnnnnnnnnnnnnnnnnnnnnnnnnnnnnnnnnnnnnnnnnnnnnnnnnnnnnnnnnnnnnnnnnnnggacctatgtagggaaaggaaggagctaaggaggacatctaggtttcaggatagaacaactgtttggttaagggtactatttgctaagttagtgaacataacactagaagagttctagaaaaggacagagttttgtggaaagttcagtgttgggcatgtgtgctgcctgtggattggccatggagagtctggcagatggataggactcaaagctcaggaatgagatctcagctaaagtagacatacaggaacaatcatcatctggccatggctgttaaacccatgcagtggttgagataattgtgggaaagcatattgtgttcttaaacttcagcctgtattaatctggatcttcctcttcctccctccttttttttttttttttttttttgaaacaaggtcttactctgtcacccaggctagagtgcagtggcaccatcatggctcactgcagcctcaacctccctgggctcaagcgatcctcccacctcagcctcccaagtagctgggactactggcgtgtgctaccacgccaggctaacccagctaattttgaattgttttagagtttcaccatgttgcccaggcgggtctcarccttcccaggctaaggtgatcctcccacctcagcctcccaagtagctgggactactggcatgtgctaccacgccaggctaatccagctaattttgaattgttttagagtttcaccatgttgcccaggcgggtctcaaccttcccaggctcaggtgatcctcccacctcagcctcccgagtagctgggactacaggcacgagccaccatgcccagctaatttttcttttttgtagagacgggtctttgccttgttgcccagactagtagtgaactactgggctcgagcgatccaccttggccccccagagtgctgggattacaggcgagagccaccacatccagtctgctccatttttactcagtagatgaaaacacgaatttgcctttttaacaaaacttaggtaattttaccttgaagccatgggatcactttgagagacagtcgtattcagtgcaccaagcaaaggataggccatccgagaaacaggaactacaaaagaatactgggagaggaagacaaaaagcgtgagagtcggaactttgcttatactggtggggcaactctgaatggtgatttggtctgccttccacaactctgaccatgaatgagtgtgtggctgaagtgggctgaaagtcagtggtagggctgtccacaaggatgctgaagacatctagaacttgaagacttttttttccttttaacttttattttagattcagggggacgtgcgcaggtttattatgtaggtaacctcatgtcatgggggtttggtatagagattatttcgtcacccctgtactaagcatagtacttgatgggtattttttccaatctctctcttcccaccctcaagtaggacccagtgtctgttatttccctctttgtgttcacgtgttctcgttatttagctcccacttataagtgggaacaaacatgcagtatttggttttctgttcttggattagtttgctaaggataatggtctccaactgcatccatgttgtagcagagaacatgatctcattcttttttatggctgcgtagtattcccatggtgtatatgtaccacattttctttatccagtctactgttgatgtgcatttaggttgattccatggaagactggcttttctagctcttttcgagctccttaagattagaagaatgtgaaaggccaggcgtggtggctcacgtgtgtaatcctggcactttgggaggctgaggcgggcggatcacttgagttcaggagttcgaaactagcttggccaacatggtgaaacttcgttctctactaaaaatataaaaaattagctgggtgtggtggtggatgcctgtaatccccagctacttgggaggctgagacaggagaatcacttgaacccggaaggcggaggttgcggtgagccgagattgcgccattgcactccagcctgggcgacaaagcaagactccgtctccaaaaaaaaaaaaagaggaatgtgaaagattgaccaggatgttaatatatgagcattggaggaccagggaaggagctgtaatggcttagaagtagcattaagggagaaggataaagggcctactgccaagtgtgttaaagctgcctagcactgggagtaggccaaactggtccttttccctaaagttatctacatatcatggcaagtgtgtgtccagaatctgtgtcaggtatacaaagatagtccatatcctcctcaggaagcccacaccttagctgaaaagacaacaggaaacaaatcaagtgaggttgtatcttgcatatatttagtttgtgggaaatgcatacctttgaataaaaaaaggagatgattaaaaattatactctgcctatgtcctttttatgtactgtccactattaggcacttatacatagtatggcactatgtcttactcatttttggttttggtttttttgagacagtgtctcactctgtcacccaggccagagtgcagtggcgccatctgggttcactgaagtttcaaccgccccaggctcaggtgatcctcccatctcagcctcccgagtagctggaagcacaggcatgtgccaccacgcctggctttttgtatttttgtagagacatgatttcgccatgttgtccaggctgtacttgaactcctggactcaagcaatccaccctctttggcctcccaaagtgctgggattacaagcgtgagccactggcacccagcctgtcctgttctttatgaacggtttaaaggattgttcaacaatgtttttgtccattcttggtcttcaacgtactgactttagaaccagattccatgtaagatggcatgagtacaagtttgttagagaaaggggcaagaccaaagctggatggccagctgtctacggtatggctggactaagacttttaaggtttcttcaagttctaaattcctttacttttgatcttcatttcatgtgccctctggatattcttttcttttttttttttttgagacggagtttccctcttgttgcccaggctggagtgcaatggctcgatcttggctcaccacaacctccgcctcctgggttcaagcaattctcctgcctcagcctcccaagtagctggaattataggtgtgcaccaccacccccagctaattttgtgtttttagtagagacagggtttcaccatgttggtcaggctggtctcgaactcccaacctcaagtgatccgcctgcctcagcctcccaaagtgttgggattacaggcgtgagccaccgcacccggcccggatatttttttctagtcctttattcttcccaagtttccttggtgggccggatagtcaagatgttttaactaaattcactttcctcaggaacaagcctggcttgaggatgctcaggtcttcatccaaaagaccctgtgtccagctgtcaaggagcctaatgtccagttgactccattggtaattgattgtgtgaagactgtctggttgtcccagggaaggaaccaaggttctacactgcccctcagctataggtaaggagaggtggcggttgcgggggctgggcaggggcaggtattgaattcaggattgaaaagtaaggttctataattagaaaaagggcaagtgagagagtgagcggaggacaaggtagtctaaacataccccttctgcagagcttttctaacactatcaagctttccttttcctaaagttctcctgaattggcttaagattaaagaaaaagagaggaagaggggaagagagaaagaaaatttggaaaaagaactctcgaagtggggaaagaggctggtgttatctttattttgtgtattgggaaacaaagatacagagaactgtttgacattaccaagtgcagatcattgtgtttaagatgtgagttttagggcttccgagagtgtgtttatatatatatgtgtatatatatatatatatatatatatattttttttttttttttctctctacactatcatttccaaaagtgttctaggcaacgttagtaaagcacaagaaaaggggttcatagctaagtaagtgtgagggacattgaatatgataaacgtctctgggagagtcatagggtttattaacatattagaggctatgacaagtcctgcaaaagaaacctatttatctcctcatagaagtaatcactattggccaggtgccagtggctcatgcctgtaatcccaacactttgggaggctaaggcaggtggatcacctgaggtcggcagttcgaggtcagcctgcccaacatgctgaaacaccatctctactaaaaaaaatacaaaaattagccgggcgtggtggggggcgcctgcaatccccnnnnnnnnnnnnnnnnnnnnnnnnnnnnnnnnnnnnnnnnnnnnnnnnnnnnnnnnnnnnnnnnnnnnnnnnnnnnnnnnnnnnnnnnnnnnnnnnnnnnnnnnnnnnnnnnnnnnnnnnnnnnnnnnnnnnnnnnnnnnnnnnnnnnnnnnnnnnnnnnnnnnnnnnnnnnnnnnnnnnnnnnnnnnnnnnnnnnnnnnnnnnnnnnnnnnnnnnnnnnnnnnnnnnnnnnnnnnnnnnnnnnnnnnnnnnnnnnnnnnnnnnnnnnnnnnnnnnnnnnnnnnnnnnnnnnnnnnnnnnnnnnnnnnnnnnnnnnnnnnnnnnnnnnnnnnnnnnnnnnnnnnnnnnnnnnnnnnnnnnnnnnnnnnnnnnnnnnnnnnnnnnnnnnnnnnnnnnnnnnnnnnnnnnnnnnnnnnnnnnnnnnnnnnnnnnnnnnnnnnnnnnnnnnnnnnnnnnnnnnnnnnnnnnnnnnnnnnnnnnnnnnnnnnnnnnnnnnnnnnnnnnnnnnnnnnnnnnnnnnnnnnnnnnnnnnnnnnnnnnnnnnnnnnnnnnnnnnnnnnnnnnnnnnnnnnnnnnnnnnnnnnnnnnnnnnnnnnnnnnnnnnnnnnnnnnnnnnnnnnnnnnnnnnnnnnnnnnnnnnnnnnnnnnnnnnnnnnnnnnnnnnnnnnnnnnnnnnnnnnnnnnnnnnnnnnnnnnnnnnnnnnnnnnnnnnnnnnnnnnnnnnnnnnnnnnnnnnnnnnnnnnnnnnnnnnnnnnnnnnnnnnnnnnnnnnnnnnnnnnnnnnnnnnnnnnnnnnnnnnnnnnnnnnnnnnnnnnnnnnnnnnnnnnnnnnnnnnnnnnnnnnnnnnnnnnnnnnnnnnnnnnnnnnnnnnnnnnnnnnnnnnnnnnnnnnnnnnnnnnnnnnnnnnnnnnnnnnnnnnnnnnnnnnnnnnnnnnnnnnnnnnnnnnnnnnnnnnnnnnnnnnnnnnnnnnnnnnnnnnnnnnnnnnnnnnnnnnnnnnnnnnnnnnnnnnnnnnnnnnnnnnnnnnnnnnnnnnnnnnnnnnnnnnnnnnnnnnnnnnnnnnnnnnnnnnnnnnnnnnnnnnnnnnnnnnnnnnnnnnnnnnnnnnnnnnnnnnnnnnnnnnnnnnnnnnnnnnnnnnnnnnnnnnnnnnnnnnnnnnnnnnnnnnnnnnnnnnnnnnnnnnnnnnnnnnnnnnnnnnnnnnnnnnnnnnnnnnnnnnnnnnnnnnnnnnnnnnnnnnnnnnnnnnnnnnnnnnnnnnnnnnnnnnnnnnnnnnnnnnnnnnnnnnnnnnnnnnnnnnnnnnnnnnnnnnnnnnnnnnnnnnnnnnnnnnnnnnnnnnnnnnnnnnnnnnnnnnnnnnnnnnnnnnnnnnnnnnnnnnnnnnnnnnnnnnnnnnnnnnnnnnnnnnnnnnnnnnnnnnnnnnnnnnnnnnnnnnnnnnnnnnnnnnnnnnnnnnnnnnnnnnnnnnnnnnnnnnnnnnnnnnnnnnnnnnnnnnnnnnnnnnnnnnnnnnnnnnnnnnnnnnnnnnnnnnnnnnnnnnnnnnnnnnnnnnnnnnnnnnnnnnnnnnnnnnnnnnnnnnnnnnnnnnnnnnnnnnnnnnnnnnnnnnnnnnnnnnnnnnnnnnnnnnnnnnnnnnnnnnnnnnnnnnnnnnnnnnnnnnnnnnnnnnnnnnnnnnnnnnnnnnnnnnnnnnnnnnnnnnnnnnnnnnnnnnnnnnnnnnnnnnnnnnnnnnnnnnnnnnnnnnnnnnnnnnnnnnnnnnnnnnnnnnnnnnnnnnnnnnnnnnnnnnnnnnnnnnnnnnnnnnnnnnnnnnnnnnnnnnnnnnnnnnnnnnnnnnnnnnnnnnnnnnnnnnnnnnnnnnnnnnnnnnnnnnnnnnnnnnnnnnnnnnnnnnnnnnnnnnnnnnnnnnnnnnnnnnnnnnnnnnnnnnnnnnnnnnnnnnnnnnnnnnnnnnnnnnnnnnnnnnnnnnnnnnnnnnnnnnnnnnnnnnnnnnnnnnnnnnnnnnnnnnnnnnnnnnnnnnnnnnnnnnnnnnnnnnnnnnnnnnnnnnnnnnnnnnnnnnnnnnnnnnnnnnnnnnnnnnnnnnnnnnnnnnnnnnnnnnnnnnnnnnnnnnnnnnnnnnnnnnnnnnnnnnnnnnnnnnnnnnnnnnnnnnnnnnnnnnnnnnnnnnnnnnnnnnnnnnnnnnnnnnnnnnnnnnnnnnnnnnnnnnnnnnnnnnnnnnnnnnnnnnnnnnnnnnnnnnnnnnnnnnnnnnnnnnnnnnnnnnnnnnnnnnnnnnnnnnnnnnnnnnnnnnnnnnnnnnnnnnnnnnnnnnnnnnnnnnnnnnnnnnnnnnnnnnnnnnnnnnnnnnnnnnnnnnnnnnnnnnnnnnnnnnnnnnnnnnnnnnnnnnnnnnnnnnnnnnnnnnnnnnnnnnnnnnnnnnnnnnnnnnnnnnnnnnnnnnnnnnnnnnnnnnnnnnnnnnnnnnnnnnnnnnnnnnnnnnnnnnnnnnnnnnnnnnnnnnnnnnnnnnnnnnnnnnnnnnnnnnnnnnnnnnnnnnnnnnnnnnnnnnnnnnnnnnnnnnnnnnnnnnnnnnnnnnnnnnnnnnnnnnnnnnnnnnnnnnnnnnnnnnnnnnnnnnnnnnnnnnnnnnnnnnnnnnnnnnnnnnnnnnnnnnnnnnnnnnnnnnnnnnnnnnnnnnnnnnnnnnnnnnnnnnnnnnnnnnnnnnnnnnnnnnnnnnnnnnnnnnnnnnnnnnnnnnnnnnnnnnnnnnnnnnnnnnnnnnnnnnnnnnnnnnnnnnnnnnnnnnnnnnnnnnnnnnnnnnnnnnnnnnnnnnnnnnnnnnnnnnnnnnnnnnnnnnnnnnnnnnnnnnnnnnnnnnnnnnnnnnnnnnnnnnnnnnnnnnnnnnnnnnnnnnnnnnnnnnnnnnnnnnnnnnnnnnnnnnnnnnnnnnnnnnnnnnnnnnnnnnnnnnnnnnnnnnnnnnnnnnnnnnnnnnnnnnnnnnnnnnnnnnnnnnnnnnnnnnnnnnnnnnnnnnnnnnnnnnnnnnnnnnnnnnnnnnnnnnnnnnnnnnnnnnnnnnnnnnnnnnnnnnnnnnnnnnnnnnnnnnnnnnnnnnnnnnnnnnnnnnnnnnnnnnnnnnnnnnnnnnnnnnnnnnnnnnnnnnnnnnnnnnnnnnnnnnnnnnnnnnnnnnnnnnnnnnnnnnnnnnnnnnnnnnnnnnnnnnnnnnnnnnnnnnnnnnnnnnnnnnnnnnnnnnnnnnnnnnnnnnnnnnnnnnnnnnnnnnnnnnnnnnnnnnnnnnnnnnnnnnnnnnnnnnnnnnnnnnnnnnnnnnnnnnnnnnnnnnnnnnnnnnnnnnnnnnnnnnnnnnnnnnnnnnnnnnnnnnnnnnnnnnnnnnnnnnnnnnnnnnnnnnnnnnnnnnnnnnnnnnnnnnnnnnnnnnnnnnnnnnnnnnnnnnnnnnnnnnnnnnnnnnnnnnnnnnnnnnnnnnnnnnnnnnnnnnnnnnnnnnnnnnnnnnnnnnnnnnnnnnnnnnnnnnnnnnnnnnnnnnnnnnnnnnnnnnnnnnnnnnnnnnnnnnnnnnnnnnnnnnnnnnnnnnnnnnnnnnnnnnnnnnnnnnnnnnnnnnnnnnnnnnnnnnnnnnnnnnnnnnnnnnnnnnnnnnnnnnnnnnnnnnnnnnnnnnnnnnnnnnnnnnnnnnnnnnnnnnnnnnnnnnnnnnnnnnnnnnnnnnnnnnnnnnnnnnnnnnnnnnnnnnnnnnnnnnnnnnnnnnnnnnnnnnnnnnnnnnnnnnnnnnnnnnnnnnnnnnnnnnnnnnnnnnnnnnnnnnnnnnnnnnnnnnnnnnnnnnnnnnnnnnnnnnnnnnnnnnnnnnnnnnnnnnnnnnnnnnnnnnnnnnnnnnnnnnnnnnnnnnnnnnnnnnnnnnnnnnnnnnnnnnnnnnnnnnnnnnnnnnnnnnnnnnnnnnnnnnnnnnnnnnnnnnnnnnnnnnnnnnnnnnnnnnnnnnnnnnnnnnnnnnnnnnnnnnnnnnnnnnnnnnnnnnnnnnnnnnnnnnnnnnnnnnnnnnnnnnnnnnnnnnnnnnnnnnnnnnnnnnnnnnnnnnnnnnnnnnnnnnnnnnnnnnnnnnnnnnnnnnnnnnnnnnnnnnnnnnnnnnnnnnnnnnnnnnnnnnnnnnnnnnnnnnnnnnnnnnnnnnnnnnnnnnnnnnnnnnnnnnnnnnnnnnnnnnnnnnnnnnnnnnnnnnnnnnnnnnnnnnnnnnnnnnnnnnnnnnnnnnnnnnnnnnnnnnnnnnnnnnnnnnnnnnnnnnnnnnnnnnnnnnnnnnnnnnnnnnnnnnnnnnnnnnnnnnnnnnnnnnnnnnnnnnnnnnnnnnnnnnnnnnnnnnnnnnnnnnnnnnnnnnnnnnnnnnnnnnnnnnnnnnnnnnnnnnnnnnnnnnnnnnnnnnnnnnnnnnnnnnnnnnnnnnnnnnnnnnnnnnnnnnnnnnnnnnnnnnnnnnnnnnnnnnnnnnnnnnnnnnnnnnnnnnnnnnnnnnnnnnnnnnnnnnnnnnnnnnnnnnnnnnnnnnnnnnnnnnnnnnnnnnnnnnnnnnnnnnnnnnnnnnnnnnnnnnnnnnnnnnnnnnnnnnnnnnnnnnnnnnnnnnnnnnnnnnnnnnnnnnnnnnnnnnnnnnnnnnnnnnnnnnnnnnnnnnnnnnnnnnnnnnnnnnnnnnnnnnnnnnnnnnnnnnnnnnnnnnnnnnnnnnnnnnnnnnnnnnnnnnnnnnnnnnnnnnnnnnnntttttttattttttgagacgtagtttcactcctgctgcccaggctggagtccaatggcgggatctcagcttactgcaacctctgcctttcaggttcaagtgattctcctccctcagcctcctgagtagctgggattacagggctttttcttccttcttagaaacaagctcagaggtgtgcagcgaaacctggctgggagtctagttcgattgagtgctctggtgaaaagtaaacagaaagcttacttcatcctgtctcttggtagatcacacccagctgtcacccacgtgtccatcatcgtgcaggtgaggactggggtcatttcagccatggaagtgggggagggtggtagaactttcagtaggaaagatagcatcataggaggagccatgtaggaaaggaggacagctggggagagctgttttctggaatagcgctgttgggagaagattccgggaaatgtttgtgcatagagttagggagtagactttcccgctgtgcaactcacttgagcacacagcttttagattgtatgtgaccttttaaaaaactgccacgctcacttgtggagatgaccaaagaaatcattcatcttaacaccattgagacattgaatacaggcattaaaaaaaaaaaaaaaaacttggtacttactgttgactctttttgcatcaactggtacaattttatttttataatttcaacttttagactcatgaggtacatgtgcaagtttattaactgggtatattttgtgattctgaggtttggggtatgattgatctctttacccaggtactgagcatagtacccaaggtagaaattgtaaatcattgatctttattctaaccattgttttatgacatataagtttctgaataatgtttcttttcctttttatagaaattttaaaaatatatgtattttgtagaaatagggccttactgtgttagagaagaacagtttgtcatacttcccttgacatcagtcacaatactggatacatatatactcaatacactttgattacatgaatgaatgttgtttgtgtgttatggggcgggatagggcacagttttctcagtggaatatttatgtattttgaaggaagttttagggatggtttgtatgttggggaagtggtttggaaatatttggcatctcctgtgagagaggagagacgctaagatttagttggcagacatagggaagatggagaggtgagtwgagactcacagrgggcaggtctctgagttcaaatcgtgagggaaaaggactctggcagagtggcagtgttggggtctcttgtgtcacattgcctgtctctgcacaagccaggtccctgcccagctggtgtggcacagagcccttcggcctggtacagcctatgtgctgacagaactgcgagtgtccaagatccgtggtcagcgccagcatgtttggatgaccagtcagtcctcccgtctgttgctgctgaaaccagaatgtgtgcaggagctggaactggagctggaaggacccctcttagaggctgaccccaagccactccccatgcccagcaactcggaggacaagaaggatccagaaagtcttgtccggtattctagactcctatcctattcggtgagcacagggagagatcctagagcttgaggggccrgaaatgtgggtyttcaaagaggaagaaaatagtggtcaactggacctcggcctgtttgcagggagcagtcactggcgtgttgaatgagcccgctggcctctatgagctggatgggcagctggggctctgccttgcctaccagcagttccgtggccttaggcgggtgatgcgacctggagtgtgtctgcaggtatgtgagatcagggctgataacaaaaagagacctctgcagcttctcttaccttcataggctccttttctgcagcagggtggttatatagaaatatagaaattaaaagtgtgtgttagggggcacttttgctaaggataacttggacagaagcttaaataaaaaggagtagagtcttgggcactgtgaggaggagttgtggccagagcatctccttcacagaagggcctttcagctggaggaggagatagctgaagcacagatctggggctggggtgatctcaggcgacccggtgagaagcctcagccatgtctgttcatccaggagccacccagcccacagcaagactgagtggagctcatgggagatgaaggctgaccgcagcgggagtgggttgtaatggaaagtgaggccagcccacgtgggagaaattgctttccgtcttcctggaacccaggcagtggcaaagtgcggttaactctgcctgggttcattgagttggggkcttcatctctgctttttcattttctctgctttcccccagctccaggatgttcacctgctccagtcagtgggagsggggacaagaaggccagtgctcgccccctgcctccgtggcgccgttctgcttcaaagcttctctcgtcagaagcctggggctcactcatcccgtcaagcctacggggcctccctgtacgagcagctggtgtgggaacgtcarttaggacttcccctctacctgtgggctaccaaggccctggaggagctggcctgcaagtgaggaggctgagggcccagggcggggaggcagtgggagtagcacacttccttggcaaggagagcaggattcttgaagaggcaggctcttcaggggaagtgactgtgctgcttttcctggccaaggctgtgtccccatgtgctgagacaccaccagttcctgcaacattcctctcctgggagccccagcctgggactgcaactcctggctcctaccctggatcttctagctccgccaggcagccctgttcggaatgcacacaatgagatccttgaagagccacatcactgtcccctccagaaagtatgaggatrtgggggaaggatggtggcagaacactggaggacacctggggcccatgggacacacacccgatttctcttccctccttgacagtacactcggctgcagactccctcctccttccccactctggccaccctgaaagaagaaggacagcgtaaggcctgggcctcctttgaccctaaggcccttctgcccctcccggaggcctcctacctgcccagctgccaactcaatcgccgcctggcttggtcctggctctgtctgctgccctctgccttctgcccagcccaggtaagggggaccctagcagggctcaggtgatttccytttttgtcatccttattgccacgactctagtctcggttactatctttcttcgtcattttgactacactagccttctaagcagaccacttcatctgttgttggccctccaattcattctctctgcagcaactagaaatggggatatgccaggcacagtggctcatgcctgtaatcccaacactttgggaggctaaggcatgaggatcactggagcccaagagtttgagaccagcctgggtagagagaccttgttgctacaaaaaagttgtcttaattaggtgcggtggcatgtgcctatggtcccagctactcaggaggctgaggtaggattgcttgagcctgagagatcaagagtatagtgagccaagatcacaccactgcactccagccggggcaacagagcaagactcaggaaaaaaaaggaagtttaaaaaaaagtgaaacttgtattacagaactctcttgtttaaatcctttttttcgagacaggatcttgctctgtagcccaggctagagtgcattggcgcgatcatggctcattgcagtctcgacctcccaggttccagtgatcttcccacctcagcctcccaagtagctgagactacgggcgttcaccaccgtccctggctaattttatttttttatttttttgggacagaatcttgctctgtcacccaggctagagtgcagaggcactatcttggctcactgcaaccttgcctcctgggctcaagcagtcctcccacctcagcctcccgagtagctgggactgtaggcatccatcaccacatccagctaatttttgtgtttttgtagagatgggattttgccatgtttcccaggctggtctcgaattcctggacttgagtgatctgcctgcctcagcctcccaaagtgctgggattataggcatgagccacygcacctggcctgggttaatttttacactttttaatttttagagatggggtctcactatgttgccaggctgatctccacctcctgagctcaagtgatccttctgccttggcctcccaaagtgctaggattacaggcgtgagccactgcgccccagcttaaattctttgcgtgcctcccagtgcatataaagtaaaatcaaacgtctcattgtgtcctgtgagatcccgcatggcctcttacctgtaacctctatttgtgcgctttctcttctcctactaaatgtgtgaatgcgtgtgtgtttttttatgtctgtcttccccacttgaatataagttttttgaagccagagacgtgtcttttttgttcattttgtagctttaccatgtaatacagcatctggcaaatagtagatgctcagtatttgctgaataaacatttgataactcaaccttcatcttcttgcaggttttacttggggttctggtggcttcatctcataaaggttgtctgcaacttcgggaccaaagtggttccctgccctgcctgctcctggccaagcactctcaacccctcagtgacccacggctgataggtttggagttcagatgtggaaagaagatggtagtgggatggtggttctcatagccaggggagcctgggaggaaaagcctgctgggatttactagagatgcagaagtgacacatgtcaatcaacaacttctgrgagacttgtatggcaggcagagaacaggagcaagaggacccctagccagaatttccagcatgcatttctccaccgtagctcctaacatgcactccaggattacaactgtgtctcctacattcttagtttggagagaaggtgtcacccctctaaggtgggggtcaggtgtgggctttcatgtcatgtgagggcagcagctctggcctgggatgggtagtgaggccggtaggatggtttgccttgcaacccaccccacaggtctcctttcttgtcaaaacagaaaactttcttcctctaggctgcctggtgcgggcagagaggtttcagttgatcgtagagagggacgtgagaagcagcttcccttcctggaaggagctgagcatgccaggcttcatccagaagcagcaggccaggttggctccttggggtcatggttgtcttgagtctggggggaaggaagggcctggtggaaggagtgggatgctggggaccaaaatacccaatgcctgcatcactaagaaatgtattccttgtctctcccaacagagtctatgtccagttctttctggctgatgccctgatcctgcctgtgcccagaccctgccttcattcagcaacaccctcaacacctcagacagawcccacygscccagagggaccccacctaggacagagccggctcttcttgctctgccacaaggaggccctcatgaagcgtaatttttgtgtccccccaggagcaagtccagaggtgcccaagcccgccctcagtttctatgtgttggggagctggcttgggggcacccagaggaaggagggtactggatgggggctgcccgagccccagggaaatgacgacaatgatcagaaggtaaactgggactccagggacccaggacctgacctgygccctgagcctctggctaggatcccagcactttgctckccatcctcccaggttcacctcattttctttggctcttcagtccgctggtttgagttcttgcacccgggacaggtgtaccgactcrtagctcctggccccgctgtgartgtcctacttcatcatacctttccccagaaagcttttttggggttggggtctaaagagggcatgccagtgcctggtcattctctaggcctcctggaagaaggctggatttagatacaccagaaagcctgtgtgtgttgacacacttccttctccatgctccagaaagaacaaaattgggtcagaatgttttgtgaacctcccactggactagcacacactcacaggcagtcgtcttcccatttccgtgcagacaccaatgttgtttgaaaaggatggttcaycctgcatatctcggcgtcctctggagttggctggctgtgcatcctgcctcactgtccaggacaactggactctggagcttgaaagctcccaggatatccaagatgtgctggatgcaaacaagtcattgcctgaatcctcactgaccgacctgctcagtgacaagtaaatgtccaccaagcccctctggttmatttggccactctctcttctcccaagctagctgggtttggtgaagacttcaytttctgctgcaggaggtatttcttttgttattgttgtttttgtttgtttttttttgagacggagtctcactctgttgcctaagccagagtgcaatggcctgatctcagctcactgaaacctctacttccctggttcgaaggattatcctgcatcagcctcccaaatagctgggattataggggtgcacgccaccacacccagctagtttttttgtatttttagtagagacagggtttcrtcatgttggccaggctggtcttgagttcttgaccttaagtgagcctcccacctcagcctcccaaagtgctgggatttaggggcgtgagccaccttgtgcgggttttgaatgatctgccacaaccctctttttcccataggccctgttactcttagtgtgcagtgtggcagagctcaggttttttcaggactttatatatgaagttctagcagatactttagctccattttctgccttgaatctgactgtctccactctgtgctttcttgtgcctccattctcagtgtatttccctgaccttccagtttcacagattccttggtgtctttctccgctgagattttgtcacggacactatgtgaaccccttgtggcgtctctctggatgaaactgggtaatgacccttcctttgtggggaaggtatgaaatagagtgatgggactttgtggacttcacagatcctactaacacccaccttccttctatagggaacacgggggccatgagaaggtgtgtgaagctaacagtcgctcttgagactgctgaatgtgaattcccccctcacctggatgtatatatagaagacccacacttgcctccctcactaggactacttccaggagcccgggtccacttcagccagttggagaaaagggtttccaggtgaagatgtgtagtgtcacctgcctcctcttgctactgatgtggctctctggaatgtgcacccctgcttaactttgctgcagcgaccccttctctttcatacaggtttccatatatcwgtctgccatttgtgcccagccagtaccctcacgaggtgttgcaggctggtcctcctcctagtcttcccctagctttggtagagccatggctaggatatgtccctcagggggagtggccactctgtggtgcttgatctctgagtcccagcttctaccccaatttgccttgtcttcctggtcactcactattcctcttccacttgcagatctcacaatgtttattgttgtttccggtcatccacttaygtgcaggtcctgagttttccccctgagaccaccatcaggtcagtgcccagaccccaacccctaaacttcctggcttcacatctgcatctcccacatgtccctggttctgaagattttgccatcattacagtcttctccaatcccaacaagatgtgttgagtcagaggagcttctctactccaaataaaaaatgctctgtgtctatcattgtacccagaatcatttagtgttctaggcttttgaaggcttttcagtcttaacatgcaaatatttcttggctaacatcatggtgttcaaacctgaaaaataaccaatgactatcagagatcaggaattaaaatggggcttctaggagcgcatggaacccactgctgtccccatcctgatgccctctaagtccttctagacccaccctgctttcagaacccctttgcctgttctgttatcttgacccctgtctctgtctccctgtatttatttagcrttcccctgccccacatctacctggctgaacttctgcagggtggtcagtccccattccaggccactgcctcttgccatatcgtctctgtcttcagccttcagctcttctgggtgtgtgcttattgtaccagcatctgccgscaggtaagggagggaaggaacaggctgaactgagtatggagtgccagagggatgtgatgggaccaagaggacttttccaaccactgtcttcatcccagggaaagtgcactcgcctgggctccacttgccctacgcagacagctataagccaggccatcatcaggtgagagcacaaggcgtgcacccattgtgccatttacttatgagaccactttgtctatctgcagtttctacrttagcataattcctggctcatgagaattgcttaatattttttgaacgaatgaatgagggtaagctcctaaatctgtgagccaaagactgcagacagcggggagggaggcatgttgggtccagggtgttggcaacctgggtkgctataggcgtttttatttcctcctgctccccataggctcctggtggaggatgggactgccgaagccgtggtgacctgtaggaatcaccatgtggcagcagcactagggctgtgtcctagagagtgggcctccctcctagatttcgtccaagtgccaggcagagtggtcttgcagtttgcagggcctggagcccaacttgaggtgtaatgtggctgggagggagggactcggatacccaaattcctgggcttttggcaaagggtttaggagccagttaaccttgaccttctctttctagtcttcagccagggttgacgagcccatgaccatgttcctctggacactttgtactagcccctctgtcctccgtcctattgtgctttcttttgagctggaaaggaaaccgtcgaagatcgtcccattaggtaaggttggagacggggggatcatgatgatagggggatcatggtgatagagrtagatgggtccctgggaggaagagggatgagggactgatggggaatttctggagttagggaggagaatggtgggtgggaactaaaagccacatgcctgagacrtgtgtttttcctctcttcccacctcagaacctcctcggctacagcgattccagtgtggagagctccctttcctgactcacgtgaaccccaggctccgattgtcctgcctttctatccgagagtcagagtactccagctctctggggatccttgcttcctcctgttaactgaactgcaaggatggcctgagagtccttccttgctgaaaayctgaaggcctaggtcctggctcctctcyctacttgttctgtgattgaaccaaggactccagattcacaaactgctactccactataatttcccttctttggtgttctggtgccagcctgccttggcaaaattgtggcaacaggaaatcatggccctattaatatgtcctctgattgggacaaggcacctgcattcacaggcggccctgagcacctgggttctgactttgtcrcaggagctgagggaacaaaagacttgctcgctgyggggtgatggtgacaggcctattgacctgcaatgaagccctctggtgtcatttctcactggtactcatctctggggtcccaggcctcctgactcctagttgtccacctcctaggaactcctagtcgttcatcatcatttcagccctttgccgccagggccaaaggtggaaagtgatttggaagagaagagcttttcgtccagcagaagaaatggtaccaaaatcagtctgtaaaggaagtaaattggggagttggcggcaaggcagagagcatagctatgatggtctcagtcagtaaggctgggccctgcaggaagtcaaatatgaatgcctagaggtgttcacaagcacaaagaaggtgtagggggaggcaagtgccaggcacaagcaggggcaggtgaggactctgggtgactgtgctatagggccccaggctacggttagccctgtaggtttcccaagggcctggcctaaggcagatccttgatcgatataccttgagaccagaaggtgctccgaaatcacaaccgtacaattaggggatctaggaacaattctttggagataccaatgcctttggctggtgttgctgcatttctttactggggactgatagatggagaggtggaaagatgagctgaggcacatctttcagagctactgggaggccatttcttcctggctgttaggatttgttcgtgtttgggagacctttagagcgtggttaaacccatatgttgggatttatgctgcttttatggtagcaataccctatattaagatttgaagtagacccggaaagttagtggccggttagctcagttggttagagcgtggtgctaataacgccaaggtcgcgggttcgaaccccgtacgggccagtgggtggcttttttttgtgtgtgttttgttttctgaccctctgctgttatccggaagtttctacccggagccagttgccttctggtaacagaattatattgcacctactgcttcctattccctgaatcactagcgctcccgaaggcttggagggaggagtctctgggcacccgggtgaaaggaaggttcacgtgcaaccgccgcgtctttttttccctgaagcgctttcatggaggcagatgtttgtcagtcaagggaagtaagaaaggcattggatgaaaacgaagccctaagcctcgtagtcgtggccgagtggttaaggcgatggactagaaatccattggggtctccccgcgcaggttcgaatcctgccgactacgtcatatttttttcttcagcatactgaccatatttctctccaggatgggatgatccagtcggcaccctccaaacctctcatctaggaactctagaatcgagaatttgatttagagtctatgattttggtttgaaatctatgattaacgtctttggacattgaaggaaatccgaggaatggacaagtgatgcaagagccagttgagttaccaaattagttctagaaagatctgaaaaagctcggtccgggttcctagctctatattcttgtagatgaatttcaggaacctttatggcagcttcggcgccgtggcttagttggttaaagcgcctgtctagtaaacaggagatcctgggttcgaatcccagcggtgcctttattcaattgaaacagcgtgattttgcggctaaatccacatcctttcatgtattgtttttatatcagaacgcgtaagagtttctgttctgcactcatagcacccacatttcctgcagagtcaagctgccactcccatgagatcgccactctaaaaggtggttctctaacttaggggcagaaatgttgcataggcctaagggtcctttgcttaactgatgccacaccccactggtgcaggtggactgggtcaggcggccgccccaccctcgatggaaggggctgcccaccttccaggcctctttctccaccctaggacgtcccctagaacctgagccactttgttttgtttggctcttcattatagttctttgggtttggtggctcataatgttatatatatagtatataatataaaaatatatatttaaatatacagtatttaaaatttggcacagcttccagatgcggtcctctaactggtctttcacttgcagttacctccatccctctccaccagcgggatgtcagggtaaggagtaagcagggatccggctggcctggcctggcctggcaccaggtttcgtgcagcagggtgcagaagggctgaggccatgtgaacagagtccaagaaagcatcattcgggagtcgctagggatcctggtgtggaagggcagggcacttttctggagcactgaagctaggctggttaaggaagaaataaatgccagagataaggcaagaaataggatctgtgagctcttggcaggacctaaacctccttggaagataggcagaaagctctcgacaccattccatggcccacgaaccaatgtaagatgagcaaatggcttgaaggaattgctacctccaggtcaagccagggatgcagcactgccgagaccacgtttgtgccaagcactgggctggaccctgtgcagaaccaaatgaacaaggcacgttcccctttcagcactaacggcactgtaagaacagggagaagtggaatctaatctggcctgagggtagagggtgatcagctaagtctgaaacaccatgtagaaacttgccatgtatggccgggcgcggtggctcacgcctgtaatcccagcgctttgggaggccaaggtgggcggatcacgaggtcaggagttccagaccagcagcctggccaacatagtgaaacctggtaacatagtgaaacctcgtctctactaaaaatgcaaaaaattagccaggcgtggtggcaggcgcctgcagtcctagctacttgggaggctgaggcaagagaatcgcttcaaccttggaggggggaggaggtgttgtcagccgagatcgcgccactgcatcccagcctgggcaacaagagtgaaactccgtctcaaaaaaatgaaataaaataaacgaatgatcagctgtttgttagttcttggttattaaaagtggggtctatgtacgcacttttctgaggaaaaaataaagtgtggggtatgtggatgggattatgtgtgaactccctggattgtatacatgtttaggaagagggccatagctttttttttttttttttttttttgagacggagggagtctcattctgtcacccaggctggagtgcaatggcacaatattgactcactgcaacctccgcttcccgggttcaagcaattctcctgcctcagtctcccgagtagctgggattacaggcgcccgccaccacgcctggctaatttttgtatatttagtagagacggggtttcaccattttggtcaggctggtcttgaactcctgaccttgtgatccacccacctcagcctcccaaagtgctgggattacaggtgtgagccactgtgcccggtgaagagggacatagctttcataagggtcataaaggatttaggcctccccttctgcagcgtttaagtgcctgaggccagggaagaggtgactggattattttgcagagaaagctggggcccaaggggagggagacaggaattggaaaagggtaggaatgggggaggagatgccagatcagccctgagaacctctttacccatctcaaagacttgggacactaatgggaaaggctgggctaacttctgctgcccttccccactgtctgtccaggggaacctgggaaagacaaataggagctgaatccttcactgaaagccccgtcatcgtatctatgggttgggcattaggaacggcctggccccacaaatcacacaactggggtgtagaacaaaatggttccacagatgacaccaggctggtccagggccgatgcaggccagaaccccgctgggaggactccccagaacaggcactgagctgaggaaaggcaggacacgtggtctgctaccgaccccaccagatcttgctgggactctgggcagctccggagtaagagcagcatggtgagtgtttaagagcgcagaggctcactgggcagtcccggggacactgctaagtccccaaaccgggtctacaggccttcgaccacattcatgcggccacgtgcctcagagccttcggggggtcttaggaggcaggcaggagggtctcccttctaggccattctaggaggggactggggagcagaggttagactgtagggtaggggtaacctgatcttacagtccggaagccatgagactagtcgcctggccttgcgccccgccccactgcagggtggaaagcctgtccccctccagtcacccagctcaataacgccctcttccgtgggtcttctgggccccagaaatcgttccctctttccctcgcttgggtactgccatgcggtctggggaacccgtggactatcgatgggtctggcccagggtttgccctgcccgttagcccaggaggatagacagacacggggcactggtgttcccctagtgatttctcctgcccgtcccgaaagcaagcaattccaccgcttctcttcaaagctctgcaacgaagagctaggtccaaggaccgcaggcggaggcaggaagtgtcaagatcccaggttacggaatggcaccaagtcggtaaccaaaggaagcaacaacccgggtgttcaaggcagtcgtgcaaggcggcgcgggggcgaggccgaggccactccctcccacttccttgacgctatttcctgggaggagccggagctcgcggcccggagccaagagattcccagcccagtgctccaaaatactcggcctgggggaggctggtccgtgagcgtgcgcccggaccgttccgccatgcatagtggacccagcactacagcaagcctggcacgacctctaaggcggttcgcggcaacgtccgcacgtcggctcgttggtctaggggtatgattctcgcttcgggtgcgagaggtcccgggttcaaatcccggacgagccctcctttaccttttactgagacaagagtgtcttcaaggaatatgttacctgaccagcgctgcaggaggcttgactgtaagtcatcaatgtacagtaagctcttttgtggcaccgcggtagcagaaagcatctcaatccccagacccgcctggcatgtcaggaagagacgaggcacgcccagacttgggcaggtccctccctttctgcttcctgacttccttcctggtgtctcaactcggccaccacagcctggtttcgctttgattgacacgcgtcaatctatagttgtggatgacagtgttcgggagagcccaggaactgtcaaaacttggttctctgcagtcctgaaggcactctgtctctttcggtcactccatctgacgattggtgcctgaaatacacctacggtttctggtcagcgtttatcagtggttggaagaacagaacccctaggaaccctgctgtcagcacgcagagtgtaaagtctcagatcaaggattcggagaaaggtctctacaggtccctcctcgttagtatagtggtgagtatccccgcctgtcacgcgggagaccggggttcgattccccgacggggagagtactagcagtttcgaaacttctatctttttgctttcattaaatccgtcctggtccctgggatggagctataaaaaagagggaaaggaggaggggaggagagtttggccttcctctccagctcgcattctaagtttccattttacttcaagcaacttagagttcaaacgtgtacctaaagtggccattatctgctctgctcagtatgctcattagcgctcagacttggcctagcttgctccctccttgacggaagtgcgcatttccagtctctgcttgaacctgggcaagtagctttggcccccagccgtccagggtgcagagcccgggcttttgtttcctttcgcctccctgctttttgtggattcgcactgcgatccgggaacagtaggcaaccccgggccgagattccgacgcgctg

SEQ ID NO: 97952 - DNA, 40069 bp, Homo sapiens
gcctcccaaagtgctgggattacaggcatgagccactatgcccagcctatcagggaaatttgtttatggtttggacattagataacaccaagcaattaatttttatatacatgataaatgggcattatatatatatgataatgcccttgtgtttatgtaaggcaaatattaacattgtttagagacatatattaaggtatgcagtggtaaaatgatttaatgtctaagattttgcttttaagtattccagtcaatgaataaaaggaatagataaagcaaatgttgtaaaatcttgataattattgactgtgggtgatggatgaatggggtttctgtaattttattcttttttgtgttaaaaagatactcacaataggctgggcatggtggctgacacctgtaatcccagtgctttgtgaggcagaggccagaggattgcttgaggtcaggagttcaagaccagcctggacaacatagagagaacccatgtctacattaaaaaaaaattaggtgggcatagcagcatgcactcgtagtcctagctactcaggaggctgaggtgggaggatcccttgagcccagatgttggaagctgcagtgtgctatcatcttgctactgcactccagcctgtgtgacagagcacaatcttgctcttaaaaaaaatcataataacaatttaaaaaaacctttaacatataaaattcccttcaatataagtcttacacatactgaaagagaaaatgtaatggatctattcacctcaaatgcagatgagatgagaaaattattgtggtgtgtaataatgctttacaagtaattcagagggacatccacttaaaggggaaaaagtagcgctggttgttttgcttttttttcttttttcaggccgagtctagctctgttgcccaggctggagtgcaatggcacaatctcggctcactgcaagctccgcctcccaggtccacgccattctcctgcctcagcctcccgagtagctgggactacaggcgaccaccaccatgcccagctaattttttgtatttttagtagagacagggtttcactgtgttagccaggatggtctcgatctcctgacctcatgatccgcctgcctcagcctcccaaagtgctgggattacaggtgtgagccactgcgcctggccagcgctgtattataatagtgatctctgcatgaatatccaaaacaggagctggcaatttgagtatttctttacatatacacacttctcaagaattttccaggaatcttccaaggaaggaatcaaattgcaattgcacagcttttaacaatcttgaagtcatttgggatgtggacccacacatgggttctgtttcacccaactttattagagtttatgagtcagactcatgtttctctttggcttgtgctttcatttactggcatttgtaggctcaatgcttacataatgatgcaacacaagtccttccacaagggctgcccttgggctttttggactacatagtctttccatttaaaagtaatttctactcagaaaaaaacctaatttgctcctttgagtttcagctggctagctctatgtccatgggagtaataggcaaattatgacccaaagcaatttccaaggaattttatttattatccaaaataagaaagtagaagtgtatgattaagttccaagacttgtttaaaaagtgtctactggagctgggcgtggtggtacatgcctgtaatcccagccacttgagaggccgaagcaggaggatctcttgagcccaggagtttgagaccgacctaggtaacatagcaagaactgtttccaaaaataagtgtttactatgccagggcacaggattcagatcctgaagtcagcaatggctcaagatgaggctacttctgatatcattatatccactccttatctcctaccaaaatatacttctttctattcctttttcaccaccttctgcctttatttaaccttttcttttatccttgtttccattcattcattctctatccatttattcagcccacatttattgagtgtctactgtaagccaggtattgttctgagccatgtaagtacaagagtgaataagaaacaatctgtgctctcatggagcttacattctattggggtaagaaacataataactaagtgaacataaaataatagtatgatgaatagtagaaaggaaatatacaaggtggtaaaatagaacaggttgaagaagaaacgagaacttcatttagactcactggccagattggcctaagagtatgagatttggtctaagatctaagaagaaaagcatgaccactagcaagcctttcaaagtaagagaaaaggcaaagggaatagcaactcgaaagggccatgagttaggaaaggaactgccatgtttgaggaactgaaaggagtccaagacagattttggggtgggagagggcaaggaaggtgttagggagagggtttaagaaacgacattcagggccgggtgcagtggtgcacaccggtagtctcagcactttgggaggccgaggcggacggatcacctgaggtcaggagttcgagaccagcctggccaacatagtaaaaccccgtctctactaaaaatacaaaaatcagctgggtgtggtggtgcacatctgtaatcccagctactcgggaggctgaggtaggagaatcgcttgaacccaggaggtggaggttgccgtgagctgagatggcgccactgcagtccatgcactccagcctgggagacagagcgagactccatctcaaaaaaaaaaaagaaaggaatgacactcaggaattagggtgccactaggtttcacaggaactttatcaattatggcagagaatgtgattgcctaccttactgccacaaactcttcctccttgctaacagaactccagttttgtttaggtagcaatgcatccagctccagacaacaaatcataatttatgtaagccagttctggccaataagatataaggatttcactagaaggtttcgagaaatatctttattcttcatatgagagccacaagtgaataaagctgttttgcctccttctctgtcttcctgctttagcttctgccatattttgatgtgatgtccagagctgtagcagccatcctgcaaccatgatgtaagaagcctgaagatgaaagtaaacagatttaggatgctggggaggagggatagggattgaaagaacctgaatcttcctttccttttcctttccttcccttcccttcccctcccctcccctcccctccttttcctttcccttcctttcctttctttcttttgcgacacagtctcgctctgtcacccaggtggagtacaatgctgtgatctcagctcactgcaacctccacctcccgggtagctgggattacaggcatgcaccaccaggtctgcctaatttttgtattttcagtagagacggggttttgccatgttggccaggctagtctcgaactcctggcctcaagtgatccacccgccttggcctcacaaagtgctgggattacaggtgtaggctaccacgcctggcctgaacctgaatatttaatgacatcttcaaactgctaagcctatcctgggatcattctttttgttacatacacaataaatgtccttatagtttaggtttcttttagctgaggtttcagttatttgcattgaaagcatataattgatatagcaggggtgagacatgatatgatttatgtattttttaaaaatctctctggcaacagtatgaagagattgtaaggagcaagaatggaacagaagcatggaagactactgcagtagttctgagaagcaatcatagtgttctggcctagggagtatgcagtaaagcaggaaagaacatagattcaagatgtatttgggggtaaaaacagtaggacttgctgttggtatgagaggtaaaggagagggaggaactaaggctgaactctaggttttggactggatggtgatgccattgattgacacggagaagacccaaagaagtttggggaaggcggtgagatcaagggtttggatgtgttaaatttaagatgtgtatgaaccattaaaatgagatgacaaatcagcgggtagacatgagtctggagcacaggggtaaggtcaggacttggatttcaatttgagaattatagatacacagatgttatttaaagccacaggaataaacaggattctcctcactggccaaaatatgaggaactctaaagttagaggtcagctagaagggaagaagactgaggagaagtagtgaaagaggtaggagaaaaactaacagcattagcgtttatatagggcttactttatgccaggcactattcaaagcactttgtggcttcatggaagcaaagagaaaaatgtttttcttttcttcctccctttccagtctctcctgtgactttcacccctaaattcaaaaggtttaggtgcaaaagtgattctcagcttttatttgtaattaattttatagtaatcttgtactgttataatcttgtactgttataatactataattatagtatacattcattggaaaaatattcaaacagcacagtacagggaagctaaatgtggaaagtaaagatcctcagaagctttccttcctaggctcacccaccagaggtaatcattaacagtttcttgcatatcctccaggaatgttctgcgcaaacacacacacacacacacacacacacacacacacacacggacgcaaacaaataccatccctctctcttctctctctgtatacgtacgcatatgtttaattctgcaagttgctttgtttaaaactcaataccttttggaggtatttatatatcagcatattcagatacaatttactttttttaaaaagggtaatatgccattgtattaatattccatactttaagttcctctatcgatggacaattagaatgcttttttttttcttgccacacacacacaaaaattgctgccagaaatctttgtagtaaatctttggatattggtgcaaaaataattgttgcatactttcttagtggtgaaattgctgaatcaatccgctcaagcctctcatattgtcaaattactcctcctaaaaggttatactaatgacattctcacatcatttccttacatcttggtacacatttggtattaagcgacttcacaagtttgccagtctaaacacatggaaaaaaatggcgtcatgttgtttttatttgggtctctttatgagtagggcagcaagacctgattgttaaacgttcaagttttgaagttaaactccctgggtctggatcctacttcttccttgtaaaatgtgtgatctcgggcatgctgggtctacttcctcgtctcaaaaaaagaggataaagagagtacatatctttaggcttaaacaagatacgcaggcatacaggaagcccttcttatgcgttcgctactagcggtactgatcctaatttttttgaagccgtgccggctccggtactttatttttggtgtgctcctccaaccaaccaagtttcgcagaattctgttgttgcctgtaattagaaatgagacgaaaattggctccgcttgttcaaaattctcctccctccgccccaactctgccttagaatcactggtttaaatgtcaatgtaaaggaatgagttgcaatttttaagcaacatgtaaagtgcacacctggtctgagtacctcccggcggccaggacccgccgttttcggtatagggaacaccagataacaatatataacgctacctaacaaacgtttctccacccacagcgccattagcggttaggtttgcagtgccgaagagctgcaagaaaacggggcttgaaacaggaatacaattgcagatccacccactacacgcaaagggcccgggacgcgcctccacagccccgccccaaccggaagtgacgcaccgcgccgactatttcttccgccgtccgccggtggcgaggcccaggctgtygccgggtgtgcagcggcgtcgcggccagtagagggattctgggtaacggcccggacccccggctgggcttctggctcggcgcagcaggttccattcacgccaagtctgttggcagtggcagttgtagggccaagggcggttgtaggacccggagcagccggacatggaacaaccgtggccgcctccgggaccctggagcctccctcgggccgagggtgaggctgaggaagagagtgacttcgacgtgttccccagttctccccgctgcccgcagctgccaggcggcggcgcccaggtgagarggggcctgcgttctgcggagggatggagtggtgctgtcgccaaacccctggaatgccgcgtctcccagaccctcttctacgcctttttctacgcccacctcactgccrggggccggggacctgggacctgacgcctgatgccatcccaccccttttatggcatcttcggagggcagacggggtggccatatattaccaacctccacctccamgcacatgttttctttcgccttggctgattcctgttcactcttggaataccttcctccatctccccttcctgacagcactcagatttggggcggctcatgctgtaacattgaccctttgtcctcttgtgagaggttttccccaagcactttattctgttaaaggctctagcatacttgtgcacagttgctaggaacagtgaatgattgtagttcagcatcacactgagtcctgacaaagatttcacatgcgattttcaccgatgttgacaactgagtaaattctttaaayctcgcttttgacgctggcgtayacctctcccattcgcgtgaccatctttgccttactgttttgttttttagttttgcttcacgtcattctccagtgaaaatatatacgcatatacttgtgttttccttcagacttctcttaggttcctggtattgtgttttcaatccagcattcctgccttcctgcgactgaaacgtatccaaatgtgatatactattaaggatttttcagggacctatcttaggrgatacttacatactcgcatcaccttgtcctgtttttttctccgaatccgtgtgtgttttggaagtatatttcagaatcacagactaaacactaatatattcaatggatcataagtgtctgccgccttcttgcaaaatggggttcccaagagtgtaacagatttaatagtagttttcctctcaacttattttgctagatgttaatgagaatgagttaaattgcttaccagtaagcgtgacattatcaatcttatgtccagctaacagggttagttggcttcacacagagaaaaatgctgtttcataaccactgtctgtactttggccagctaagtcactggggaactacaagacattttttaggaggacagaatgagagttgatgggtccatcattagtcacccactaattttggatcactagtgtcatctttatatacaaaatgtattataagcacatgatgtgctagggaggaaagaagaatgaacagcagatgccattgtcaattttgaaggcatatgaagagaaaaaagggtgtcaagaatttcagtgcattgtggttgaattacagaagtaatctagagaaatatctgtatgttaatttcttacttgtgcacttctaaatttgtttagctggaagagattttagaagtgagtaagcttatctctctcattaaaagtgttttccctgaggccatgtaactagttagtggccaggttaaaactagaacccacttatgactcctagtccagtatattttcccacctactgcactgcccaccagagttcgagaccagcctgaccaacatggagaaacsctgtctctaccaaaaatacaaaatcagcctggtgtggtggcgcatgcctgtgatcccagctactygggaggctgaggcaggagaattgttggaggcaaaggttacagtgagccgagatcacaccattgcattccagcctgggcaacaagagcgaaactcttgtctcaaaaaaaaaaattttttttgcaaactgattattaattctgagttcatgtgtttattacaaacctacttattggtcttactggctttaagacttaaatttttggattggaatatttggaaaaaataaaatgtttaattgattaacattttataatcctaaaaaaagctttggcttaattttatcaaataagggggatctagacttcttaatgtagtatgtgatatgtagttcttagatccaattaatgtaaaggcagatcatgtttaatgtccctctaaaacttctgtatggtcatggattagaatgtgacctaatattttatttaatatctgaatacatgttggatagtttgcccaaatggccaaatgttgtctgggtagtttgtggagaattaagacatacattatttttagaatttttcgatttgagaaaagaatatttgctcccaaataatttgaaaatgcaagataatttctatttatccatattaccatattacttttcttgatatattatcctttcttttttttttttttttttttgaggcagtgtcttgctgtgttgcccaggctggagtgcaatggcacgatattggctcaccacagcctccgcctcccaggctcatgtgattctcctgcctcagcctcctgagtagctgggattacaggtgcccaccactgtgcccagctaatttttttttttttttgagatggagtctcgctgtgtcacccaggctggagtgcagtggtgcaatctcggctcactgcaacctctgccattctgggttcatgccattctcctgccttagcctcccaagtagctgggactacaggcacccgccaccatgcccggctaattttttgtatttttagtagagatgaggtttcaccacgttagccaggatggtctcgagctcctcctcgtgatccgcccgcctcggcctcctgaagtgctgggattacaggtgtaagccaccactcccggccatgcccagctaagttttaaaatatttttagtagaaacggggtttcgccatgttggccaagctggtttcgaactcctgacctcaggtaatccgcccgcctcagcctcccaaagtgctgggattacaggcgtgagccactgagcccagccaaaagaagttttatatacaaaagttcttacatcttttcttacaaaataagttatatagcttaatttttctccttttcctggctctgttttaagcatagctagtctacagttattcttgatcctattctaagataactattcttgatcctattctaagataacaaaaagtaaaaataaatattttattttaaaatattatattttatattaaaatattttatattaaaatataatatatatattaaatatatattatatttatatataaaatatattttaaaatatattttaaaatatactttatatattttatatatatattttatttttatatataaaatatattttatatatattttataatatatgaatatatattataaaatatacttagggacatggtttatagtaccttggctccaaacctgctgaatgagtaaataaaacatctgaatagcaagtgtccacatttgtcccagtacaaacgtgagtttgcctgaagactcagctaagaggtagggtccttggttactacttgcctcagaattgtttaccaccaccagtcagtaaacaaataagcatgatattgtatgacaaacaccacaacagaaatatgcataacttgggtcgggagacactgggtcagaaaaagtttagggcatgccagaatctggatgaagataggagtttctgtaggagttacctcgaagaaagaggattgccaaattgaagtgagggacaagggtgggaaagggaagaataagcaaacaagtagaagagcaatgggaactgagtctaaagaggtaatgggaaataacatcacgaagggctttgccacagagtatgtactttatcccaaagctaagaatgaaaaaaaagatcagattcattttttggaaagatcactccagtctagtggagtggagaacggcttgggataagagtctgcatttgtataattcacatgtgaaattataagggcttgaatagtgatgcagatatgggaacagattggagagaaattattctgaagttgatgtacatttgacgaagaactcataaagaatgtgccttcagcttttgttttatagagccaaggaatatagggtattgaatgtctatcacagtactttacatgtagtaattaagtaaataaaagtaattactactgcttcggagtagtacggtcagcagggtagaccattgtcacttttaagaaatgtaactttgtggccaggcgcagtggctcatgcctgtaatcccagcactttgggaggccaaggtgtgtagatcacgaggtcaagagatcaagaccatcttggccaacatggtgaaaccctgtctctactaaaaatacaaaaattagctgggcatggtggcacatgcctgtagtcccaggtacttgggaggctgaggcaggaaaatcacgtaaaccccagaggcagaggttgcagtgaactgagatcgcacctttgcactctagcctggtgacagagcaagactccatcacaaaatatatatatatataatttgcctattttgattaggaataaattaaaggatatctgtctgatataatcagttataaatggaaatatccaataagaacttctcaaatcaccaatgattggaaaaatacagatagaaaatagaaaccaagaaacgattacttctagataaaaggaggtttttttgtagtgaagaatttggagaacaaaattataaaggcctggttgtcagcatgttgagtattgaggtgatgaactagatttaagctttgttctcattattctgcttgttcaggattatgaagactattaattaaacgtttgttaagcactagctttatgcaagacactgtgatagttgccaggctttttgttgctgttagttgtcaggggataggcctaaattaacaaagaagtttagaagttagttgatgaaacaaggactaagatataaaaacatgactgcagacctagaacacaggatatactrtataccaaaatattgtacagaaatcctttgaattaagaaaaattgaactgtgctgcacaaacatccattgctttcttcatttcttacaaatattgtttttatccagatgtatagccatggaattgaattggcttgccaaaagcagaaagagtttgtgaagagctctgtggcgtgcaaatggaatcttgctgaagctcaacagaaacttggtagcttagcactgcataattctgagtcyttggatcaggagcatgccaaagcacaaacagcagtatcagaactgaggcaacgggaagaagagtggcgacagaaagaagaagctctagtacaaagagagaagatgtgtctgtggagcacggatgccattagcaaggatgtttttaataaggtatgagcttttactgggccataatgaaagaagaaaaactgaagtgtttgtacaaaccagttgtgcgtatttggtagcaaagcagcagaatcccataaacagtgttcaattttgacagtttatgaaaggtgcttgaaaagtttatgaaagtcaaaaagtctcaaagctcttgctgtagagcygcagactccaggcagttaagtgaccagactgaaatacatatttatataaatgtactgctgaacaaatattacatatattaaaaaacattcacaagaatttgatataaggatgggaaaatatatcagttatgaaatattttcctccacatatattttgtaccccctacactgattatcactactttagagttcctttaatgcaactaccttctttttataaatgaagaaactaagtggaaaaataagtagagtgacttgataacttagtggtgggttaaatgtgagaaattcctgactctgggattgagagataagataaagagaagtgttgaatatcctttattaagtgcctttaagaatgaaggcttagacttttaaaatctcatgtttttcaaacttcagggttttatacctcagttttccatttgaaaactagagtttttagcgattgattttcaaatgcatgaaaaggggagaaaaggcaaaacttcatgaactagtattttaaatgtggaataaaatgatatttattgaaaaataggccaggcttagttgtccacacctgtaatcccagcgctttgggaggccaaggcaggcagatcacttaagtccaggagttcaaaaccagtttggttgacatgatgaaaccctgtctctataaaaaatacgaaaattagctgagtatgatggcatgtgcctgtattgccttagtcccagctacttcggaggctgaggcttgaggattacttgaacccaggaggtagaggttgcagtgaaccgagatcgtgccactacactccagcctgggcaacagtgaaacacatctcaaacttcttaattgtcctcttggcatctgctttcacccactctcatgaacttttttaattgcctttccctggaccagctctagttctgctacagcagtcagtaacacacacagataagtgtacatcgccactagccctatcagtactttaacagtgagtcatatctttctcgactttctctgtgcctgtactaatttatatatactttttctccccctccacaatgggatcattctttatctgagtcatttgctatatctgtatatattgttttaaggggtgcatcttgtgttattttctgttctgcatttatatcccaaaactattgaaaataattttttttcttccagaaggaatgttcaaagtaatatttcttgttttgtaaagttaatgtctcttctttaacacagtggtcacaaagaaaatattttcattttgtctctgcttttaattatttctttaaacttaggttctaaggttctaagacagcctacatttatctcacaaattaattaggactatctttatgttccagtcatttgctcaaaatcctacactggttttgtctgggagcttgagacttgagaggactggtctagatctgcactatccaacttgatagccactagccacatgtgctattgagtgcttgaaatgtggctagtccgaattgagatgtgctgtaagtgtaaaatacacaccagattccaatgatgtagtgccaaaaaaagtaaaatattaataattgttttgtattgcttacatgttgaaatgataataggctggatatgttaagataaataaaataatttattaatgtcatctgtttctttttgctttttaacgtggctaatagaaaactttaaattacatttgtgacttggattgtatttctattggacagtgctggtctagatgtcagactgcatgaagaaaaaatcttttattttgaaatatgtaaacttttgagtgcttcctgattataaactggcagtgatctagtttgcaatttttatttttggcagtgatgataacggggtataaatatgatcacagaatgttctaagaaacttctgccagtttttctagctagatacaaactttattcttggtatattttatgacttatttaactgaaaataagtacttccttaatagaaatttgtacttgactttaaaaatcaaactgtttggtctcttctaagaagtttattagaaatgcaacaaagggccaggcacagtggctcatgcctataatcccagcacgttggaaggccaaggtgaagggattgcttgaacccacgagttcaagaccagcctgggcaacatagcaagaccacgtctctacaaaaaatttaaaaattagctgggtatggtggctcacacctgtagtcccagctactctggaggctaaggtgggaggatcacttgaccccaagaggttgaggctgcagtgagctatgattgtgccactgtactccagcctgggtgacagagcaagaccccatctcaaaaaaaaaaaaaaaaaaaaaaagacacgcaacaacaacagtctatttcttgtttatgtcttaataaagaatttacggtaaatatcatttattctctatgtgctttgaatttctgagtttatttccagcaagaactcgaaagattaggcaagagttgcaaatatttataggaattaaataatgcacaagtaaactatgcatataaaatataaaggatgtttctatacctgcttttaattgggaaattcagcttaccaaaaaggttaattcagttgtttttctgtatgatttctaagatgaacctatatccacacatatatcgtatgtatttttttgtgagatggagtcttgttctgtcgcctgggctggagtgcagtggcatgatctcagctcactacaacctctgcctcctgggttcacgcaagattctcctgcctcagcctcccgagtagccgggattacaggcatccaccaccatgcccagctattttttgtatttttagtagagacggggtttcactatgttggccaggctggtcttgaactcctgacctcgtgatccacccgcctcggcctcccaaagtgctgggattacaggcgtgagccaccacacccggcctcatacatcattttaaacaaaattaataagactcccatacaagaaaattttaatttttaaaaatagtttaccagatgaatttaatcatgtaatatcagtatgatactataccacatatattgtctataggaagaattgctagatattcagtatctgagaaagaagattcaattagaatttaaaatctgatttaaatttctaaaattttttcttagagttttattaatcaagataaaagaaaagacacagaagatgaagataaatcagaatcatttatgcaaaaatatgagcaaaaaatcagacattttggtaagtctactacttggatttccttctttgtaatgtttggtatcatatgtacatgtgcaaaaaatggatttataaaaagagagccaaaaagaaaagtggcaaactccaattttgtagcttctggcacagctgtatagatcttgttttagaattttttttttttttggttataaataaaattaattgacagwgcaaaccaaatggtaaagagaagcaaaagtattattatatagtgtactacctttaagacaactttatgtattccatagcctctttccatttcctaagtagtctttgcttttttctttttcctctttgcttccttggaatctgattatcttatgttttaaagattattcattttttttcaggttttggatatgatgctttataattcaggcagatccttgaactgttactcagataaatatagtaatagaaatgtatatataaagaactgaaaaataggttttttctattggggaaaaagggtaagaggggggttgatacaagtgaaggcttcccagaggagccagcatctgagcttgatttcaaggaacagataggagtttttcatgtataagggaggcaagccaacagcaacagcatgagacgggcagttaggaaacagcatggtgtgttctgagaattataggcagcatgataccgctggcatgaaaatgctgctgggaagtgttaggagttaaggtttaaaactttttttttttttaattccaagtagtatgttaatttagtaaacatggtttttatttgtaatatgttcatgaactttttacatggcattttgaaatctttttcctgttggtgtttatttacccarcgttttttgaatttcgtttatgcttcagttatgtcaatataataaatattactttaaattttttcccttccttttatgtaatttattcgtaaaatattcactttgctcatacttttcattttaaagaaagaaaaaagactgtgtttaactaaaaaatagtacccaargaaataaagacaaagtttttctacatataatcaatgtggtattatttataatggaaaaaaaatgaatacacaggcctcccttggacagatagtaaaatcttaaaatgagcagagccttgagtcataaggatagaaagcaaaaaatttgcacatgaatcttagttgtgatatgtgaattgccactcccgcctacagtccttgctttctaggccyatgttttgctgctgaaggaaaaatagtaccatatactgattgctctttcagagcatgtactgcatctggtgaaacaacattcctcaaggtgttttcacccagctggcactctgaaagttggttgctttgaagccatgagaaacctagtaaatgagaagcagttctttcacttttgctgtaagctgagtgccttgttcagaagcaattttgtgtaggaaaatatccaaatatcacaaagtgttgtaacccatctggcactatgtatcttcagcattttataaaacctgcttctgggtagtgatgttcgtgatgagaacagtgaatttcatgaaccctacagtcttcatttcttttgctgtaaaatgagtttctgggtcaaaaaatagtgtggtatggtgaataattcatttagtaagactacagatgtattactgattagaagcatggcaaggagggagggcacttccacatctagagtgggctcgttcaagtgaggaattaccagtccctctgagatgaagtgggaccagggtagtcaacctgctacttgatggctggctgatctctgcagtgcattgtgccgtattgagattttggtgtttttcgctactagtaaattaggtgttcagtggctaaactggattaggatactagaacatccttgaggggagagtctacactgtcgaatctatgcataatcacaaacctatgccaccacgacccctgaatttatgaaactattgtgcaaataatgagatagttgaggaaaaaaactgacttaacatccacaggtgattaataagcaatcattttgctgttacgtgttgtgaacttccaatatactatcttgtaataaatatcagagccttgctgttttcacacccagccagaccaatagccattcccagagtcacaatgtgcctgtttcttactgaaaatgcatgttgtctttaacttcaaaggagatatattacttgccacagcacactggatccccaggaatgttacaaaggtagtaggctctcaaaatgttcatgtgttttatttcccactctggaatagatatatcttaacaagagacctggaatacctgcaatttctgctttaccaagttccatcagtggagagtggaccaacttgtagtcatggggaatgatgagataataatccctgtggactgaattatggcacagagttgatagaggtgtgacacaagacagtgaaaatttgtggctatgcctgcttgatggaagatttctgttgtatgcttattgtgatgaaagaagaaagcttaccaaaatgatgactatattggtatactcctttattttgtttttttgttgttgtttaacttttgttttaaattcaggggtacatgtgcaggatgtgcaggtttgttacataggtaagcgtgtgtcttggggatttgttgtacagattattacatcacccaggtattaagcctagtattcattagttatttttcctgatcctcccaccctccgcccttcggtaaactccagtgtgtgttgttcccctttatgtgtgcatgtattctcatcatttagctcccgcttataggtgagaatatgcggtatttggttttctgttcctttgttagtttgcttaggataatggcttctggtatactcttctaaacacatctgcaataggagatgtaattaaagcttccagttggaggctttctggacttggattgcattctggactcttggttgacaygggcctggtgtgtgtgggggctgtatagggctataggggctttacacccatgtttctctgtggtcttatttgtacttatattcttcagagtttttcctaacttttcccttatacaatttgttgactgcctttcttgtgctgcttttacccttacaattaggtggaatttaccacctagtggtaaatggtacaatrtatcatggactattataaagcattgaaatctgactttttcctctacatttgtatttagtttattaatttagttaattcacgttttataaatataaaatattaatttaaaaacaaaggcttttatctcttaaatttcacaaccgttatattcacagttatatgcatgtttgacatcactggctttatggtcatcagagctgctttttgagtcatctaattttcagagcacatcatcttcactttcagccaaagttagctgtgattcagctttttttaatctgtgtaggatgttgtcactggaaattttaccaagagctataaaagtttgctcaaatactatgatagaagttttttcgtttgttctgactatgaatatttacaacctcttcaatgtaattgttcattgcttttaaaaaacatatcaatatcttatttttgaaaaacatttaatataaagcactcttacatatgaagtgaaatgaatagaaaatgtatatgattttaatgttttttttttttttgagacgaaatctcgctcttgtcccccaggctggagtacagtggtgtgatctcagctcactgcaacctcygcctcccgggttcaagcgttcctgctgcctcagcctcccgagtagctgggattacaggcgcctgctaccacgcctggctaatttttgtatttttagtagagatggggtttcaccatgttggccaggctggccttgaactcctgacctcaaatgatccgcccgcctcggcctctcaaagtgctgggattacaggcgtgagccaccactctgagccttaattttggttttttaaaaagtcattcaaaaatatgcctggaaggaaatacatcaaaatgttaacagtaatctcttgtggtagaattacagctaacttttattttcyggattttaaaaattcttcataataaataaactttatttttataatctgaaaaaaatttttcaaagcgtttatcctaagaatcaaaatggcttaacattagaaaactcattaatgtgattcactgtattaactgatcatagtagtataaccacaggacttggtggtcaatttgatgtgggagaaatggaaatgtcagaggaatttctagaatgcttgatttggtaacatggagcctaggaaacattgtaggatggcagagagacaagtatgggtttggtttcaagtaagatgggtttacgtgcaggcatatcagtagaaatgcatatggtggtagacgattggaaatagaggagatctggagtttaggaatatgggaaatgatcatacaactttcctcaagtaattcacaaactasctgggagatttttagtacacagagaaattaaaatgaattagtgtagtttgttaaaatatatcattctaagcctggcatagtggttctgcctgtaatcccagcactttgagaaactgaggctggaggatcacttgagcccagggattcaagaccagcctgggcaacacagtgaaacctcatctctacaaaaaaaaaaaaaaattcgtcaggtgtggaggcttatacctgtagtcccagctactgcagaggctgaggtgggaggatctcttgagcccrggaggttgaggctgcaatgagttgtgattgcaccagtgtactctagcctagacaacagaggaataacctgtctctcaagataaagaaataaattaattaataataataataattctataagtgtaatgaaagaggaaagggaaatcagtaataaggaaggacgtgtatttcaggaccattttaggaatcaggtggcatattgaaggttgatgatggattgagatttagacgttcactagggaaatatataggttaaagcatatgattaaaatatctaaacttgtcaaagtgaggttttccaagcattcagagaaattgtttggctagtttaaatgactrtattatccttaaccaaaggattagctaaataaacattttgaatgggtgcttatcatttatcgagtatttactatgtctcaggcmctgttctaagtgctttatatgaattaatagcatttaattgtcatgaaaatcctgagttaggtactatttttagccctattttacagaggaggaaatggaggcatataaagggamctgcagtagtaaaatggtgaagccagtatttgaacctgggccatttagctctagtctgtcttctcagccgctgtcttaaattgttactctccatttgtatacaagtttgtttacaaattccaaaataatatcagtaatttgaggtatatgctgttccactgagttgttgattctccttatgtgttttatttttgaaacagagtcattttctgtcacccaggctggattacagtcacaagatcatagcaactgcagcctcaatttcctaagctcaagcaatcctcttgccccagccttccaagtagctgggactacaagtgtactccgccatgcctggctaattatctcattttgtgtggagacacggtctcattttgttgcctagactgacctaaaactcctgtgctcaggtgattctcctgccttggcctcccaaaatgctgggattacaggtgtgagctactgcgccccacctgtctttattttgttcataaaattccacactctttccacaaaggtctgtatcgactacctgtaactgaacttctcaatttcatactaattcaatgtgcatttttgaaatcaagtgatagtatttctcagatttaaaaaaaaaatgtattttcaatgtcaagtgttaattcgtctcaggtattaaataggtagttaaaaaatattaacatttggcagggagtggtggctcacacctgcaatcccagcactttgggaggccgaggcaggtggatcatgaggttaggagttcgagaccagcctgatcaacatggtgaaaccttgtctctactaaaaatacaaaaattaactgggcgtggtgacacacgcctgtaatcccagcttccaggaggctgaggcaggagaattacttgaacccaggaggtggaggttgcagtgagctgagatcgtgttgctgtactccagcctgggcaacagagtgagactccatctcaacaaaaagaaaaaaaaaattaacatttaatgatacccttccccatggccccaagtgtcaggaaccctttcatgttatccttcctgcaaaataaaccagaatggataaggcttttggtatttcagtargtcacaatgctgccatgaagaagtaaacaagaggagcaatgctttatcgtggatggtagatagagttgaaratattacctctccagaagtgtaagaaagctaaggcaaaactgcttcataggatttactttgtgggttcaagtataagaaataaggattgtgctttctttaaatctgagtcccaggaatcattaggcttttttaagagatatggtcttgctctgtcacccaggctgaagtgcagtggtgaggtcatagctcactgcagcctccaccatctgggctcaaggtgtsctctcacctcagcctcccaaatagtggggattacaccacgcctagcaatattcttatactttaagaagtagttttaagtaacttccataatcattctgtttctcagaacttcaaatgacctaatcattatgtccaaagcgttggggaaataactttataaagcttagaatactctatgagaaaatgctacagtctttatccttttttttaatccttttaagagatgaggtctcgctgtattgcccaagctggagcatagtggttccatcataccttctgcagcctctagctcctaggctcccaagtgatcctgccccctcagactcccaagtagctgggacttcaggtgcacactaccatacccagctaatttttaagctttttctgtagagacagggtcttactatgttgctgaggttggcctgcaactcctggactccaccattcctctggcctcagcctccaaaagtgctgagattacaagcatgtgccaccatgcccagcttatctcctttgagacagagtctctcgctctgtcgcccaggctggagtgctgtggtgcaatctcggctcgctgcaacctccgcctcctgggttcaagtgattcttgtgcctcagccttccaagtagctgggatttacctgccaccatgcccaactaatttttatatttttagtagagacagggttttaccatgttggccaggctggtctcgaactcctgacctcaggtgatccgcctgccttggcctcccaaagtgctgggattgcaggcatgagccaccgtggctggccccaccccctttttttaagtgaggagaaaatgaatcatttatttttgattgactcacattgttgctgtgtattctcagtaggacatttgtcttcagttttgttctttcttgtgtactgatgtggaattaaatatataggagttcattttgcacctacaggaaaagtttactgctaaactcttgagtcagctctacaaaatttccatgaatatccagacttctttgcatgagtctaaggaatctaaacctaacattgctatattgaatttattcagttagccaggcacagtggctcatgcccataatcccagcactttgggaggcctagccaggagaatatcttgaggccaggagttcaagaccagcctgagcaacataataagcctctcatctttatggagaaaaaaaagaagagaaaaaaagaaaagaaaaaaatctattcagttatgactgactggacaacattaaaaagtcaacactttgctggttccgtgatttcttggtggtattgactttgaccaaatttcctgctaatttagataaaggtgtagatataacttaaatagtatttggatttctttgacaccttgaaacaaaatgacaaccattttcaaatatgcttaactaatttttaaaagactttgtttataacagacatcatgagtaaatggcttacataactaactctcaatttgcccaagactgcgggcattcatggatgtaggactttttaatattgaactggccactctggcctgattaattatctgaaataaaacttcctgtgaattttaggagctatttscagtctastgagtattgctttaaagagtaytgtccctyacttgctcttttaccataatctgttgctctggtaatatgaattgtctttaaagagaatcatttaaaaataccattgagagattaatgaattaagaatggttggtatttcttcccttatgggaagaaagaaaatatttgacacttatggttcamttcttttttttacaggtatgttgagtcgatgggatgatagccagagatttttgtctgaccatccataccttgtatgtgaagaaactgctaaatatcttattttatggtgttttcacctggaagctgagaaggtattattatgtgaaccttgagtttctgggaaccttagyggaaatctgatttcatactttattgatgttttgttttgttttctacattaagtcctttaaaagaaagcaggaaggtcattagatggaattaccattttttgcttccagatctacttgagtttaatgtgggattttgttgttgttgttgtttcagttagcatacagaaacttttccactatgctttctctgccactccacctccatctctcttgttttcatattactataatccttttcaaactaatttgaaagtcgtattttaaaaatccagacggtaatcatggtattaaatcaagttcagagcatggtcttcctttagttattctggtccacatacaaataataaaaaaaaaactaagatatactctttatatgtttgtaaagtatttgacttataacttaagagagtaaaatcaaaagtattttaaaaattcaaaatttgaatcagtatgccaattaaatatatttatatatttgtttcttatatcatttaaatctttttcagaaaggggctttaatggaacaaatagcacatcaagctgttgtaatgcagtttattatggaaatggccaaaaactgtaatgtggatccaagagggtgttttcgtttatttttccagaaagccaaagtaagtagttatttgatattgataaatgggaagatttggtcccagctgagacctctttgttctgttcatatcaatagaaggcatccaagcaggatgccacaggctaaattctgtagattttcttgtgaaaagaaaatttatattgctaatttcttgctaatttaaacttaaaagagctatataagaggctgtactacagcatgtrtatgaaattgagacccatttaaatgaatgtgtgtattcaggaaacttacgttccatcattaattcattcagtaaatactgagtgcctaatgcaaagcacagctgtttcagatgctcaggatgcattattgagcaaaatagatacaggattcttcatgtgtagaactcagcagtttaatgagaaatcagacttttataaagaaaaaataggaagcaacctaaaaattcagcaattaagggaatagttaaaaatacccatggtacatagaatatcatgcaccctttaaaattatatttatggaacttttgtaatgagctgaagaaatgcttacrctatgaattcacaggaagcagtacatactagatgatgttggctatgttgaagaaaaatagatgtctagaaagattaagtacctttcacactcacaagatttgcagtaatttaaaagctgcccaagaagtagggcaataagaatttgcgttcactgctagtggaagtataaattggaamaaccactttaaaaaatttcctagtaaagttgaacaagtgcctgccttaacacccagaaattctcctaggtgtatgcatcctagagagtagattctcaaggtggggtccaggaacccggaggggcttcaagaccttttcaggaggttctctgtcgaaactattttcataataataccaagatgttatttttaattttcattttcattcctcagtagtgtacaatagagattaatgcggaagtacaaatatgagaatctagccatcttctgtaaagtcagacattagatttagaaaaattaaaggaaaaagcagctctcttctcactaaatttttttgttttggaaaactttttttttaaataaaaatgttattaatggtagtgtaatgagtttgtcattgttatttttagttaatgttttaaaaattcctcagttttcatttctaacagtaaatactgacagatacaactcacataaacagaagctctttagggtcctcaataattttgaagactgtaaagagaactgctgcgctagagaaactcttacacatatgtactagattgccgtaatgttcatagkagattgtaatagctaaaagcctggaaacaataaataaattgtggtgtaggttgagtattcctaatccaaaatccaaaacgctccaaaatccaaaactktttgagcatcgacatgacactcaagggaaatactcacagattttgtgttttcaatttagagatcttcactggtaagtataatgcaaatattcccagatctgaaaaaactgacaatctgaaaaacttctggtgccaagcatttcagatattcaacctgtatattcattctgtaaaatactagccaacatcagcatggatggaaaaacaagagagtgaatcaaacaaaccacagagtgatgtatctgtttagatagatgctaaatggatatatctagtatcaatgttcgtattttgtatttttttataaagtatttttttagtgacaggcagaactaaataatatattgttgaaggatacatatataagcagtaaaactaaaaagcaaaggaataattaagaagacaaaagttacaataatgataacctcagggagggagggggaatgctcttgggaactggtttctaggatcctagtaatgatccatatcctaatttctatgggtaaatagtgggggttttgctgaataaactgtgcgyatatcttttacatgctcttctgcacataggatatatttgaacatatacaattagaagttaaaaggaagtataccaaaagtttaactttggttatacttgtgtggtgaaattataaataatttccgttttctttttcatgtactacaatgaacatttcctattataaacataaaattatatttttatattaaaaaaaaactctcaatgtggcagtagtcctaacttaaataccctaaactcttctgaaatgcaaccaaaatatgaaattttcctgaaacagttgaactttaatagcaaatgcttgacttgatattttagctaggctgcttctggtgactagtctaaacttttgtttgtttttagagataaggtcctgctctgtcactcaggctagagtgcagtggtgcaatcattgctcactgcagccttgaacttctgggctcaagcaatcctcctgcctcagattcccaggtagctgggactayaggcacatgccaccatccccagctaattttttgtagagacacggtctcactgtgttgcccaggctggtctcgaacttctgggctcaagctgtcctcctgccttaaccttccaaaatactgggattacagacatgagccaccacacccggtctcttctaaatttttacttgacacttaagagtagtaaaaaacatactttcctttttatcttacattaatggatgtgtttaaactggtgtttaataaaataatggaatgtggccaaatcatatatattgtttgacatttactttaccaaagtaaaacggaaaggcactggtcttcaatcttaacattgtatgcttaataatacttttttttaaattatgaaataatcactttcatggtatgcttactttgttccagggactattctaagcactttacatgtattaactcattaaattcatataacattttatgaggattactgttgctatcttatgggtgaagaaattggcataaagaaattaagtaagtggcccacaaattacttaataatacaaaatctgtcatcactctatatctaaatccctaaaccttaagcatgcaatgaggacagcaattgtgcctcttaattttcagaaagaatccttatggatattacatactctgtgtccacacaagttcttataaagtgaggtgctaaaatgtaattaaggaaattcttcctaaatttacaagaagataggatggcagcacagaacactctctgcattatttcaatagaagctgatggtagtaactaatccacaggttttaacctgttacgcaacctaaaatccatttgacaagatctcttccactacttgaacttaaagcctgcattctattggtaggataaatctctgtatcatttctctatattcagaggaaacataaacagaggcagctgccaatagggagttgcctaagagttccactccctcgacctaagttatcatactttttctttccataatattgaaaagaaggtacttgcttaactagagcaagatggttccataatgacgttgactattgaattctatttggttttcgtagctcttttaagtagggaatatacagttagaaaattactaggaacaggtaatagtgccccctcattaattgttggagaattaaaaggttttaagaatatcccttgattgtttggtagtaggaagaagatagaatgaattggacagattaaatgactattttggatcctgttaaggatctagataagtcaaggaaaatacagagaaagccttcttttcttttagttgtgtgcatatgcatagggaggggttgttttttattagcttattttgctgaagcagaaggaaatggagcaaaccaattattaatgttcctataaatcaggtagttttcacaaatgtgacagggatcgtggtggtttctatatttagactattcaccttgtcattacttcctccacttcaaacctgttatatgctttctggaatttactatgtctagaaatcttgaagaacacagtctttgttttttttttgttttttctaggcagaggaagaaggttattttgaagcattcaaaaatgaacttgaagctttcaagtcaagagtaagactttattctcaatcacaaagttttcaacctatgacagttcagaatcatgttccccattctggtgttggatctataggtttattagaatccttaccacaggtaagttggaaaagtaaatatttgttttataagcctattaattcacataatttttgttattttgccccactcttttttttttttaatatgtgctactattttaaatattcctgcctcagaagataackgttgaatcttacttcatgccatgttttggtgctgaatctcacctcttaagtatttagagataccagatttcctctccttttaatgtagtagtgattagttatacctaaccattcttaagaacaaatcttagctattgatcatctcaatcataaactcttcaagatggctccctcaggagcttccttaaaacatctcatcctgagttaaaactatgccattttgaattttttaggatgattagcttcaaagtggacatgcacatggaaccagtgtgatctgttgcttaagtttatttagtattttcttgttaaatgttgggtctaccagatataacatttttagaacacattaatgtagctgataatattgtatctggtaatactggccaactgtttgagcctctttgaagtcttcagtggtttgatcaagataaaaccatgtcggctgggcgcagtggctcgcgcctgtaatcccagcactttggaaggccgagacaggcagatcacgaggtcaggagatcgagaccatcctggctaacaaggtgaaaccccgtctcttctaaaaaaaaaaaatacaaaaaaattagccgggcgtggtggcaggcacctgcagtcccagctactcgggaggctgaggcaggagaatggcgtgaacccgggaggcagagcttgcagtgagccgagatcgagccactgcactccagcctgggcgacrgagcaagactccgtctcaaaaaaaaaaaaaaaaaaaaaaaaatcatgtcatataggcagcatgaaaaaatttacatcaaaaaggagacatgatcagaccactggtctgcctgatgctagttaggattacaagtttaagttattattagataattcctacccatttgattttactagtagcactttaatagagcccagtcatctctcatttccaggctccaagattttaagaccagctttagccagtttaatctgttgtctacattgtgagaaggaaagtcttattcaaaagacaatgtgaggagagtcctatatttagttttaaacctcataaagtgctaaaaattgggattttcagtggcttgaccttatctcactgtaatttcaccattccaattacatgtatgtcctttaaggaaagtgattgatcatatttaccccagtcaaaaatattattatcaggagtctctgagcctactctggctgaaaaaaaaaaaaaaaagtctcaaggatggaaataattaatgtttgatttttaaataattagtaatgttcccccttagttagacatgtaaagaatattccctctacaaattcctacagattatctcttaattttatttaaattcagtgatgatttttctcttcagttcctaagaaatagcccatagggaagtagtttttccaggggaattctgtgaccaagtcactgtgaaatccaatatataaacctcctgcaattaaaatgtcacataatgcatgggaaggagaaaagagactttggaaggatgtaactgattctaaatataagagggaaagatacacattatagtatcttaagcctatattatcaagaagttgcctctggtttgagagaagtaagtccttgttgttattagatagcaactatatattagatagcaactgatatcaggtgctaggcatcccttatagtcatggggggactagaattatacaattctgacacttctgtattgctgatattatcagggttattcagatttaattaagctgggctaatctcctcatggtgggagaccaattccttatggtaagtaatttgagcatcctgatgtggtccttctgaaggatacaagggctggagaaaatttcagttagatgcttgctacatgtgcggaaaggattatcgactagttgagggaagtaaaatgagaggccacctgaaagaccaaatcatcagtttagaggtttggaagaaaaatcttaccataataataacwtcccatttttatatcagtttatatgttgtaaagcactttcacacatattatttaattttctcaaacaccctgtgattcattttcattcatttttatagatgagtaaactgaaattcatagaacttaagaaatttgcctgaggtcaacacaataagtgatgaatctaatattctacttttggatttctattatgcttcactgcttattcacctataccacagactgtgaatcatatgtgttgagaatgttactagatgaaaatatgggacagtcaatgaaatctaagtrtaggttaggtcgggtataccgattccttcttattttttaaagtctctgtatgatagtatcttacagttcttaggaagatgggtggatgagttttggagaatctcctcagccaattctgttattaaaagttgtgccatggaaaactggagcccagtcttaatagagtaattgtaagctctgttccagagaattaggcttggattgttagaaaaaggtcttaaagctgtttttttggagaatgagacaatgtaacaataatattggtcatttttgataaagcttaagtgtgggtaaccatttagcttttcatttcttttttttaataattgacagcaatcgtgtgaaataagccaaatascattcattatccttagttttgagaggtctaatccaaggcctcttggatatagaaataataacagttaactttaggtttatcctgtagrctagtttttaattttactaaattgtgaattttgttctccttgaggcttgctttactaaatagaggcaggattaaaactgaagcccagtgtgagtgtcccagacctcagtcagttgtccctgctacttccttcataaagacctgattgggaataatccgaactccagctagctttttgacttttagaataaaggaatctcacaaagtgttgtactttcttaggaggatctttagaaaaccctgcctcccaacctcctattggatggtgaggtttaagacatctatcctgtttgactactgtcctcactggtgtttattaaataaaataaatataagtaaaactagtaatacaagtggtaaaagtcttaagtaactagcagatattcggaacaattgagtagacaaaattgaattggggaagaattttctaaagttctgggtcttaagggctatacccttattcatggtgctttaataatggttttatttttgcatttattgagtaagattttatgttttctattcccagtttttgaaattgacaagcataacatttatgagtttatgcttgtttaacaaatcctgttgttttattctcagtttaaaaaataagggtgtaaatacatctcaaaagtgtacagatttctcactgagtttgttttaacctttgggaaaccacaatagaccctgaagatatccataatttttacccagtaaattttttctttatttagatgatttgcagttttagtatttactgttgtaattagatggtaatcttaaaaatgcattgctaacttcaaaccatatttaaattatcagtagctatgtatatataatcacatggaggttgtagccttgccttgtatgattaaacagagaagaaaggtggtatttgttaacatttctgttttttacatgtatcattcttttatcacatctcataggtgatagcatcctatttttttctttattttcttgggattcagcccaagtctgtctccaaagtccatcttctttcctactgctctactacactgcagagaaataggacggtgaaactgaatatatatgtatgtactgtcataaaactggttataatgcgttctttttctccccccaatctaccttttctttttccccagaatccagattatcttcagtattctatcagtacagctctctgcagcttaaactcggtggtacataaagaagatgatgaacccaaaatgatggacactgtataatttggttaagactgctgaggccaagtgctattttgttacaagaaaggaagaacttggctattttcttgacacttttatgggtgctgcactttatttttgttyggtttttgatgggagggaaagagtactgaaatgttttgtaaattttttttaatgtgctgctaggttttttgttttgttttgttctgaagagaagagtggtaccatatgttgcaggaagtcaaactggactttttgtggctactaaatttgcytttaatcttattgttctcaattttggaatcaagtatgaaaatctgcacaaatgcaatgtttacaagaactggttgattctgggaggcatctgctacagtctctttttatatggatatgtacatgtcctattctacaaaaatgattaaagataaaaacatacttgtatcccactgctactttagctgtcaaatttggtgtttcatcacattaaaagcaataaatcagtagttggtaatgtactttactaaataagttggggggtacaatttttaaaagtcttaactcttaaatacttgactttcggcaccatcagttaaatccttgactataatacaaatttgatatatacattacatttaccctcaaattattctcaaaactatattccttagaatttgattttaccctgctgactttaagagttataataatatcaaatgtgatgagctaatatagattttctttttaaataagaataacttcaagctcactctttcttaacatagtctgggatctctcagggagtaagttttaaaagaatactaatggcttgtaagaacaaacaggaataataatctgatttttaaatttgtrgttattttactcatgttgccttttaatttttgttattttggtttattttttgatgtagccttttaaaaaaggagtcttaaaaatgattttttttttaaaggcaagagaaatcttgtagtgctaactgccttgagctgccaattacctatttctgagaatttggtgactcttattggtaatgatggcatttacaacatttggcatttcccctttttcagctcagttaccatagaatacttccaagctttactacttcctctgtaagtcatttcagttatgccaggatatttgatgattttgtttatgtagaattaggtaacaaagccaattatgctatccttattattgaaggattaatcttatgacttaacataagctttggttatatttgggtgtagtctttggctaagtacccattaaggctagtagcaaacacttggaaggtggctaactgggactgggaatacgtgtctcaacttgagaaaccaaatagtgcgaagggactcagggtggccagacctgtgaccttggcctcatttgtatcttgttttcrctgaggtgatcagacacttagtaccctagaaatggactggaattattgaatcttcttctgtaacatcacaatcttcctggttttcagaataaacgtttttgtgcttttgatataaatatatactctataataaaatgtttgactaatttatatagtagtgtttgtcagcctgtactttttttttttttaaacccatgacctagtcgtagacatttttttctttttgttctgttctgaagcaagctcttatttttccctttctaccaaattgagagaatgggcagacacaggagccatattcctagtttcacagaaatgttacttgaattattattttcccttctttcccaggatttgcctgtaagcattcaaattgttttgaatttcattttgccttctctaagttagaggtatttaatgactgaagactggcaggagagaaagtatcaacaaactgagtaaactattcttgaggggcactgaaaagatgttctttgaaacttgatttatatatttttacttgcaaaagaatatactgtgttttgagtatgaaagtgtgattgggtctgttgtgggaaccactgactgatgccataatttgcacttaaaggctataaattacatagttagccgtactttagtactagaaacagtaaattgacatccttgaactaattcctaccttttttttgtttctgaagaaataaagagtatattaagcaaagggataatttatatttcaggttggacaatttaccctaaacaaattaaaccatggaaagtgcaaacacatgaatgaaacatttttttacatcaaagtatcatcaaagattcttgtttcatttgataaaattaatatttgaataaaaaaatttttaaatcaaatagctgtccatttattctctgttaactcagtgtcattttttcagtggtagtgaagataatactgccttaaaattattactcttaggtagatgggtaacattctcttccaattataccattagtgagctctttcaaattttgcctaatgagctcacaatctcttataacttctctttaggaaaatcaggtcctcctcttctttcagactggcatatcatattattacccttttaaaaatgaatgaacagccgggcgcagtagcttacgcctgtaatcccggcactttgggaggccgaggcgggtggatcctgaggtcaggagatcgagaccatcctggccaacatggtgaaaccctgtctctacccaaaatacaaaaattagctgggcatggtggcgcgtggctgtagtcccagttactcaggaggctgaggcaggagaatcgcttgaaccccgggaggcagaggttgcagtgagccaagatggcgccactgcactccagcctggcaacatctaaaaatgaaaatgaacatgctgcccaaagaacatgaatctgttttagtaagtggattttctaacaggatgaaaaaagttgactgtaggtttaggcaaggtgatcctgaagttaacctttgggtattttcagaggagaacgaaatgtcagtttacttttctaagtcaatcatgtatttcagttcttaaattggtgtgggacagaaccgaggtacttgtctgggttgaggttgggctttccatttcatgggctttccatttcaattttgccattatagcaaacatacttttaacaaaacccttaaatccatccatctctcatctgtaatggacatgtatatacaattgcatagttctgagaagttgatttatctgaaaattatttgctcactatgtgagccaagggggtcgggagggggacacagggtgaatataagttcattatggattgttcaccatctaatatgaagtgaaaccattctcataagctttgaagaattagacttgtttgatctctaaatatagaaaatgattattaaaattcccacatctttcacacagttaacagcatgattcttcatgttatttacacatcagacatttaacttggaatgctttagaaaaagatgacacagtgctggactgatttacacttaggcatgacagtttattcagtgctatatatggaaaaatcagtgtttatatcatttagtgagctaaaaacaaataaaaagcaggagggggataagggctctacaaagcatactggcttttaccagaagctttaagcacagctacactattttaactgtttaaaaattttttaaccataacttccaagatgaaaatctttaactgcaaagatagaaaagctatttctacagtttatcagggcctgaggatttatttttatttttatttttattttttggtcaatgagaagacacaacatattctaaaatacaaattcttgctgttggttgcaactatagcaatttaacataatttgagatctataattacaatgatttgttgttagtatagggcagttttgtcacaagttatgaggatccaaaatatcttgctagaatgccattatatatagctgggggaaaagtagccatagggtggggtttagagatttgagccagtatttaaactatttgaaatggaactgacagaaatttctggatggtgctaacaactgctagtttgcatttcccacagtacacgctgcttacaaaaggtatagcaaaataacttttactctataaaataaatcagttgaggtgctgttctccctggcttttttttttgagacggagtctccctctgtcgcccaggctggagtgcagtggcacgatctcagctcactgcaacctccgcctcccggattcacaccattctcctgcctcaacctcccgagtagctgggactacaggcgcccgccaccatgcccggctaattttttttttttttttttgtatttttagtagagacggggtttcaccgtgttagccaggatggtctcgatctcctgacctcgtgatccgcccgcctcggcctcccaaagtgctgggattacaggcgtgagccaccgcgcccggcctctcattggcttttaacaaaagtatagtagtttctcctagccatggcattcagctccatacatgtatttccatgtggtacataaatcttaatgatggtcattacagaattatttttttgggtgggggcagtggcttacacctgtaatctcagcacttgggaagctgaatcaggaagactgtttgaggccaggagactagcctgggcaacatatcgagacgccgtctctacaaaaaaataaaattagccaggcatggtggtacatacctgtagtttcagctacttgggaggctgaggtagaagaattgcgtgagcccaggagttcaacgttacagtgacccaattatgccactgcactctagtctgggcaacagagtgaggccctgtctaaaaaaaaataaagaaaaaagttgtattacagtcatattcattcctaaagtaatgaatgtatgtgcaaaactttgggctaagtgtttgcgggtggggagggaatggtcacaggaaataagagtcttaattctcatagccatgttcttccactgctcactttgatttccaaatcccctaagggtattatgaaggccggtatggctaccatagcaggagatgaagtattgcataaactgaaaccagcctatggactgttttaagatcatttattagaacagtcattcagaagccattgagacatcaggcagcagaaaggaaggtgggatggagcaggccctgtgaaggaccaagaacaaagtaatagccacagttatgaaatttcattttattctgataaagactaatatatgcttgataacctagtgataatccataagtttggtatttcacaacattttttagaaagcacataagattaacattcaaataaggcattatagaaagttttataaagaatgaagtgtttcctatatttcttttaaaaaaccttggttcatcttgaaagatcgatgaattttttaaatatcagaagaaaagggaaataaaattttccccccaaaacacataagaaccacttactggcacttgtattttaagtacctgggaaaaaaacggaacagatttttaaaggcaataacgacttgtaagacggcttgtttcatttgatttggcacgaagtaaagtaagagtaaatatgccatggaagacataatcaagtttttcctccatctctcatatttccccacttctaccagaccacacagtacatcagcaaccatcctttagattccaatttttaaatggctgctcagacgacaccaatagagttctttctccttaaaatatggtggcagtgaatgctaacaggtatcaatttctttgatcaggaacaaagaactccttcaggaaactcactttcctggtccttgttaacctatcatgtaaattctttttattggtacacctgtttactaattataattgattgctatttatgccaagggagcatttcccaggcatgcctcatctatttactaacaacaaagtatgcttactttatttacatagtgccacgggtttctcttttttcttctcttttttattggcgggggagatggtactataacttgttatttatcagggcagatcacacatttggatcaaaaagaaaaaccagcaagtagatcctaaaacacatttcttaacctgagtcataactgaaaacatagactttaattacattttgttgaaaattcattcaactttggtgcttgtaaaagcacttatgtcaatttttgacacaaatcataaccctcagtacacaggtattttcaaaggaaacaagtcatcttaaagtaatatttttctatatgctaattgatacatctttatagcaaattgaaaattctgagtaaactgaaagtatgcttaacgacaaaataaatacagcatatatggttaacatatacatttcttagtgtaaaggcagcagtgaatttgtgtctcacaataaatctgtaaatccagttgctttctttctggaattttatatagtgtctcaccatgttccacaatgctggaaatgtcttttttggcatcaatctatgcacaaatttctgattacgtattttctccaaatgacatgtaactttttttaacttttccagaaaaatatggaaactttatcaaccacttattaactgaacaaaaagttagattactaccaaatgctcttttaattttgctctaacagatgttttaaaggttcagacatcgctgatgtttttgaggataactgcatacaacacactagatgatttcaaacgatgcatcttagtatccgaatcatttggcacatccttagtatccaaaataaaatcagtagaaataaaagtaatataattttcaaagaattcatacatactagaagtcttaggaaaagcagcttctaaatgcaaggactaggaggtttgcccatcttactattaatagttacacacatttctcctcatggagtaactgaagctttctggcttctttgtggaactttagtttgtaggaaagcatatacatagggccaaatcttgttggtttctgttccggagaatgtttccagcaccccttttttcctaaagatgaaacaaaaacaaaacaaacacacacaggtctgagtcttcctaataagctctttcaaagcctttctgtaaataatgatattgtagatataggagtcttggtaagtatagatttgtgtaatcaggagagaaaggcacttggctgggcattggaaaatgtacattttggtttcagttgtgctctctggcttacaaaaatgggtgcttaaaaaaataacagcacctatcatttattttatttattgaacatgcactgtgtgtcaaaggctgtgctacatgctttacatattatagtttgtttaatcctttccaaagctcaaattttcttattttactaataaaatcatccctttgtaatgtaacttagcccaaatcaccaagttggtagtacatttccaaacaggacctataagataccagaacacccatcagccttttttttctacttactcttttgcaaaagctactttctaatacttgagtatctttcctttttgcccaggccaacatttatgttctcctctattccactcttctgaatattaac

SEQ ID NO: 97953 - DNA, 16220 bp, Homo sapiens
agtcaagaagggaggaagtttcaagaaggatagagtgggaagtgatgttagatgcagttggggcaccaataagataaagactgaaaagtgtccattgggttttgcaattagaagatctttgggaacatcggagagtgcagtttcacactggtgcagtggaggcaggagtcaaacagcagtgagtttcaaggagtctcttaaagaagcttggatgaaaagtacaaaagtaaagtcagacaatatccagagggagttgtggagtcaaggaagtacttttgtaggaaggaaaaggggaagaggccagtagactaaaggaccttgaaggacccagaagagagagaagagatgcctggtgagacaagatcccagagatggaggaaagggatgaggtcaaagcagaggtgaagggattttctctggacaggagaaacaccacttcctatgaccaagacgaaggaagaggatggagccttcctagagtttcagggaacaagaacctgtggaagttcccctctgatggcttctatatgccctgtgaagtaggagataaggccaatggctggggtccaggggaagagggataagagtagggagcaggagacaagaagagaaaggggaaggtttgggaaggctaatgtagggaactggagaaaaacctcatcagtgggtagttcaggattcgggcacagttggaagtgagaacctagttagagaagcagagaatccaaatatttaatgggttgatgatgtgagggtgtcagggaggaagatcaggaaaactaagcaaaagaaggcatgaggatgtgaagggagcatacagcaccaatagggaaagaaagtgatgccaggaggcaaatgacagattgaaaaagggagcagtcaaaggaagagaagtctctaatgaggtacagtagcagacgtaggggcaggggttggagtacaagagacagtgttcagaggctgcagagcataacatctttcagatgagggcaagtgaaggtgataagtgcttgaagtagagaaaactgtgggccaaggatcaaaatcagtgaatgtgggaagtcacaagggagtccataggttcttatgggagtaggagattccagcactaatgggctctgtgaacccaggcaagtcactgtccctctttaggctgagtttctggacctgtaaaacaggaataacctctgtgttgcctactttctatgagaaccaaagaaataactaatttcaaagtgctttgtatccacctatcctccagactggcttccttcctcttcctagatcccagatccacttatctctcgcccttctccagggcaactctagggtctcccagtgtcccagaggcaccacagagaactgcagcctccggggcccagagaagaggccattctacatttcctcacaattaggggggccatctgttcctccaagggaaggaatgcaatctggactgctaggatccctggggaaaatcacagaatcaaatgtctgccctttagaggagaaaggattttctaacaataatatagctatacaaaagagattgttatatctctagaagcaaagttccccaacagtggttatatgccccatgataaccattcacctaaaactaattcaactaatagtcaacaatagagttaggattactatgataaactcattgaaggaaataataagcagccaatacaaactatatttacgtagactgtaaaaatatgaaaaattgattacacatgggttagtatcatatgcaatacatattacatattatgaaaaaaagacaggaaacaccaaatgttattcattcaacaattactgaccacctatatgtatcaggtcatgtgtttaaaaaaaaaaaaaagaaaaaaagaaaaaccaaagaaacagtggtaacttgtcctatgtgatatcagactaaaacttacctagcgtctgagaatattagtattttgtgaccccacgtttcttatgtcaaaaatatatattccagcagtgcaaacctgacttattggtgcctcatacctgtaatcccagcaccttgggaggccgaggcaggaggatcacgaggtcaggagatcgagaccatcctggctaacacggtgaaaccccgtctctaataaaaatacaaaaaattagccgggcgtggtggcgggtgcctgtagtcccagctactcgggaggctgaggcaggagaatggcgtgaactcgggaggcggagcttgcagtgagccgagatcgcgccactgcactccagcctgggcgacagagcgagactccgtctcaaaaaaaaaaaaaaagaaaaaagaaaaaaagaaaaaaaaagaaaacaccaggcaccgagctaactgtatcacacaccttttccgattagaaaagaacaatgaatacatactcctttgcttattataattcttgtgcggcaaatataggacactcttatctcctcctgctcaaaaaaaaaaaatgcaaaaaccacagactttttaatctatggagtgaatgcgttaacaagaacatagaattaaggaagaatttcccttagataagtacattaaaatctccaaaatgctcaagggactgaaactgcccttgtggagaaaatgctgcgcatcagccccgccagttaaaacaaacaaacaaaaacaaaaaaacacacctcatccccgttcacctttagccccaccccgggtggttcttggagccaataagcgccggatgccctcagagccccgccctcctcctggccaaagcggtgagagggtctaaaacagccctttctgcagcaggtgacggagccccgcccccttctccccgcgcaccaataggaaccagacctgaagaggacgaaccaagaacgaaaagaaccacccactcgggagccgcaacctagaagccagaattgtgtatcagattcaactaggagaaaatcccacctccaggctccattaatccttccaatggagtggaagtttctctcacagagaaactagtaaggggatccaatgggaaaagaacgttcacacggactagaagacgaaaccaatggaatggaaaattgtcctcgcgttggtagaagcagccaatgagatgaaaagagcccgcctccaaagtggctgcagaggcaatggggtgaatcgtgctcagaggcgcgctccaatggggtagcagggctcgcccggccgccactaccccgcttccccgcgcccggagtccccacccacggccggccgcggagccgagtgctgacccgggtgagaggttcccgcggctcagggaagatggcggcagccgtggtgctggctgctgggttgcgcgcggcgcgcagagccgtggcggccacgggggtgcgcggggggcaggtgagaagtggcgcgggagcgagtagggggtcctgcgggctccgaagccatccggggccagggggtcccgaaggcgcgcagagccgcgcagagctcctgcctgtggcctctgcccctccgaggcacaagctccggggctgtgtggtgaggtcgaactggtggctccggagaacgagctggtgctgattcccgccctgcgcaggccggggcgccgaggtcgggacagggtcagtgcagcggctgccgccttctttccactgcctgcagcccagctggcccgatgccccctgcaggaaatgagctttctcttcttggagccagtgctctgccctcctcaggcttctggcctcctaatgagcactagtgttaacctctcttctgcacttgccagaagcggctcggaggtcagagaattcattccgtcccgttctcccccaacgtgatgcaatgacatcagccttctctgaatcccttacccgaagttccctggggctaggggagcagaggtcacttagctgaactcttacctccactcattcaagggacaagagttaaaattcacagagtcacatgtgacacccagatgaggggtcaactagtgtcaaacagggcgattgcattaaaacttaaataaaacaggcgacaaggcttaaagatcagaaaacaagtaacggaaataagtggaaatgtactaacaaggtgagagtggaaagagattcaagccatcgcaagagattatggaaaccatccctttattttatattagaagctgagagaaggaatttatctgaggtaattcagtggtatggtaaggtaggaactgagaccaaaatccccagtctctcattctagatcctttccctaaacagtgctatatttcgtggacacatgagcaggaatcaattgcactgctgaatcctgataataataccgcctgttatctaaccaggtccagcaccttctggccctaccctttgctgctggtgctctgaaattcaggaactttcctcctgggtgggaacgatgaataggttattagaaggacgaaattaacaactatcagagcccagcttctgccagctccctcctttgaatatggtcgatccaccttcaggtccgaggagctgcaggtgtgactgatgggaatgaagtggccaaggcccagcaggcaactcctgggggagcagccccaaccatcttctcccggatcctggacaagagcctcccagctgacattctctatgaggaccagcaggtggggtgctcttaggacctatccccttaggaatgttgtagataccatccaacctgttgaagtaacgtggcctctggcctgtcacttcccccagtgtcttgtgttccgtgatgtggcccctcaggctcctgtgcacttcctggtcattcctaagaagcccattcctcggattagccaggctgaagaagaagaccagcaggtgggaagaacagggccagggtttggctgggaggagcccctggacccagctagaggtcttgctccctatgaatgaagccacctatgtccctccgctctctctatagcttctaggacacctactccttgtggccaagcagacagcaaaggctgagggcctgggagatggataccgacttggtgagtgacttttggcccttggtccctcacctatgaattctcattcctacttctcaatatgatcttcattcttcgacctctgccatgatcctgactccctaaccccaagctcaatttcagtgatcaacgatgggaagctgggtgcacaatctgtgtatcatctgcacattcatgtacttgggggccggcagctccagtggcctccaggttgaacctgccaactgattaaaggacaccagactctggatgcttggatggaaagggaaaaatggaccctgtgatgctaataaaactgttctcccttaattatgctctcctgtctttaatataaaattttataccacaaaggggaaagaaaactgattcagggctatgatgccccttgactggtctgagtgaaagacactgaggaggtccaacctgtggttaaatgttgcctgcagatatgtaagtcttcttgacaagtggtccaccctaggtcaagcttctagaaaagtaacagtaggaatgagcctaaatgagtaggaagaaactgaaagccaatcctggcccttcttcagaggtcaaaccaggttctaagggcgcttaggaggagggtggtcaatatgagggtcttttattagaggaggagtaatcacacccaaacaaaagcggctgccttttcactattctacgtctcaccattttgctcaagctagtttgtttattttcatccttaacatttgttaaagaccccactcacttttgagaatgaactaagcaaactaaggggaagctacttgcctctcagcaaacaccaagtaggctgtaatctaatgccacaaccctgtgcctgtttccaacatatccccataaagcatcatcttagaaaaccgcacgcaaagactgtttggacgtggagggcgaggtcttaagccagcggaaccctaaaaccccgtctgaggcggaatgccgccgggaccggaaagcggacctccctaacagcactaggctgaagacttccgccccgcagaggacttgcctccaccgccacctgcaagtccgcccagctgtacttctgcgcaggctccaggagttgtttgctgtctctatggcaacccagtagctggagtctgaagatggagaccaacgagtctacggagggatcgcggtcgcggtcgcggtgagagccgcagctctggctgcaggcataaggggacgaggaaggtcagctgacttcctctgctgcgcttttgacagccatgtcgtgtttgctttctttcagatctttagacatacagcccagctccgaaggactggggcccacttcggaaccgtttccttcttcagatgacagtcccaggtcggccctggcagctgcaaccgcagcagctgcagcggctgcatcagctgctgcagctactgcagccttcaccactgccaaagcagctgcattatctacaaagaccccagcgccctgttctgagttcatggagccgtcctctgaccccagccttcttggggagccctgtgcgggacccggctttacccacaatatagcccatgggagtcttggctttgagcccgtctatgtttcctgtattgctcaggacacttgcactacaactgaccatagttctaatcctggccctgttccaggctctagctctgggcctgttcttggttccagctcaggtgctggccatggctctggctctggctctggtcctggctgtggctctgtccctggctctggctctggtcctggtcctggctctggtcctggctctggtcctggtcatggctctggctctcatcctggtcctgcctctgggcctggtccagacactggccctgactctgagctcagcccctgtattcctccagggttcagaaacctggtggcagatcgggtccctaactatacctcctggagtcagcactgcccctgggagccccagaaacaaccaccttgggaatttttgcaagtcttagaaccgggtgcccgaggactatggaaacccccagacattaaagggaagcttatggtttgctrtgaaactttgccrcggggccagtgcctcctctacaactgggaggaagaggtattaaagttttggcctgctcccttttcttgaaggctgccctcagtttcttaggggaggcagtagtttacatgagggtgggtaccagaagggatattatagtcattcaacttgggatccacagagagccaccaaccacctggatcaagtcccaagcatgcaggatggctctgagagttttttcttcygacacggacaccggggactgctgactatgcaactaaagtcacccatgccctccagcaccacccagaaagactcgtaccagccaccaggaaacgtctattggccacttcgaggtgtgaaatgtgagagggtaggccagaacgagcccattactcagagggaagaagaggaaggaatttctggtggggctgtggattctccagtggatataagggcggaaccccaaggttcttcttccttttctcaagttagtttcttctgggcctycttcttaaccagaccccaccttgcccaccccccaactctctcacagggaagcgtgaagccatgctggagatgctcctgcagcatcagatctggtaagggattgggtaaaggggaagagggatggggaggagaaaaattgggtgagaatggccttgacacccctcgggctacatagtaaagaggtgcaggcagaacaggaacccacaaggaagctcttcgaggttgagtctgtgacacaccatgactaccgaatggagctggcacaagcagggactcctgccccaacaaaggtgagaacccaccccccatcccccgccacttgcaccagctgggctctgacaggctgtggccaagtaccaagcccagaggttgagagagagggctgaaggccaggagttactcagtaccctccctcacagcctcacgactaccgccaggagcaacctgagaccttctggatacagagggcaccacagctgccggtgtgtgagggtgactaggtgttgggggcagagcggggcaggaaaggtagggcagagttgttttgttctggcttggggagagtgggatccatcctcatcctggcactcctccagggtgtcagtaacatcaggacattggacacaccattccggaagaactgcagcttctcaacaccagtacccttgtctctggggaaacttttgccctatgaacctgagaattacccctaccaattgggagaaatatcttcccttccctgtcccggaggaaggctgggtggtggaggggggagaatgactcctttctgaggggtgaggagggaagtggggtatggaatatggaatctatttctgtctgcactagagaggtcgggaggaagttaattctcactgtacttgaagaggctttacataaagggttctctctcatcccaagactgctaatttagtgattctgtgagtcactgtgtgcataccccataacctttccttgggattgcccctatcccacactatgacatcagaactttttttattattgttttatatttgaccaaaatattctggtttagatacagatatttacagaaagtagggaggaaggggaccaagccagagagggacaggtatatgtacagggctgagctgcagagggctacaacttccatataaggtaggtttttttgtggctgttttccattgcatatgaaaatgtccatttctggtgtgtgcagacatggtggccattgcccacccaggtaccagcagcagaagactatctgacttggaaagaatgggggtttacaggagtccaggaggtcctttccgctctcctaagagccagtatgttcgcatctttccttttccctggaagtgggagagtggacatgattcagatgcttcgatgttagtcccyttgtctccctctctttccctatgattcccataatcactttcaccctccctttccatgcccccctccccatggcctgccatcaccttcatttccacatccccccgaagctctagctggaagcatcctagctcatctagggcatccttggtggtagaggagacatggatcttcagcgctggggtgggtggaatggggaggatgrtggaatgaggaatcaaagaaaaggcaatcaaataattggtgatactgtatagcaccgtgcccgaccaaccatccctgggaagctcccaatgcatatctattaggaccaaaatatgcccaacctcccaatgcatatctattagaaccaaaatatgcccgaggatgcgacactaaggaactgtggtctctcagattaagaaattggagggattatgaaaagaagaaaagggcaagataaattgaggccaacagtggggttgagggctaatgtcttaccttgaccattagactccattcgagaagcagtgttcactgtgtctccaaaaagacaataacggggcatcttcaggccaacaaccccagcacagactggccctttgagaagaaacaggttgggagagtctgggaaaggtggagactagggctggagtgagagtcagccttaccagtatggacccctatgcgtagcctcagctggtcatggggtcggtggcggatgcgaaaggaagaaactgcatctagtaatgctagggccatacgagcaatttctggtgcatggcgttgaccatttcggcctgggaggccagataccaccatgtaagcatccccaatcgtctccacctgattgagagggggattaaaaggtcacctctatttatatccatggggatgggaaaaagtagagggagacaagcttgacaccatcattaatcatcctgacatgctggagaccagaatattgactagaaaataagtgccatggtcctgagtctaggggagaggagatgtctasggaatctttaagtcttctttctccacccagcacctggtgaatactcagtaaacatttgcggaatgaatgaacaccctgtctgcagcaggacatggacaaataggctctgccatcaggaaatgggaagcaagaaaacggtaactcaagaggacagaggctggtgaggaggtaaagcaggcccagtgaaatggacctgacagcccaaactgtcagagaggaggaaagcaggcatttgattttggtaattgtgccaaagctatgtaagagaataaatgccattgttttaaggaaatacacagtgaagtttttaggaaatacacactaagtatttagggataaagtagttatccctaaatagtagtctgccacatgccaaacaatgttaggtactttccatacaacgaatctattattcccatcttacagataaaacaactgaggctcagggagattctgtgacttacctaaggccacacagttagcaacaagccaatattcaaatccagatgatttttactcccaaggacaataaatccaactcaataacttcaacaaaaagttttactttttaaaatatattttccctcaccccactaaatcagtctggacccacatcctatatgattcttccatgtctggagaggactggagagaaatgttggataggctgtatttatactccaggaagacaggagctaaatctcatgatggttctgattagggaagtcaaaggattcacaagaaattcgactggagtgtacaattatagtgctggagctacatctgtctacaaagtacactccagcaccaggatgctgagtaccctggagggaaaactgatcatggggtgggtaaggtgtgtggggttcagggagactgagtttcaaagcgggtctctattaaagggtcttctattgaacagctctcaccttgtagacatcaaagttgtcaattatggcatcaaagcaggtatacaggtcattaagaagtgtcactacctaaaagggatagaaaagcagaggccctgagacttgtgcccaattttctaagaattcttaacccacaagccatcaaaagatgtgggaactctagaacaaactcatctttcctattatcaatgaggcttccccaggtccctacccacccaaccccacccgccacctctcacccatggctctcacctgcatgggggtgctctctgctgacaatgctgtgaagccaacaatgtcactgaagtagatggtaacactgtcaaaggcctcagcctgtacagtctctccccgttttaactgctctgccactgaactaggaagcaagggtgccgtatgagccaaactccaagagagcaggagtggaagagagagggaaagtgtatgtggctgcagcagagatgagctgtaacaagaaagctaggcttttcaggtgggagggaggaaagtggctgggaagacattacagtctaatgcaaggtaaggcacacaagtggcggggggttttgaggggaatccctgtgcatgggagctgtctcaagttgggactgttttacatacacttgctgaagcaagggtgtggtagagcagggtcttaagaagaagggatgggcagccagtaagaaggcagcatagctgatgtggagacagaatgacagcaaataatctataagcaggggtgctccctgtggccagcagggttctgagggtggggaggcgagttctcaggtgcctgatgaggcagagcccaacagagcagaatcccaaaagaaaatacaggaagggggacaaagtctcactggggtaggatttggtagagcagagcttcagccttgcgtttttcctccagataggcctgtgtgcgttcctccaccagcttctccaagttattggcatactgttccatgcgcagcaggaggttgtccaatatgctggtgccaccctccctagagggaggccaggataaggcacttgctctaagattctgaagattcccaggacttcctatccaacccaccctctggtcccacctgccccacttcatgcactaggactaatgagtcttctatccctgggaagcccctgccccataatgccctctcacttgttaaagcgccgaatgaagcccttaatctgtccaaagtctggccgctcagctgggtcctgagcccaacatcgctccatcagcaaaactagctcttcattcagttgggtccggtcaatgcttggccggaaatatggccgctgaccatttcgtaccttctggacaatctctgagggtgatcaaaggtttggatgaagaacagagttcccccaggaagaagaggctgtgggtagtggattgactcttacctttggggctgaggtccaggccctccaagtagaaaggaccactgcgaagtgctatctcctgcaggatgatcccaaagctatagacgtcagccttctgcatgcctgtggttggcaaggggttcccactgagcagttctggggcagtccacagcttctctgaaaagaggaaaccggctggccaggtcccccgaaatggggcacccccaagcccacctgggctcatccctatattactgtcactccacctccctctcccaccatccctaggtggaaagaggagcaatataaaaagtgggttgtgggggtgggcctcactggcatagagggcatggctgtcatcaggttcagcagttgatcggaagctggccaggccatagtctgtgattttgagcacaaaacgactatccaccacacagttggaggacttgagactcccatgcgatgaaataatgctgttgtggagaaaggccatgccctgcagggtacagatcaagtcatgggattggatcatatctggcttagaataccctctctccatgagatgggcactggctagctgtctacagatcttgggtccacaaaaataataagctgattttggaaggcatcctttgcagtttccacccaaggaagcaggaagaacagaagagtcatctgttcctggtatcataagcaggacacaggcacccagccaccagggacagggaaaatgcttaaaaagagggataagtggagctacaaatgactaccctggagagggcagtcaatcttcttgattagtgaagagaacagaacttgggtgaagaccaaaatgatataacacccatggtggcctcagatacctggctactaattaggaagacatgacttgagacccaggtatcaagagtagctggatataccaaggaagaccagttgtaaactttaatgcataaccaggcgtaggtgggcaagtcggggtagaggaggaacaagatctactagagggaggtgggcaggtcggggtagaggaggaacaagatctactagagggaggtgggcaggtcggggtagaggaggaacaagatctactagagggaggtgggcaggtcggggtagaggaggaacaagatctactagagggaggtgggcaggtcggggtagaggaggaacaagatctactagagggaggtgggcaggtcggggtagaggaagaacaagatctactagagggaggtgggcaggtcggggtagaggaggaataagatctactagagggaggtgggcaagtcggggtagaggaggaacaagatctactagagggaatgctggatcagagagaaagtgcagaacatcataaacctggaaaatggacaaaatctgctaagccagtgcagaagcctaaaactgctggctctgtgggtccagagagggaaaaacctttgcctccgaggagctgaaagacagtcttaaaggccgggctcagtggctcatgcctgtaatcccagcactttgggaggccaaggctggcagattgcttgagcccagcagttcaagaccagcctcagcaacatggcgaaaccccacctctaccaaaaatataaaaatgagccgggcactgcagcacacgctgtggtcccagctactcaggaggctaagatgggagaatcacttgagcccaggaggtcgaagctgcagtgagcagtgacctagccactacactctagcctgggtgacagaataagaccctgtctcagaaaaaaaaaaaaaaagtcttaatgatgctccccaaaaatgaaaccctaggagccacccaagtcagttcaggtgagacagaaagaggatacaaggttcaatatgctaacaaaaaacatttctgtctaaatgtttagctctggacttaattcataactctaatctctatgaattcttcctttttatttattttggtatcaacaaaacttttgggaatctctgaagttgtgaatttacttgtgtggaaactgtgcaaaggatgccttcaacaatcacaggattaggcttctggctttgttgtaaatcacttttccaccaaatcactgttctctcaagagtcgtgtcttatgtttatcatcacacctctagttgagcatgacattggctttactaatatttttatctctcatttgatagcaaattttcacacacaaaaaaatactttttaaataacttcatgagaattcagcagaaaaccaaagctagtttcagatacagtgtggggtgatccactgggatgctcattggctatgagacttatttcagaaaacctgtccaactcatgcaagattctattttatgctccacaaatccatgggcctctgagtcatttgaacatagctaaaacctagtataacagaagagtaccaaaggtttttagtacaatcttccttggtttctcttagttctactagtaaatgttccttttttaaatttcagttttctgaacaaaagggcagacatgccaaatattggtcagagagtaaaataatgagaggaaaaacaggagataaatatgttcggagagtaaaataatgagaggaaaaacaagagataaatatgttcaggccgggcgcggtggctcacgcctgtaatcccagcactttgggaggccgaggcgggcggatcacgaggtcaagagatcgagaccatcccggctaaaacggtgaaaccccgtctctactaaaaatacaaaaaaattagccgggcgtagtggcgggcgcctgtagtcccagctacttgggaggctgaggcaggagaatggcgtgaacccgggaggcggagcttgcagtgagccgagatcccgccactgcactccagcctgggcgacagagcgagactccgtctcaaaaaaaaaaaaatatgttcagagactccactcattttatgagttcttagaggtaaaagagatgatggaaagagacctgagatatttaagacagaaagatagaaactctctacaggcacaggactccttgtggcaggtaaaactcactgtcccagttataagccccagactccttgtttacccattattaccagaccatgggaataaggggagatgagagaacaggacttcagaggactagaaggagaaaaaccacaatcaaagaacagtggaagtgatttaaagtggatgaacttttaaggagtggggaagactcaccttaacaaggtcattaatgagtgaataacgaaacatccagtccaagttgatgctgtcattttctagaatatcctggtaagtgacatggaatagactgtctgtcctggtcccaccagctatcacccagcatagagtcagtataactttgggtctatccttcccacccctgccataatctcctacacctatccctcacctgtaaactcccacgaggacagtattcagtgacaatgcaaatgttgggagggtctatgcaggcgccaatgaagcgagtgagatggttgaactgaacatctctcatctggcagaaaaaaacaatgggaaggataagaaaattgaaagagttaaaaattagatacagaaacttaccactacataagaggacctttctcttagttgtatctacgattttaaaatcatttataaatcaaccccttgcccatctagccaattttactatttcatagttttccccactcctccattacatacatgttagagtccatcctctgttacatacatgtttgagttcaaacagaacctgccgggtcagctcaatgcgcttcttattcacatgtttgatggcgacaacatttccctgatggtgggagtgaaaggggaaaggaaagtgaatatcagaagttctgggtacaaggaaatgctagagagcagtggaagcacccaggagctcagctgggcacagagagtcgggtatgagggacagaggttcaggggcagaggtggcagatggggatgagacaggatgaa

SEQ ID NO: 97954 - DNA, 54550 bp, Homo sapiens
ttgaagttgtgatgccagtttcctgttggagcagaagttggtctcagtgactatgtggcctgaggcagggcctgagactgggaggtccagcagctcaggaaggggaaatgtgtgagactaatgggagccaagcaggcactttggtgagagacagagatgctgactcatgcgccagtgagatgtgtgcatgtctgagatcacatgtgtcatttgcttacctgtgaaatgtgtgtgggcatgtgactgtgtgtttgtccctgtgacacatctattactcagtaagcaggacagtgctgtttgtggtaggtgttccacacattaaatggatgagcacacagcttttcacaggtggaatcactgtctcaaagtatttccctcagttgtcatagggcctgaaatctctctaattcactgggcggagacactgtgttcaagtggccgaaatgacaatgttagtattttactgatgacattaacagtgattaacatctcagagaggagctgttagtgggtgttgtccttgatcataagcagatacccagaaagcatgggacagaggagccgtgtgagctgtggtggcctggcaggaacctggatgctggaagggagctctggaagatgttgggctgggctttggggatggggttgactattatttgccagtttccaccttcccagaaccagtcctatctacctttcaggaggagtgccactccctcttcccagatgtatgcaacacaacacacacacacacacacacacacacacgcacacacacacgcagagagagagaggttagtagccctttcaaagccttcagactcacctgtgtatattttatatcatgtatattttaccaagtttccctgtcctgcatcttctcttcccataatgcctatcttgaatcctgttcactcttccccatatgctgctggtacagactgtattggtgatcacgtaccgagaacccccaaatcctgagtatcaggaattccagaatcgtctgctgataagagcccgggaagactttggtgtggagctgggcccttccctggtaagtagatctctcccttcctgagagtcaggtcaagctttggggaagggcttctctcccaaactcagcatcaagtcttggctgtggagcaagcccaactttggggggtctccgcttctgtccaggatttttccttctgccctatggagtagttaggaagggatggcactttaggaataagagggaagaaagcaaaccagaagagagaataggtagaagggagaccccagagagaggggaaggggccttgcaggacatttggagagtactgctgaagttgccacccccagatgaacctcatcgctggctgcttctatgatgggatcctgctatatgctgaagtcctgaatgagacaatacaggaaggaggcacccgggaggatggacttcgaattgtggaaaagatgcagggacgaagatatcacggtaatgaagaggggtcaatgggggtctgagggctgatgtcaggaatagagtgggctgaagaagaaacagatgtcaggatcaccacagctttagtgggggttagtgaatatggcagagttgcccacacctcaagatcggggaagggtagactctgagggagccgtaggcatgagtgagtgggagaggagcccagggtagacctcaaagaaaggacactcttttctgtcttaggtgtaactgggctggttgtcatggacaagaacaatgaccgagagactgactttgtcctctgggccatgggagacctggattctggggactttcaggtgatggaggaggaggcagggaagagagtgtggccctgcaaaatccagctttcaagggttcagtcggggcagaaccaaaactactagatgagggatttgttttctctgctggcactgcatcctggctgggtggtaggctggggagaaaagcagcgaaacagctggggtctggggaggaggctggtgggagcaggcctgtgggcccagctttttgcttccttacagcctgcagcccactactcgggagctgagaagcagatttggtggacgggacggcctattccctgggtgaagggggctcctccctcggacaatcccccctgtgcctttgacttggacgacccatcctgtgataaaagtgggtgtgtgcagggactgggagcagctttcctccctttgctttccattcatggcctccaccctcactgaccctccactcttaactgtgcttctgcctttacgtctgcatccctccctcctcatttcttcctactcccaaggagtctgtctatgcacctatgcaccccgttctccattctgccaagtccgcacacagtcttcctcagggtctctatttccccttcagctccactttcaaccctggcaattgtggctctgggcacaggaatcaccttcatcatgtttggtgtttccagcttcctaattttccggtgagttctgggtttcttgctgacctactccctgcccccattgccacacaacctctggctgaagccaggtggtccctataatgtgggatagggtagtaggtttcttaatttgctggttgtctcttagatccaacagcgtcttcctctctagcctttctctttagttgtcgcttagcctaggtgtttgttccacttttggtcctagactggatatactaactagtgtttttcagtggggttaagatcaaaggtgaattttccattggtcttcttttaggaaagaactttcacccccagtctctgtgtttgttagtgagcatagggcatgtgccagatatgccgagaatgcagccttatcttccagccctgtctctcaggtgtaacagttgcagcttcaggagctgcagggaagcccctgcaaccctgctgttggcttgggggtggcaggattcggcttgccagtcaactgaggtgtgcagtccttacagaaagctgatgctggagaaggagctggctagcatgttgtggcgtattcgctgggaagaactgcagtttggcaactcagagcgttatcacaaaggtgcaggcagtcgcctcacactgtcgctggtgagcccttgtctcagctgttcctctgcctccctctgagttcctgtcccttcttaccctggatctctcccagcacattggcttgtaatgatagcccctgcactaccaccatcatctaatgttcctttcatccttccgcctccatgttgcccttggccccagcggggatccagttacggctcgctcatgacagcccatgggaaataccagatctttgccaacaccggtcacttcaaggtgaacagtcatttgcttgttctggtccccaccatttcatcctgtctcatccccatctgccacctctgcccctgaacctctgtccctcatacccgactctctgtgcccagctgagctcctgggtgcttccactgctctctagcatttccttgtacccagaacttctgatattcactttcctttcccctttcactcccaccatcagggaaatgttgtcgccatcaaacatgtgaataagaagcgcattgagctgacccggcaggttctgtttgaactcaaacatgtatgtaacagaggatggactctaacatgtatgtaatggaggagtggggaaaactatgaaatagtaaaattggctagatgggcaaggggttgatttataaatgattttaaaatcgtagatacaactaagagaaaggtcctcttatgtagtggtaagtttctgtatctaatttttaactctttcaattttcttatccttcccattgtttttttctgccagatgagagatgttcagttcaaccatctcactcgcttcattggcgcctgcatagaccctcccaacatttgcattgtcactgaatactgtcctcgtgggagtttacaggtgagggataggtgtaggagattatggcaggggtgggaaggatagacccaaagttatactgactctatgctgggtgatagctggtgggaccaggacagacagtctattccatgtcacttaccaggatattctagaaaatgacagcatcaacttggactggatgtttcgttattcactcattaatgaccttgttaaggtgagtcttccccactccttaaaagttcatccactttaaatcacttccactgttctttgattgtggtttttctccttctagtcctctgaagtcctgttctctcatctccccttattcccatggtctggtaataatgggtaaacaaggagtctggggcttataactgggacagtgagttttacctgccacaaggagtcctgtgcctgtagagagtttctatctttctgtcttaaatatctcaggtctctttccatcatctcttttacctctaagaactcataaaatgagtggagtctctgaacatatttttttttttttgagacggagtctcgctctgtcgcccaggctggagtgcagtggcgggatctcggctcactgcaagctccgcctcccgggttcacgccattctcctgcctcagcctcccaagtagctgggactacaggcgcccgccactacgcccggctaatttttttgtatttttagtagagacggggtttcaccgttttagccgggatggtctcgatctcttgacctcgtgatccgcccgcctcggcctcccaaagtgctgggattacaggcgtgagccaccgcgcccggcctgaacatatttatctcttgtttttcctctcattattttactctccgaacatatttatctcctgtttttcctctcattattttactctctgaccaatatttggcatgtctgcccttttgttcagaaaactgaaatttaaaaaaggaacatttactagtagaactaagagaaaccaaggaagattgtactaaaaacctttggtactcttctgttatactaggttttagctatgttcaaatgactcagaggcccatggatttgtggagcataaaatagaatcttgcatgagttggacaggttttctgaaataagtctcatagccaatgagcatcccagtggatcaccccacactgtatctgaaactagctttggttttctgctgaattctcatgaagttatttaaaaagtatttttttgtgtgtgaaaatttgctatcaaatgagagataaaaatattagtaaagccaatgtcatgctcaactagaggtgtgatgataaacataagacacgactcttgagagaacagtgatttggtggaaaagtgatttacaacaaagccagaagcctaatcctgtgattgttgaaggcatcctttgcacagtttccacacaagtaaattcacaacttcagagattcccaaaagttttgttgataccaaaataaataaaaaggaagaattcatagagattagagttatgaattaagtccagagctaaacatttagacagaaatgttttttgttagcatattgaaccttgtatcctctttctgtctcacctgaactgacttgggtggctcctagggtttcatttttggggagcatcattaagactttttttttttttttctgagacagggtcttattctgtcacccaggctagagtgtagtggctaggtcactgctcactgcagcttcgacctcctgggctcaagtgattctcccatcttagcctcctgagtagctgggaccacagcgtgtgctgcagtgcccggctcatttttatatttttggtagaggtggggtttcgccatgttgctgaggctggtcttgaactgctgggctcaagcaatctgccagccttggcctcccaaagtgctgggattacaggcatgagccactgagcccggcctttaagactgtctttcagctcctcggaggcaaaggtttttccctctctggacccacagagccagcagttttaggcttctgcactggcttagcagattttgtccattttccaggtttatgatgttctgcactttctctctgatccagcattccctctagtagatcttgttcctcctctaccccgacttgcccacctccctctagtagatcttattcctcctctaccccgacctgcccacctccctctagtagatcttgttcytcctctaccccgacctgcccacctccctctagtagatcttgttcctcctctaccccgacctgcccacctccctctagtagatcttgttcctcctctaccccgacctgcccacctccctctagtagatcttgttcctcctctaccccgacctgcccacctccctctagtagatcttgttcctcctctaccccgacctgcccacctccctctagtagatcttgttcctcctctaccccgacttgcccacctacgcctggttatgcattaaagtttacaactggtcttccttggtatatccagctactcttgatacctgggtctcaagtcatgtcttcctaattagyagccaggtatctgaggccaccatgggwgttatatcattttggtcttcacccaagttctgttctcttcactaatcaagaagattgactgccctctccagggtagtcatttgtagctccacttatccctctttttaagcattttccctgtccctggtggctgggtgcctgtgtcctgcttatgayaccaggaacagatgactcttctgttcttcctgcttccttgggtggaaactgcaaaggatgccttccaaaatcagcttattatttttgtggacccaagatctgtagacagctagccagtgcccatctcatggagagagggtattctaagccagatatgatccaatcccatgacttgatctgtaccctgcagggcatggcctttctccacaacagcattatttcatcgcatgggagtctcaagtcctccaactgtgtggtggatagtcgttttgtgctcaaratcacagactatggcctggccagcttccgatcaactgctgaacctgatgacagccatgccctctatgccagtgaggcccacccccacaacccactttttatattgctcctctttccacctagggatggtgggagagggaggtggagtgacagtaatatagggatgagcccaggtgggcttgggggtgccccatttcgggggacctggccagccggtttcctcttttcagagaagctgtggactgccccagaactgctcagtgggaaccccttgccaaccacaggcatgcagaaggctgacgtctatagctttgggatcatcctgcaggagatagcacttcgcagtggtcctttctacttggagggcctggacctcagccccaaaggtaagagtcaatccactacccacagcctcttcttcctgggggaactctgttcttcatccaaacctttgatcaccctcagagattgtccagaaggtacgaaatggtcagcggccatatttccggccaagcattgaccggacccaactgaatgaagagctagttttgctgatggagcgatgttgggctsaggacccagctgagcggccagactttggacagattaagggcttcattcggcgctttaacaagtgagagggcattatggggcaggggcttcccagggatagaagactcattagtcctagtgcatgaagtggggcaggtgggaccagagggtgggttggataggaagtcctgggaatcttcakaatcttagagcaagtgccttatcctggcctccctctagggagggtggcaccagcatattggacaacctcctgctgcgcatggaacagtatgccaataacttggagaagctggtggaggaacgcacacaggcctatctggaggaaaaacgcaaggctgaagctctgctctaccaaatcctaccccagtgagactttgtcccccttcctgtattttcttttgggattctgctctgttgggctctgcctcatcaggcacctgagaactcgcctccccaccctcagaaccctgctggccacagggagcacccctgcttatagattatttgctgtcattctgtctccacatcagctatgctgccttcttactggctgcccatcccttcttcttaagaccctgctctaccacacccttgcttcagcaagtgtatgtaaaacagtcccaacttgagacagctcccatgcacagggattcccctcaaamccccccgccacttgtgtgccttaccttgcattagactgtaatgtcttcccagccactttcctccctcccacctgaaaagcctagctttcttgttacagctcatctctgctgcagccacatacactttccctctctcttccactcctgctctcttggagtttggctcatacggcacccttgcttcctagttcagtggcagagcagttaaaacggggagagactgtacaggctgaggcctttgacagtgttaccatctacttcagtgacattgttggcttcacagcattgtcagcagagagcacccccatgcaggtgagagccatgggtgagaggtggcgggtggggttgggtgggtagggacctggggaagcctcattgataataggaaagatgagtttgttctagagttcccacatcttttgatggcttgtgggttaagaattcttagaaaattgggcacaagtctcagggcctctgcttttctatcccttttaggtagtgacacttcttaatgacctgtatacctgctttgatgccataattgacaactttgatgtctacaaggtgagagctgttcaatagaagaccctttaatagagacccgctttgaaactcagtctccctgaaccccacacaccttacccaccccatgatcagttttccctccagggtactcagcatcctggtgctggagtgtacttygtagacagatgtagctccagcactataattgtacactccagtcgaatttcttgtgaatcctttgacttccctaatcagaaccatcatgagatttagctcctrtcttcctggagtataaatacagcctatccaacatttctctccagtcctctccagacatggaagaatcatataggatgtgggtccagactgatttagtggggtgagggaaaatatattttaaaaagtaaaactttttgttgaagttattgagttggatttattgtccttgggagtaaaaatcatctggatttgaatattggcttgttgctaactgtgtggccttaggtaagtcacagaatctccctgagcctcagttgttttatctgtaagatgggaataatagattcgttgtatggaaagtacctaacattgtttggcatgtggcagactactatttagggataactactttatccctaaatacttagtgtgtatttcctaaaaacttcactgtgtatttccttaaaacaatggcatttattctcttacatagctttggcacaattaccaaaatcaaatgcctgctttcctcctctctgacagtttgggctgtcaggtccatttcactgggcctgctttacctcctcaccagcctctgtcctcttgagttaccgttttcttgcttcccatttcctgatggcagagcctatttgtccatgtcctgctgcagacagggtgttcattcattccgcaaatgtttactgagtattcaccaggtgctgggtggagaaagaagacttaaagattccstagacatctcctctcccctagactcaggaccatggcacttattttctagtcaatattctggtctccagcatgtcaggatgattaatgatggtgtcaagcttgtctccctctactttttcccatccccatggatataaatagaggtgaccttttaatccccctctcaatcaggtggagacgattggggatgcttacatggtggtatctggcctcccaggccgaaatggtcaacgccatgcaccagaaattgctcgtatggccctagcattactagatgcagtttcttcctttcgcatccgccaccgaccccatgaccagctgaggctacgcataggggtccatactggtaaggctgactctcactccagccctagtctccacctttcccagactctcccaacctgtttcttctcaaagggccagtctgtgctggggttgttggcctgaagatgccccgttattgtctttttggagacacagtgaacactgcttctcgaatggagtctaatggtcaaggtaagacattagccctcaaccccactgttggcctcaatttatcttgcccttttcttcttttcataatccctccaatttcttaatctgagagaccacagttccttagtgtcgcatcctcgggcatattttggttctaatagatatgcattgggaggttgggcatattttggtcctaatagatatgcattgggagcttcccagggatggttggtcgggcacggtgctatacagtatcaccaattatttgattgccttttctttgattcctcattccaycatcctccccattccacccaccccagcgctgaagatccatgtctcctctaccaccaaggatgccctagatgagctaggatgcttccagctagagcttcggggggatgtggaaatgaaggtgatggcaggccatggggaggggggcatggaaagggagggtgaaagtgattatgggaatcatagggaaagagagggagacaargggactaacatcgaagcatctgaatcatgtccactctcccacttccagggaaaaggaaagatgcgaacatactggctcttaggagagcggaaaggacctcctggactcctgtaaacccccattctttccaagtcagatagtcttctgctgctggtacctgggtgggcaatggccaccatgtctgcacacaccagaaatggacattttcatatgcaatggaaaacagccacaaaaaaacctaccttatatggaagttgtagccctctgcagctcagccctgtacatatacctgtccctctctggcttggtccccttcctccctactttctgtaaatatctgtatctaaaccagaatattttggtcaaatataaaacaataataaaaaaagttctgatgtcatagtgtgggataggggcaatcccaaggaaaggttatggggtatgcacacagtgactcacagaatcactaaattagcagtcttgggatgagagagaaccctttatgtaaagcctcttcaagtacagtgagaattaacttcctcccgacctctctagtgcagacagaaatagattccatattccataccccacttccctcctcacccctcagaaaggagtcattctcccccctccaccacccagccttcctccgggacagggaagggaagatatttctcccaattggtaggggtaattctcaggttcatagggcaaaagtttccccagagacaagggtactggtgttgagaagctgcagttcttccggaatggtgtgtccaatgtcctgatgttactgacaccctggaggagtgccaggatgaggatggatcccactctccccaagccagaacaaaacaactctgccctacctttcctgccccgctctgcccccaacacctagtcaccctcacacaccggcagctgtggtgccctctgtatccagaaggtctcaggttgctcctggcggtagtcgtgaggctgtgagggagggtactgagtaactcctggccttcagccctctctctcaacctctgggcttggtacttggccacagcctgtcagagcccagctggtgcaagtggcgggggatggggggtgggttctcacctttgttggggcaggagtccctgcttgtgccagctccattcggtagtcatggtgtgtcacagactcaacctcgaagagcttccttgtgggttcctgttctgcctgcacctctttactatgtagcccgaggggtgtcaaggccattctcacccaatttttctcctccccatccctcttcccctttacccaatcccttaccagatctgatgctgcaggagcatctccagcatggcttcacgcttccctgtgagagagttggggggtgggcaaggtggggtctggttaagaagraggcccagaagaaactaacttgagaaaaggaagaagaaccttggggttccgcccttatatccactggagaatccacagccccaccagaaattccttcctcttcttccctctgagtaatgggctcgttctggcctaccctctcacatttcacacctcgaagtggccaatagacgtttcctggtggctggtacgagtctttctgggtggtgctggagggcatgggtgactttagttgcatagtcagcagtccccggtgtccgtgtcrgaagaaaaaactctcagagccatcctgcatgcttgggacttgatccaggtggttggtggctctctgtggatcccaagttgaatgactataatatcccttctggtacccaccctcatgtaaactactgcctcccctaagaaactgagggcagccttcaagaaaagggagcaggccaaaactttaatacctcttcctcccagttgtagaggaggcactggccccgyggcaaagtttcayagcaaaccataagcttccctttaatgtctgggggtttccatagtcctcgggcacccggttctaagacttgcaaaaattcccaaggtggttgtttctggggctcccaggggcagtgctgactccaggaggtatagttagggacccgatctgccaccaggtttctgaaccctggaggaatacaggggctgagctcagagtcagggccagtgtctggaccaggcccagaggcaggaccaggatgagagccagagccatgaccaggaccagagccaggaccagagccaggaccaggaccagagccagagccagggacagagccacagccaggaccagagccagagccagagccatggccagcacctgagctggaaccaagaacaggcccagagctagagcctggaacagggccaggattagaactatggtcagttgtagtgcaagtgtcctgagcaatacaggaaacatagacgggctcaaagccaagactcccatgggctatattgtgggtaaagccgggtcccgcacagggctccccaagaaggctggggtcagaggacggctccatgaactcagaacagggcgctggggtctttgtagataatgcagctgctttggcagtggtgaaggctgcagtagctgcagcagctgatgcagccgctgcagctgctgcggttgcagctgccagggccgacctgggactgtcatctgaagaaggaaacggttccgaagtgggccccagtccttcggagctgggctgtatgtctaaagatctgaaagaaagcaaacacgacatggctgtcaaaagcgcagcagaggaagtcagctgaccttcctcgtccccttatgcctgcagccagagctgcggctctcaccgcgaccgcgaccgcgatccctccgtagactcgttggtctccatcttcagactccagctactgggttgccatagagacagcaaacaactcctggagcctgcgcagaagtacagctgggcggacttgcaggtggcggtggaggcaagtcctctgcggggcggaagtcttcagcctagtgctgttagggaggtccgctttccggtcccggcggcattccgcctcagacggggttttagggttccgctggcttaagacctcgccctccacgtccaaacagtctttgcgtgcggttttctaagatgatgctttatggggatatgttggaaacaggcacagggttgtggcattagattacagcctacttggtgtttgctgagaggcaagtagcttccccttagtttgcttagttcattctcaaaagtgagtggggtctttaacaaatgttaaggatgaaaataaacaaactagcttgagcaaaatggtgagacgtagaatagtgaaaaggcagccgcttttgtttggktgtgattactcctcctctaataaaagaccctcatattgaccaccctcctcctaagcgcccttwgaacctggtttgacctctgaagaagggccaggattggctttcagtttcttcctactcatttaggctcattcctactgttacttttctagaagcttgacctagggtggaccacttgtcaagaagacttacatatctgcaggcaacatttaaccacaggttggacctcctcagtgtctttcactcagaccagtcaaggggcatcatagccctgaatcagttttctttcccctttgtggtataaaattttatattaaagacaggagagcataattaagggaraacagttttattagcatcacagggtccatttttccctttccatccaagcatccagagtctggtgtcctttaatcagttggcaggttcaacctggaggccactggagctgccggcccccaagtacatgaatgtgcagatgatacacagattgtgcacccagcttcccatcgttgatcactgaaattgagcttggggttagggagtcaggatcatggcagaggtcgaagaatgaagatcatattgagaagtaggaatgagaattcataggtgagggaccaagggccaaaagtcactcaccaagtcggtatccatctcccaggccctcagcctttgctgtctgcttggccacaaggagtaggtgtcctagaagctatagagagagcggagggacataggtggcttcattcatagggagcaagacctctagctgggtccaggggctcctcccagccaaaccctggccctgttcttcccacctgctggtcttcttcttcagcctggctaatccgaggaatgggcttcttaggaatgaccaggaagtgcacaggagcctgaggggccacatcacggaacacaagacactgggggaagtgacaggccagaggccacgttacttcaacaggttggatggtatctacaacattcctaaggggataggtcctaagagcaccccacctgctggtcctcatagagaatgtcagctgggaggctcttgtccaggatccgggagaagatggttggggctgctcccccaggagttgcctgctgggccttggccacttcattcccatcagtcacacctgcagctcctcggacctgaaggtggatygaccatattcaaaggagggagctggcagaagctgggctctgatagttgttaatttcgtccttctaataacctattcatcgttcccacccaggaggaaagttcctgaatttcagagcaccagcagcaaagggtagggccagaaggtgctggacctggttagataacaggcggtattattatcaggattcagcagtgcaattgattcctgctcatgtgtccacgaaatatagcactgtttagggaaaggatctagaatgagagactggggattttggtctcagttcctaccttaccataccactgaattacctcagataaattccttctctcagcttctaatataaaataaagggatggtttccataatctcttgcgatggcttgaatctctttccactctcaccttgttagtacatttccacttatttccgttacttgttttctgatctttaagccttgtcgcctgttttatttaagttttaatgcaatcgccctgtttgacactagttgacccctcatctgggtgtcacatgtgactctgtgaattttaactcttgtcccttgaatgagtggaggtaagagttcagctaagtgacctctgctcccctagccccagggaacttcgggtaagggattcagagaaggctgatgtcattgcatcacgttgggggagaacgggacggaatgaattctctgacctccgagccgcttctggcaagtgcagaagagaggttaacactagtgctcattaggaggccagaagcctgaggagggcagagcactggctccaagaagagaaagctcatttcctgcagggggcatcgggccagctgggctgcaggcagtggaaagaaggcggcagccgctgcactgaccctgtcccgacctcggcgccccggcctgcgcagggcgggaatcagcaccagctcgttctccggagccaccagttcgacctcaccacacagccccggagcttgtgcctcggaggggcagaggccacaggcaggagctctgcgcggctctgcgcgccttcgggaccccctggccccggatggcttcggagcccgcaggaccccctactcgctcccgcgccacttctcacctgccccccgcgcacccccgtggccgccacggctctgcgcgccgcgcgcaacccagcagccagcaccacggctgccgccatcttccctgagccgcgggaacctctcacccgggtcagcactcggctccgcggccggccgtgggtggggactccgggcgcggggaagcggggtagtggcggccgggcgagccctgctaccccattggagcgcgcctctgagcacgattcaccccattgcctctgcagccactttggaggcgggctcttttcatctcattggctgcttctaccaacgcgaggacaattttccattccattggtttcgtcttctagtccgtgtgaacgttcttttcccattggatccccttactagtttctctgtgagagaaacttccactccattggaaggattaatrgagcctggaggtgggattttctcctagttgaatctgatacacaaytctggcttctaggttgcggctcccgagtgggtggttcttttcgttcttggttcgtcctcttcaggtctggttcctattggtgcgcggggagaagggggcggggctccgycacctgctgcagaaagggctgttttagaccctctcaccgctttggccaggaggagggcggggctctgagggcatccggcgcttattggctccaagaaccacccggggtggggctaaaggtgaacggggatgaggtgtgtttttttgtttttgtttgtttgttttaactggcggggctgatgcgcagcattttctccacaagggcagtttcagtcccttgagcattttggagattttaatgtacttatctaagggaaattcttccttaattctatgttcttgttaacgcattcactccatagattaaaaagtctgtggtttttgcattttttttttttgagcaggaggagataagagtgtcctatatttgccgcacaagaattataataagcaaaggagtatgtattcattgttcttttctaatcggaaaaggtgtgtgatacagttagctcggtgcctggtgttttctttttttttctttttttcttttttctttttttttttttttgagacggagtctcgctctgtcgcccaggctggagtgcagtggcgcgatctcggctcactgcaagctccgcctcccgagttcacgccattctcctgcctcagcctcccgagtagctgggactacaggcacccgccaccacgcccggctaattttttgtatttttattagagacggggtttcaccgtgttagccaggatggtctcgatctcctgacctcgtgatcctcctgcctcggcctcccaaggtgctgggattacaggtatgaggcaccaataagtcaggtttgcactgctggaatatatatttttgacataagaaacgtggggtcacaaaatactaatattctcagacgctaggtaagttttagtctgatatcacataggacaagttaccactgtttctttggtttttctttttttcttttttttttttttaaacacatgacctgatacatataggtggtcagtaattgttgaatgaataacatttggtgtttcctgtctttttttcataatatgtaatatgtattgcatatgatactaacccatgtgtaatcaatttttcatatttttacagtctacgtaaatatagtttgtattggctgcttattatttccttcaatgagtttatcatagtaatcctaactctattgttgactattagttgaattagttttaggtgaatggttatcatggggcatataaccactgttggggaactttgcttctagagatataacaatctcttttgtatagctatattattgttagaaaatcctttctcctctaaagggcagacatttgattctgtgattttccccagggatcctagcagtccagattgcattccttcccttggaggaacagatggcccccctaattgtgaggaaatgtagaatggcctcttctctgggccccggaggctgcagttctctgtggtgcctctgggacactgggagaccctagagttgccctggagaagggcgagagataagtggatctgggatctaggaagaggaaggaagccagtctggaggataggtggatacaaagcactttgaaattagttatttctttggttctcatagaaagtaggcaacacagaggttattcctgttttacaggtccagaaactcagcctaaagagggacagtgacttgcctgggttcacagagcccattagtgctggaatctcctactcccataagaacctatggactcccttgtgacttcccacattcactgattttgatccttggcccacagttttctctacttcaagcacttatcaccttcacttgccctcatctgaaagatgttatgctctgcagcctctgaacactgtctcttgtactccaacccctgcccctacgtctgctactgtacctcattagagacttctcttcctttgactgctccctttttcaatctgtcatttgcctcctggcatcactttctttccctattggtgctgtatgctcccttcacatcctcatgccttcttttgcttagttttcctgatcttcctccctgacaccctcacatcatcaacccattaaatatttggattctctgcttctctaactaggttctcacttccaactgtgmccgaatcctgaactacccactgatgaggtttttctccagttccctacattagccttcccaaaccttcccctttctcttcttgtctcctgctccctactcttatccctcttcccctggaccccagccattggccttatctcctacttcacagggcatatagaagccatcagaggggaacttccacaggttcttgttccctgaaactctaggaaggctccatcctcttccttcgtcttggtcataggaagtggtgtttctcctgtccagagaaaatcccttcacctctgctttgacctcatccctttcctccatctctgggatcttgtctcaccaggcatctcttctctctcttctgggtccttcaaggtcctttagtctactggcctcttccccttttccttcctacaaaagtacttccttgactccacaactccctctggatattgtctgactttacttttgtacttttcatccaagcttctttaagagactccttgaaactcactgctgtttgactcctgcctccactgcaccagtgtgaaactgcactctccgatgttcccaaagatcttctaattgcaaaacccaatggacacttttcagtctttatcttattggtgccccaactgcatctaacatcacttcccactctatccttcttgaaacttcctcccttcttgacttccttgaagccactttccttcaacaggcagcttgaatgtgagtgtgatggaggcagatggccagatccaggctttctcctgtgtctaataggtgtcaactctaagttattaggcagtctctccctgggctgggatctacctgccccatatagagccaagtcaggttccaatgactcctcttttattgctgatctgggccagactcacaaaggcctgtgccagttgctgacagtgtctgtccctggaggaagaaagagcagaggtgaaagggtcaggtatgggggtcagaagggaggccaggctggagaccgtgtgarccagggagccccgggggactagggtgggagctgggaaggccagagggcccctgtatctgcagggcctrgaagtcagagttgctgaggatggcttctcggagcacagccatctctgcaaaaggtacatagtctgctcctgggggtgaaaaccagtgcagatgtgggatgcaggtaggtgggtggtggggaggtgggctgagggagcgcgctagtcctggaagggatggttgaggatgggagtgccttcctgcctggccttctgactacagaccctggaatggccccctgtcccaggtttctgcctcaccgcgaggccttcctcctcgttgccgggtcttctgggtgtcaragaaagtctcgtgttcctcccagcgccggtcacaggccgcacagaggaaattagactcaaaacagccrcagcaacagcctggggcaaaagtgcagccaagaagagtttaggaaatggtggtatccccaggagctgaccacattctcatctcttcctcagtgacygcatgcccaaggctctcatacctgctctccrtcattatccccagattgcatcctatccccaccwaccctgctcccaatacacctcttgccctagaagttaccatgatgcctgcagggatggggcccagtggctgcatgttcttcgtggctgtgtttgcagcgacattgggccctccaggccttggggtcaaaggtggcccgtctcttgagccagaactcacccacctcctctgggcgtgatgggataaagcagaacatgaagcagcggcactggcttaycttgcagggcaccgatatgtctgtgggattggggatggatggtagggttaatctgataggaccttgccttctcatgccaaccccatcctccatccccaccaccccctatgcacgcagacatgctttttttttttttgagatggagttttgctctgtcgcccaggctggagtgcagtggcatgatctcagttcactgcaacttccgcctcctggcttcaagtgactctcctgcctcagcctcctgagtagctgggactacaggtgcgtgccaccatgcctggctaaattttttgtatttatttatttattttttagtagagacggtgtttcactgtgttagccaggatggtctcgatctcctgacctttgatccacccgcctccgcctcccaaagtgctgggattacaggggtgagccaccgtgcccagccacatgctctctctcatacttcccaagacatgacagagtacagttattcctccacactcgagaggggctggtcagttctcccctacctgagatgatccggtgctctctcaacaagtgtccacaaaagcatctggactcatccccaatccggaaacagtcccataggtaatgggggcagcgccagccaatgtagagacctaggtatgcaggattaaaagtgagaagtaaaaaaattctaagctcccccgaagtgttcttacctatcccttgatggaggtgagggggtggggggaacttacctctccycacccccaggtatctttatctccacctggaagtcctcacctctaccccttagattttctttttcctcagggttttctcattaccccagaagtgtcttcagttctcttcctacccaggatctactccatctttgtcagcctgccagagatgactcaagagagtggtttctgagcaggaagattatagatgaaattttgtttgaggatgaacatgaatctcactgagttctctgtgaccacagggattctcatctcctctcctcatcccactaaagcccaactttgctttgttttcttgaagtgtctaaggtgagggaaagggaagatgattggccagatgtacagacaatgggattggctcctaaggagcatatttattgaaggtcctgaagaggagaaggaggttggatagctctggtgctggaaggtaggaggagggcttcctctcacgtctccacgttggtaccttaatacctccctctgtgttcctggtgctattgtaccaatgctctctgtgtacctaagaagggctgccaaaggttcttcaagggtcaggagaaaggggtaggtagcagtcatgagtggtgaagaccaaaaattatatattttgaggctaagcaaggaggcgtggaaaggaaagtgaggctaagaagtgtccctgagagtaggcaccagcaagaggtcacaaccctcgagagctggtgttcagcagtgaggtctgaatccctggcttcgtgactagtcttgaggtgagggtggtgctgtgcaactgagggaggataaccagatggcacctccaattcagattttctcattctccatgagaactgagagtaccccaacttctagccaagaatcctgtatgaggccccatgcagtgggactgccaggtgtaggattcttagtyccaattaaaggctcaactgaaatgtcacctccaccaaaaaggtgtccctgacttcccctgtctgtctgggcccctcctattgccatccatagctccttgtgctactcctgttgcagtacactgcattataatagatcattcccttgtattcctattagtccatgagttcttcaagggagctgtcttttcacccgtatctctcatcctagcacaaggcctggcacaaaatggttgctgagagaacgtagattgcctgattaaacaattgagctcattccttcaagaggaagagagagccagtattcaggcataaccctgaggttccataacatgaataaggagagtggcatcatctggtctttgactgtggtcagggccacaattcacaattccgtgcctcagattaagttttcttgtcttacccatagtctgtcaggatctaaagcctgtctagatgtggcttttggctttgcttcttctgtcttgatgctgattgcctgtagtgccagtgcccccttacaccagggaggctttgttgagagagcaaggtataggcagtcacaatgcaggtgggcgggagccaggattccactagaggagttccgaattctgtctggagtagcaggatacattaaaaaagcaggaggtgaggcccaaagatcaaggcctgctcggagggccggggggcagtcaagtccaagcactagtgtaggaatcagtgcccagcattcagatgaagaagactggagtttgaacagggagactggcaactatacttcagattstgttacaagtgttagtgctcttaaagtgggacaattggaaggtggctgtggattccagtgggaccctctactctctgtcctgattccaaactcccttcctgttgtgggtggacaaggcctggcgggggaggagacattatttgggatgccattttgattctgtctaacacagtccagttccacaatcacataatcacatttgcatgatgacatctctttatgcatagtatgtctccataaaacacatggctgtctttacaggaacaatgtctccagcctagccctctctcctgagcttcagacccatatagccagctgtctactagactcttgggccagcatgtttcataagcacttcaaatgtcttatgcccaattattccctccaaacctggctctcatcctttgtcctctgttcatccaacacatgcctaccaagcatctacccttttctaggcattcagttaatggcaccattatcctaccacttacttatgccaaaaactggtggcactccaggcatttccctctctcttatcctatacatccactgttccaatggtcagtttcactttgttagcttttcttttcttttccctacttttcttgtttcttttctttcttttttgacagagtctcgctctgttgcctaggctggagtgcagtggtgcaacctcggctcactgcaacctccacctcctgggttcaagcaattctcctgcctcagcctcccaagtagctgggattacaggtgtccgccaccacacccggctaattttttgtatttttaatagagacggggtttcaccatgttgtccaggctggtctcgagctcctagcctcaggtgatccaccccttggcctcccaaagtgctgggattacaggtggtagccgctgcgctcggcctgttagcatttcttgaacctgtccacttctctccacctaagcccatctacttctttcctggttatgaccagtgcctcacaatgtattcacttgcctttccatacctcctctcttagcctcacaactccagtcttgtctttctccagtctaccctattgccagagtgatcttgcagaaacagaaattcgttcatgttattgtcctacttaaaaccttctagtgactctcagttgccctcaggatataattctagcttttaacttggcacagaaattcctgcacaattctgcccttctagagcagagygggctcttctccccaccactctatgcatcaggcatagtgcattgctatagattcctgctgtgccttgccctgtcatgtctcatcttacagcactctttacttggccacctcttcttactcatcttacagatatcagctgagaagtcattccttccaaggcttactattcctcaagcactccagataagatgccccttttttttctgctcatgcagcmgtctaggataaccttgattatagcaattattagagtgaattataattgtccttgtacttattggtatctctcattagagtgccaagtattttgtctttgaacccccatcagcattaccacttccatagctagctcaatgcctggcacatagttggtgctcaataaatgtttgtcgaatgaataaaaacaaaggttacacttgatatttctgtacacatcacatatactgttatggactacccaggactcaacatccccactattaggaggggacctcaaatataattgttcggggttgaatgacatgaatttctttataaaacttcctgtttaaacaggaagatgaagaagttcaatttgaagaagaaaaagaaatacagtggscttgaggagtagggagtagacaggaggttctgagtaggggaataagaggactgaacacatcctgcatttttttttttgagacattctgtcacccaggctggaatacactggcacaatcacggctcactgcagccttgacctcctgggctcaagtaatctgcccacctcagcctactaagtagctggggccacaggtgtgcaccactatgtctggattattttattttatttttgtagagatagggtctcactgtcttgtcctcactgtctaactcctgggcaattaagtgatcctcctgcctcagcctcccaaagttttgggattacagatgtgagccaccttgccagccagaatttgcaagaaaataagagtaaccgaatatgttaacataagcaaacaaagttggtggtggggcgggagggcaagggtggggaggtggagggtccctgcatgggaaaggggaaagtaaatttcatggaggagggataagcatttagaattacctgcttgtctttatgttttaggcctgtcatcgtagctctattcccatcataaagggaaaggaagtatgaaggaccaaaataaatgtcataacatctattgaattcagtctagaaagaccagaatccttatagcaggtcagggtggccctcttactgaaggtaatccctatagacatgaatttccataacacaggtaggcatgctcatgcataggatggcatgtttttgcaagttcatctgtacgcagcatgccactaacaggactgtcaagagtactaatcacaggctgaggcttggaaacagcagggccagaggacacaggtctcccctttggtaacagaactcaaagcttttgggtacccagcatgggcctggcatgcaggggtgacagccttttaatggagttccaccaaagggactaaggtctttgtcatgtcagaacagcaagtctcctggggactgtccagggtcctgggccatctctgctttagggtctgtaggctctctgggccctatatctggggtgggccatgacccttctgtttttttttgttttttgttttttggtttttttttttttttgagacggagtctcgctctgtygcccaggctggagtgcagtggcgcaatctcggctcactgcaagctccacctcccgggttcacgccattctcctgcctcagcctcccgagtagctgggactacaggcacctgccaccacgcccggctaattttttgtattttcagtagagacggggtttcatcgtgttacccaggacagtctcgatctcctgacctcgtgatccgcccatctcggcctcccaaagtgctgggattacaggcgtgagccaccgcgcccagccgacccttctgtgtttaataattttagttcagctacctgtctctacctgggctttatatgaatctccccactttttgtctgcatccacccttgtattccttggcccacttgcctgctccttttccaggcaggtggtatagccatttccaaaaggggaagctatctgctgaatgttcaggttcccagatcttttggattagaggatgcccatgggcctgtcacaggcctctgaaaggccacatgggctcacctgtctggatggcattcagggctgcatccttctcccactggaaaagattgttcacttgagcaccaaactcctctctatgcattgccttagccacttccaccagctctgtctgcctagcagggaacactgggcgggctgtgttacctaggatgggagaggatgagtaaccagggggaagtgagaaggycctaaaactaagagaaggggccatgtccaagagtaacccagtctcctcctcctggggcaagtcaaggacagtgaatagtagtgagaacaggacaggggagaggacaggtacaattacagctaactcctttcttcttcttcttcttgcctagttggtgtccaggttgggctgtgtgagcagtgctgtcactggcatctactcccttttcaacctctcctgcttcttcctcctgcttttcggttgtgtccacttggacctgggatgaagggcctgaaagacagtgttctggaaggctctcagattcagagagatgggtagacctccttgtccatgggacctcattggaagaagactcagaggagaggtcttccttcagagtatcagaagaagacagacagacatagtctcgtgattggggaggaagagtaaggtgtttctctggcaccactgagatgggactatccaatgaagcctcataggtaggggtctctgaaggagtctcagagatggaaggctcctgatgggtttcaggggaatgggcctctaaggggatctgggaaggggatggcaccaaaggggattcagaggtatggggctctaacggggtctcagaggtggaaggctycaagaagctttcagagatayggttctcctgtaagtcctcagcagaggggtcctttgaaggggggtgcttctctgcatccatggtgatatgaggctcttctatgatctcatgtgcttccatctagtggtagaacagggtacaggcttcattaggttggaaatagagggccggcaagtcagggcagagcccagggttcgcagtgcattatggaatttggataaggatatcagtgcagctgagatataagagggaaacaacatgaactctgggtcctagagtgtgatgccaaaaggttcacccatgtgtccagacctcatatggcatgctgctgtggcttgttagggagctggaacttaaagattgaaagactgaagtagttcgaatcccatcagtagatggtagcagagaaccatgtcccaggagggagtctgaacaacaccacttgggcagtccaagagcagggtccttggcatatcttaaaaccctggaggtcagaccatggagttctagagactggcaataccaagccaaagttggggttggctcctgagagtgcaggggaatgctgtcacataaggcaagacactgcacgcagcctggttttgtctaggcaccacacacatcctcctcccttaatgatgtcattcatgttcaaagctttaactacttccagttgtgtaccaatgactcctaaattcacatttctagctcagacctttttcaacctctgtacttcacactcatacccacctgcctgctggccttctcttctcttctctttttgtgatggagtctcgctctgttgcccagactggagtgcagtggcgcaatctcggttcactgcaacctccgcctcccgggttcaagtgattctcctgcctcagcctcccaagtagctggaattacaggcgtgtgccaccatgcccggctaagttttatatttttagtagagacggggtttcaccatgttggtcaggctggtcttgaactcctgacctcaggtgatctgccctgcttggcctcccaaagtgctgagattacaggagtgagccaccgtgcttggcccctgctggtcatttctaactgagtgtttccacagacagcaaaactgaactttgggaattatcctagtcttttccttttcccttagactccatcttcaaataggcaccaataactctatttcctatcttctaaatattccccaaatgcattctctcctctcccttccaattttattcaagttctcatcatcttcagcctttgtgtaataactttgcccctctacttccatccacagcattttaatccattcacccrttctttcatggatttatgtaacttatacttttacaatgagcctaatctgatgcttttactgacccgctgtgctaagctctagattgagttgagtctaggagagagaccgattaaccaacaatggcaatacaaataaattgatgttgttctggggtgagtctaggatacggtggggagggggatatacctaatttatcctgcaaggatgtagtcctccttcctgacccaatcaggatctttctaaagtgcaagcccaacaactggcactttgtggcttaaaaacattccatgactcagtctaaaggattaagtccaaatttcttggccctggcattcaaggcctgtcatcattttcaacacagcctgaggattcctgccttaactttccgtgctccctactttacccccatgttccagagacgctagatatatcactccttaaatgcatcagagcctttttgaaggggatgtttgggaagggaattaggggcagaggtaggattacagggaggaagatgaccagagtcagctagagagaaaaggggcctaagagtggagaaccagaagatgggaggtgaggaaggggaaagagaaggggaggaggaaattgggtggaggaggagagtaaggatgaaaagtacagaatgtgggccaggcatggtggctcatgccagtaatcccagaatttgggaggccaaggcgggtggatcacttgaggtcaggagttcgagaccagcctggccaacatggtgaaacccagtctctactaaaaatacaaaaattagctgggcatggtggcaggcgcctgtagtcccagctactggggaggctgaagcaagcaaatcacttgaacctgggaggcggaggttgcagtgagcccagatcgcaccactgcactccagcctgggggacagagcgagactctgtctcaaacaacaacaacaacaacaacaacaacaacaacaacaacaactactactactactactactactactactactactactactactacaacaatgtgaagggactgaggggtgggagaaagacagatgtctttgagggaagagggcaagggccgttggagaaaccacctaccctctgggctttggcttggttgttacaagtccttaggtcaagaccttgacttaggatggcagggggaggtgttgatcctcagggaggaaaggctcttggttgtggatgtgcctcacctgcaggtgctgagtgttgaaatgccttgcctgaaagtctgctatctgggaaggggacttggatatctgcagaacttcgcaaaggagctctggcatgacctggggaagtgggtagggacaaggggtctagggccaatgagggagggtcttgactgaagcctccggaacccgggccaggagagtaggcgccggtcaccagggcaaccggaacgcctagtagtctccgtggcaacggcggtctggtcacctccccggtgggtaaggtctcctgaggggcttgcattgggcctcgagggggcgagcccagagggtttacttctgaaaagtggggtgtgtgttgcgggatctctgtgagcgagtgtttgggtaggatctgcggagatctgtgcgtacgtccgggggagtctgggattgtgaggatagggttcctttgagacatctgtggggcggtcgttrggggctgtgaggatctgaggggacctcgggctctgtgcttggggtgagaaaggcagggtctcgggtagctgaggcgggggcggagtctgtgtgtcctcgaagcccagcaggactaagttggggaccaatagagtagggcgggggcgggctttactgacagggaccaatcgagccggccggggggcggggcgtcacgccgacgtcaagtcgaggccgccgccgcggggcctggttatcgccggttcagcgcagcccggagtcgcccaggcctgaactcctacccaggtccccggcccccgccccgggcccgcgaggacaccggaggccaccccccgggggtggggagcggagccgcgggycagctctgcgagcgccccgcgctggcctgtccggccccgcccccgccccgggccatggcccagcccttgtcccggcccctcgtcctatcccaatccccgccttggcccccagccccgccctcgccccgcttcccacatcggccccagcccctgcctgggtccccatccaggacccccttccagtctctgcccctggcctggcccccatcccggcctcggccctcgttccaccccctgtcacaaatcccagcccaggccctgtcccagccccattcccagtgtttgcttaaggccctggctcaaccccgtcccttgctgcagtccccatcacagcccttccttccatcccactccctgcccttgttcaagccccagtgtccagcccagcccaacccattatctcagcctttgccctcatctctgtgtttacccaagtctctccctctagtcccccctatctctcatactctgcccctctcccagcctagactcaagtctgggtttcagctgccgccagccctattgctgctgttgctgttctctgtccttggcccaggggctggtgagtgcagaagcagggaagattgaggcaggaatggggttccggcagggaggggtgggctggagagattcaggagaggtgggacctggggaactagatcattggggagcaagtgggagaaatagagagtagagaggtcttacacaacagggattggcagggtcaaaagagtggtaattaattgggtttgaggctcagcaggtggcttacagtttctagcacagagactccaagattttttctggtgtctgtcctgaccccactttgactcttgcttttccagggaaatgttgtgggctttgctcctgctcacaaagtttgatgggggagagacagtcccacaccagaagcccctagtgtagtgtgggaatatatagcccaaacctttgagatattgggcatgcattcaaacggcatgaagaagagttttaaagataatatgtagcaaatagatgaatatggattagttgccattataatgagttttcttcttgtaatgattcttgttccaaagaagattgatttgcctaggaataattcctgatacttttagagcagggctgaaactcggaggctattttacagatggggaaactgaggctcagggagggagcaatttgtccaaagtcagagagcttgtgaatggcagtgtgctggggctagaaaaaaggtttcctaattcctatttcatactagtgtgttttttttttatccactgcaatgtatacttaatagaaaaatagacccaagtggggaaaggctcaaagcataacctcccttctccccggtctgcccacaagggtgctttatccacaaactgttccttatttgccaggcgtcagccaagggccaccctccggtggggaagtgacttggacagaagagagagaggtccaattttttaatggttggaatgtgggaggaggagggggtgtcctggtctaggggatgtgccatgaagatggctccatcatggagtgactgtagtcttcatggcccaagtctgtagccacctctggtgggtgtcactctagataggatggagatgtgcctgatggagtctttggaaataacagccaacagarcagctggggggtggagaatgggtatcagtgagctctgggggcctggttcagtgtacaaacttaaggagacgaatgcacgtgaaaggtcacaacccctgcagagatgtctggtcacttatgtgtatgtgtgtaactgagggattgtggggaggctggcagcatgtgtacatgcttgtgtgttgttaagtgtagacacgtgcatgtgtgtggggtgcatgtgagccagtgtatcttctgagcgcctgtgttatggtatgaaggggaggggacatgttgtggcccatgtacattcctcttcagctctgcctcctcctcatatggacagatcactgaagctgtgaatggggctggagaccctttctcagcagttccaagggtgagggcagtgttgcatgcctcccataacgaatataagttatccatccatccccagccagtgcctttgaaggaaggagctgtggaggcactctgtgttgattactgctgctggcaaattggacactgggcagaggcagtagccagtcaggttttcagttttggtaaggggaagtttatgctgttgggccaagttcctagcttccatcctctgccatcatggcttcttcatgtgcccattgagcaagcattgggctggtgaggggagcagggtgaccgacagccacagagcatatacagctgaaagttgtggataaaaacactgttgcccagaagcaggttcaggtgctttggggagaattgtaatgaagttggaaaagagtaccaatacacccaaatggaggcagggctgcctttagtgctgttaataatgaatgccttggcaattttggaccaaagtacagggtgctctgtgacctaatggtggtgatgggttttgtctgaggagaggctggcagtgtcataggaccatcatggcacagggctgcacagtgcttattggttgcttcggtttcatttcaggaatggaagttatctcttgggtctagtggtcccactcctgatccttggatcttttccttgggcttagttgaggactcacacgtgccttgctattcaaaaaaaaatgggcttttattctacctagtgctattactagcagggccagcctcagcctatgtgtgtaggtgtaggggtgtgtgtgtgtgtgtgtgtgtgtgtgtgtgtgtatgtgtatgtgtgtatggggtgggtgatggtcggaattaccctagcttcatcatagaaatattggggaacctggaataagttcatctgaactcggtaagggccttactcatgcttcttctggacacagctctggtaggccctgttcaaaccgcaaaccaaagtttggagtgaatggggctgtggaccctttctcaagcatctgccctcagaacttcttccaagttcctcctagcattcccagctgctgctcactcctttatctcactggcctattctgtgacctctgtagcccctggccactgtggggatggcttagctagttccccagttccccaggccatactgtgatcctttgaattacaaggatctttgtgcttgtctgtccatgtttcccaaaggtcattaaactgcttttcaccactagccctcatctgagggtctgcaccgagggactgaccaacatttctcctaacggtagcaatggttgatcagatgacccatccctggtaccagctttgaggaggatcagcccttccctaaccccagcagaaggtgcgctagagttctgatttcttctaacaatagtatccaggctgttcacctcttagccttctgcctcctacttagcacagctagggttcctaggaaacccgtctcttccatcagtcggtcccatttccctttatccctctcggctgcatctctatcactctctgaatgctgcactggtagcctctctgggttcctaggcagtgctcagcttgcaaggtgacaggttttccttcctgayagttgagactgatcatgtggtctgaactggacagactagtccttgagtgtaaccgtggcctccaatggcccccacctatgtagggcagctctctggggtgactcctggggttgctctggttcagtgttcgtccttcagcagcctccccttccctttctttgttatttcaaaaacacctcatttttggagttaatctctcccatctccagagagggagatgattggactaggttagccctgagggtatttcctgcttggctgaaaatgcccctccagagtagtccttattccagccccgggtctgtcctgaagctgctgagttccccaccttctcacctgycctggaggtgtcatcttgggcttcttttctggctggtccgaagtctccagagcagtcagattccctagaggtttactttgagagaccttgcctgccatttgggaccctcttcccctgtccgctactggttgcctccactgtgacagctattctagtcccttgcctggctagctgctgacacaacttctgctcaccttggctctgctcctgacaatcatgatcaggtatcttggcattttaatgagggatgaccacttcctccccacctcccaactcggcctgctctgaatattcccaaggggcttgaaatccactgggtcactaactcactgcctcactgggcttccctttgggggaacattcccccggcccccacctactagctgtgcattctgacctgggaggcctgatgactctcctttcctggggactctcatggtggcctgccagctcctgtccttgcttttgccacccaagcaggcccctggcagccgtaccacactttcccctcccctctcctgccctgagccagtatacaggcagcgcttgtgaggctgctgagggtttttactgctcctaaccacaggggaacagaaaggggaagaaaatcaacaaggaagttacacagttccatgctgactcccaagccccacaggtggagtttcagcctgctcagtggcttaagacgccatgccaaaatacacacacacacacacacacacacacacacacacacacaccttccacacatctgttttttttaggtttggtaagtggagaaaatggctcctaagtgaggaggcagctgtgaagtcaaagggtcttagttttggatttagagagagctaggtttgcatcctcagtttggtctaggtttgagcctcagtttccttatctgtaaaaggagggtttttttgtttttgtttttgtttttttttaaataagattaacgtaaggattaaaccagatgatggctaggtttcagatctgcagcctgaaacccagttcctggctcagaggagagcatttgtggagttgatgctattggtgaggaagactggcatgcctgttgcttaatggaaatgccctctgtcctgccctgctcctttctctctctcctgcttcccaggaggccttttcctgactgattactccacctgctcaccccgcaagctgagtcctttccgctcctttgccagcaccgagctcttccacttccatgttcctgaggacacattcctggctgtttggaacctcatcatcttcaaggagcaagggggaacttttggggaccactgcccagaccaaagtgtgactgtgtgagtgtctgagttaatttcccaaccccacttccaatccctgaccactttccagactaaagtgtgactttaactgacctcccgaccctgaccccaacccgcgtccagattgaagtgtgactgagtgagggccatgacctctgtcacatgaccacttccggactactgtatgactgtgcaagtgcttgagctgatctctcacctgtggcccctgacctggaaccactttgttgaatgtgtcagtatagggaatctatttgttttatcggtgaagagtgacagttcttttctttckttctttcatttcctgcctcccaccccattgtctgctttcctcctctcctaattctggtcccccaggtatttccggtccggggcaccccctgtcatcaatcccctgcatacacacttcccaggggacacagctgtgcctggggttttctcactgaccctcagctggacactgcccaaccgcacctcaggcatctttaacgtcagcagccccttacctggggactggttcttggctgcccaccttccccaggcccacggccacatctctgtcaaggtgggttgatgttgcccaggctcgggggtccagaactgcccttccatctctgctgaattccccccacaggctctctggcacaccagccttgtgtcagggtgggcagcagcacaagggtggctggggcggggcatggctaaaggccagcaggtcacccagtgggtcagaggccatgatctggaggaggcaacttggcagccccaggaggacatgctgggtccaggtaagctgaagggaaagttgagaatctggagtcagaggctctggcacaggggagtagtgccgcctcctagtggaaggcacaaatgttaatcaaggtgaacagaagccagctatgggctggtccaatctgctgcacacacccaggactggttttattttacatcttgattgacaatagccctgaagactctcttaggccacggcccagtatttagtccatctgggagaatgtattcctcttgcatcataatttcagacagcttcctacacctttcagaagaccacaagagaagctctttcctgctaaaaggaggctttgggcagctagtgtccatcctggcctttgcctcacttttctccaaatatcagccaccccaagcacttatttcacagaggttgttaaagactgaagggcaggttcaaaggtcagatgtctctctggtttggagtggaaggaaatgctgcaatgttttcctgccactctcatggattaggccagacaggtctcctattcctgttcactggaggagaagcagggggtgtgctgagctggctgttgtcagagtgggatggccacgtgcatggggcctgtggtgagggtgaagaaacgagcaagaacagagtgaggatttaaagaagaggactcttagcactcagaaatggggtgaatagtgcctttgaatgagctgagactcacataaggacaagggtgctggcactgctattgtcagagatgggaagtagggctgaggtagtgtctctaggcctcagtgacagggccgtttttcctgagagtgatgtggatgtgcaagagaactcccyatcaaggcctgtgagcctgctgaaggacagcatgttgggagctagcttggaaagggccctaggttctaggtaggccttgactctcatcagaactgagggttcttctgttagaaggaatgccttcgtaggtctttggcaaaatcccaacagggatgttctttatcccaactctgatccttgacccactttgtaagaactgacagggaaaatcctcctgaagcctggctctagttatccaaaaacctttctaggtgagcaggaacctagggcctaggcctgggctgggattgtgggagctgaggcccagttagaagtggtcaggattgcttatggctaccagattgggacaatggggaatagagatagtagtgcagagaaaagctgctcagaccctaaagggtgattcaagtgcccagaccaagggggagctgggcagtgaggaaataactaggtctgacatgtgcatttgcatctagacatgggaagcggggcctggggaacttggtaccaaactggaaccctggtcagagcttccccaggtgtgtggtgaggctagacagaagaggaccatcccaccgtgcccacgagtggcagtgggtctggacgccgtgagagatgtagtgcttccatcagccctgtttgagaggttgatggggcaaggatcttgggtctggtccttctaagaattagattaacttctgtagtcttatatggtcctcaaagggttcttcagctctccagatcctggttaatttccaggattccagcctgtgggttaattgtctagagcattcctccatcttctcaacttgtttccttcccctactatggcatgcttcctgtaaggcttgaacacaggaatttatgtgggtttagggttatcctttggtgggaactgaagagtcccagcgataagaaggcagtgtgtttctagggtccttctcagctttggggatgagctcagatctccctttagccttagtcctttagtacctgctttgtgccaggccttgggttgtgtgctkgggacacagagaaaaataagatgcatgtcggatataggaaatgttttaggaggataaaggggagatggctaactcagcttgctagcgtggtggaggtggtattggaaactgttaagcggtgaggtctgaggttgagaaggcagggaagggcattccaggtggtgggagtagcatggcccaaagtttagaaggaactgaagtggctcagtgtgggctggtgttggggtggtraggaaggtagagggttgagcagaggccagatcacgaagggccttgacatttgaactgtatcctgagcgtgatagggagccctgaaaggttgtaaaaaagaagtgacttacctggtccgggccaccctcgtgaactctagtcccacacttctgccagaccctgtgtctgtgttatttactacgtattcctagcctccagtgcagagtctggcacatgatgccttttcacgtcctttccttgtccctttcttcctatcagccactctgtcttgtccccggcctccatctccttgcctttcctgttttggatcgtgtgttcattctaaggtgcccagttgccagtcygctctggggggctggcctttgggttgtggataccatttggcacccaaatggctcatgaggggaaagtactcccaaatgtctagagtgcaggttctcatccttcctcttcctgtgtctaagatttgaaaaagtaggtaaaataatgaaagcaactacgaggaaagtgaagargtcgactgtacaggagaaaggattctgttgaatccaccgactaggaccacacgtgactcaatatctcagctgaggtggttagaatctgctaatagtgcagctgcttttcctcctcctacattagtttatttattttttgaataggcaatccatgcacctggtacaacattcaaaaggtacaaaagatatacagtggaaagtaagttttcctcttccattcttccagtctccaattccccgccccagagttaactagtaactagctgttaactagtcccctatattactcttttctttttgaaacaccttcccttcttggcctctgtgactttacagaactgtcctggttttcccactgcccactcctctgtctcctttcctggcctctcctctgcttgatctccaggttgtagtggcccaatgcttggtcctcgaacaattcctttttcacttttctattctcttgcttggtgttccagcacaataatttaaaataccatctatatgttaatgcttccacgagtattcagccagtcctaatttctttgaatctcagactatatcccactgcttacttgacatctccaactggatgtctaagaaatgtctcatacagtatttagtaaaatcaaatcaaagtgaagctaaaagtataaaactctttaatttccatttcactgctcccagtccatgcttctttctctagtcattgtgatcttcctcaggaaattgtactgtcatccacccattgctcaagccccaaattaaatgccccaaatccttgatttttcttgtctccttattcctcacaascaatcgtaaagaaaaagtcttgttgacgctacttctgaggcatgccctgaaggcttctccagctcttcatttccacttctagcacagcttctctgctttctccagggctaccacagtagcctcataagtggtcttcctgctttcacccttgccccctgaaatctgtccagcactcgtttgcttctacactgattggtgctttctgcctctgggcatgggctcagctgtgcacttgctattcccgcagagaaggctaagtgtctttgggcatcttcagtctgcaagccccacccagagcctggcactggccagcccactcaggcctttctgaagaaacccagcccatacatacgaggacattgtaggaatctatctaccatgccttagactccaggatctttcagcctgtagcccatccacatctcacttttgcctctcctagtttcttgagcttccttgcctgtgccctgggcctccccgactgctgatgttcttctggcctcttggctcagctgggactctctcacctrgtgtctgccctggcagctcttgaggacctgacttccggtgctctttctctggtcccatcactgggtgacggttccctgcatcttccctggtctccactgactaaacactccctctgcatgaagaggggggactggctgtgcacgttacacagttgaaggaaggagcaygtcttaaccaaacaggtcatgtccactgatctttcattgaatcaaacgcaagtaaaactccaaaacgtggarcaaagtgttccttccctggactgtctagcaaggaaatgggccaccactggagcatgagcccccacccttgggactcattcactacaagattattgtggtggtgattcttgccataggaggtggggtcagtgcagtgacttatgagagtcttttggttcttcgggtttgacaccaaacctgagcatctaggttggttcaggagctctctgaagggaccccctttttgacacccattctttaacagctattttagcacctagtgtgtgccaggtggtgtgctagacactggggatgcaaaaggcacagaccttccagccttttggagctttgctggaagtcagtgccttggctggcttgttctgagccatggaactcagtgggatgtcagggcctggaacttttgtcccagaacagagtttgaaggtatgtcctaattaggagcccccacctccccttaactgtgaggtctgtagggctcatatagctgcacgtgctgcagaagaggaactgcgacaaatgggactgagcttactggagagtgatgaggctctgcgagccatggggtgtcaacagagaaggagctggggattttctccagaagagaagctgggggagacgtggttgatctcctttagcagcagaagaaacacagtctgaggctgagggaccagacggatcagtgggtcccttgaaggcagagttggggcaggggcatcaaagatgacaggatttggctttagcaaggtcagcgcttcccccaggtgggatgatccatttactgattgattaattcagcaaacattcatctgtgaggtatgcactctatgtgaggccctgtgtctggaggaacaaacatcaaataggacagggttcctgttctcaagctgcttatagtctggaggttgcctgggaagtaatgagtggccctgcactcattacctgtgtagggccgctcattacctgggtgtaatgagtgtgaaagcagaggctggacaagcacgtgggagcggggcagggtgaggactaaaggaaattaaaggttgagattggtggcggggagagtgagggggctggattggaggccttgaaagagctttccactccaccccactttgcctaaaagagccagtgttctaagttcctgagcctgctcagggaatgggctggttggagatcacagtgctgctgggctggcccagaatgctcagggggaggggttagattgggagaaggggcaagccaggcctgattgtcaggagggcctgggtttgaatcccaaaacctcagccagtgctgaggatcccagcagaccttgcagactgaggtgggacagagatgaccagaaatgactgctcaggcaggaaggacctggaatttagagagacctgggttagaggcctgggagtggtggccggggcgggggtttctccccagcccgcccagcaggttctgtttgcyttggtttagtcacacccctgctgtctctccctctcctgccacccctgcttttgtcccagggtctccaggatgagtgtcagtacctccttcagccgcagctgattgtccggcgtttgctggacgtcgctgtgctggttcctggccggccctcagagcaaaccctctccccacacaatcgctcagccctgtacaagtaagtcaaagactccccacacctggtcctttccctcttctgtggcctcatacaggctgcagggttctctcttggcttctccacctacctgcctggtccctgggtgggatccctgcctccctccctcccagcacagagcgggagacctgaacaggcctccttcccaccctatgccccctycttcctagtgcttcccttgccctgtgttcctctcgcctctgtttgtgccttcttacccccaacctctcctctgcccagggtctttgtgcccagcttcacttacagggtttcagcacagctggtgtgtgtggggggccgtggggtatctgcctgccccctgtcactgcgtctgcgtcccaaagccccacccctgcacaactcaagctctgtggcctgtggaggtgcctcaggatgccagctggagctggcactgcccccctgggggcactgggtctacgtgcgtgtggaaacatcatcccggggccctggtaggaccatccgcttccagctgtgtgtgcrgttgcaaggtcagaacccctgcatttgccccagtctgtgtagacatctgtggttgggaagtgacttgggtggctgtgttcagtggccctctgccatatccctacaacctcccctccccatcccaagctccttcatgctccctgaagccatcacacttggagctccaagttattggaaggcctttagataattttttttttgcatctgacttgagacaactaaaggacctcattactttctttgatttaatctctcagtttcctggggtaggcagggacatccaggacctctgggacactgtccttgccaaagcccttgcaagtcagtgagacagcctctcatacttagtatctgtttcaatagtgtcttcaatgcctttagggagggatagatgacctcagttccctccagtgtggtattgcattagctgtcaccattaggaaacccctataaacctggatgccccacactcccaagggacatcgcattctagttctcatccttcccyactctttgcraaatcctgtctagctcagatgtgtttatgagtaagttcaggactgtaaaggctgcaggcccaagctctggtttcctctgccccacagagtgcccacagcccggcctgctccgagccctggtccctggagctgccatgaacatgccccagtccctgggcaaccagccactgcccccagarccgccatcccttggaacccctgcggaggggcctgggaccacgtccccacccgagcactgctggccagtgcgcccgactctgcgcaacgagctggacaccttctctgtccacttctacatcttctttggcccaagtgtggcccttccccctgagcgcccagccgtgttcgccatgaggctgttgccagtgctggacagtggaggcgtcctcagcctggagctccagctcaatgcggtactctttatggagagtggggaggttgctctgccagsgagcttgaaggggaaggtgtcaggggtgttggggtgtttacctcctccaggaagcctgtccaggttgctcccacccatcctgacaattagggaccatggctyagcccaattctggtcaacaaacatgtcctgagtattcactctgctacagatgggcgggtcaaccaggtcaactcagtgtctggggtttcccagttttgtaggctcacttcctgctcattactggcctttcactacggtagttgttaacsttttcttgcaaatctcctttgatggggagtttaccacctcttgaggccacacagttcatgtttggatagcgctgatwgccaaaggcattcctgacatcccatcaaaatctgtctccatgaattttttacccactcatctttgattcagtgggtaaaagccatatccagaagccatttccagtaaatctatctctgtcctgttcttttttaaagcaacagacttaattttttttagagcagttttaggttgagcagaaagcacaaagttctcatatacccactctctcacgttttcccctattattaatatcttacattagtatgatatatttattacatcccagtcctatttttacagcccttcagatgttacctgcaaccacccaaaagctgaagaacctcagtgtcttaggggtcttggtatttggatctctccccttccttcactatctcacctggtcatacttctagtggtcactgtgtctctgaaataagtgatctgaggtggtcggaccggggtaccaggtaacaagacttgcatttgtgctgcctgagattgagttgcctttttcagcagctgcattacactgtgggatcacctagggcttgtggtgaactgagatccctgggtcttttccctttacttcctttgtattttcttcaaaccagttgtatacatttacttttttattataagagtaataggatcacataaaaactttggaaaataggggaaaatatctccctaatgcaactgtttaaccctttttttttgagacggagtctcactctgttgcccaggctggagtgtaggggtgtgatctcggctcactgcaacctccacttcgcaggttcaagtgattcttgtgcctcagcctccagagtagctgggattacaggagtgcaccaccacacccagctaattttttgtatttttagtagagactgggtttcaccatgttgcccaggctggtctcaaactcctggactcaactgatccgcctgcctyggccgcccaacatgttgggtttacaagtgtgagccactgtgcctggcccacagctgtttttggtttatgtcctcccatgtcttttccacattaattactttgtttatctagttgtaatcaaggggcatatacattttggtgccaattcgcatcttgcatttttgcagtgaatttttgaacctgaatggaagaatttatgtccctccttgaggtattgcctaatactggtttggaactcgggccttctccactttgtgtaattcacacacttgcaaagccaactttttgtacttcttagtcattactgtcagcgttaagactgagatgagggcggagccctatgttggcccattagagaatatcttcagcttagctgttccctgagccagggatccttttaactctactatcctccagccctgagagcagggaccgctttcccatcagccaacctgaggcctggtctgtggcttcatgtggtcttttatgggacacggcttagaactttctagtcgtcctgttagagccatttattcaacctgaagatatttcttatttacataatcaaattctctctttgttctagctaagactgtatgtattttgtgtttgcttattgccatgcctctgggcaatgacagtgagatcttgattcgaccttgaaaccgtagaccctgaattagaggacagccttacgcatacttgttctttcttcctcagtaccctgagaatagaagcctagccctcctgcagcccctcaccctttccctctctgcattcccatccattcactttaatgagcatctgtttacattccatccatctgcattctatgacgcgtgctaagcacctcagcctgttctgtttattctgaaaggtatttcctccaaatattttgatttttttttctccccttggatcaagaactggacatttggatcagagaactgcatatacttttttctttggctccctcctagaaagactttcactgagtaatactttggcatattgccccgggcttgcattgaaggaagttatataaggaagttgtatgaaactcactcttgtggctgaggacaggatgcatgacaacacacagtgccgctttgatgagaatttatctcagaacttcccctttggatgctgtgattctccagagactctgattagcttttatattatgtagttgcaaatctggtaactcatgatacttcctttgctttggttgcttggaaggcagtatcaaatatatggcctaccttagggacagactttattttcctgtcctgatttttaagtttccctcaggcatttattatattctattttatgtaagctgcctcaaatccttcttgaatgaggtgagcttatggcatcctgttgcctttattcttgtagacaacaccttacatttactcttgcagatatctggtttcttttaatcccagccaggttgctacatttaatctcttgggcattctgttaccactgttcagtacctaggatcatttcacctgagttggagtgagtgtcttcatgctccacctgtcttggggtccaggtgaagatgatgggaaaccttacaattgcctttgtccacaattagtttctataactggcaacagccctccttctccttaatgagctagataggactgaaaaagagggtgttctctcttgcttggacagaattgaaacacttctgcccaaagaacagattcaaaattgggccttgccgtctcatcagtccttgaaagatttctgctgtggaggatctgttgtttttcagtttttctgttctgagaatggaggtgagagagcagctttggcgtggagagcgccgggaggaatgggctgtccttggaaggtgtgggttaacaggggtgggagtctgagggtggcggtgggtggagmtggaggatgtggcggcctcacttccatacctgccctccccagagctccgtgcgccaggaaaacgtgacsgtgtttggatgcttgactcacgaggtgcccttgagcctgggggatgcagcagtgacctgttccaaaggtgaggtgaggaatgggggaggagaggaagctgcagtgtgggggtggtggtggcgggcagaggtgaaggtggggagggatggaatggaggaatgataggctagggttccgggaagtgggagcaggtgggtgagggttcttgggttctgacccctcctccctctcactgactccttccttctcccttcagagtccctggccggcttcctcctctctgtcagtgccaccaccagggttgccaggctgcgaatcccattcccgcagacggggacctggttcctggccctccgctccctgtgcggggtggggcctcggtgagcggtgcggggcggggccagggctgggaccgggacttggcgggggtggcccggggccccaggtgactgcgagtttgtgcgcaggttcgtgcggtgccgcaacgcgacggccgaggtgcggatgcgcaccttcctgtccccatgcgtggacgactgygggccctacggccagtgcaagctgctgcgcacacacaattatctgtacgcagcctgcgagtgcaaggccggtgagcaggctggcgagggagcgggctgcggtggactggaggtggacctgctgggcctgtgggcaggcggcgggagtaggggagtgcgcagcctgaattggggacgggtttggcagagccggggtgagaccaccctccacaagctgtggcgtaggcccatagctgccgtctgttctcttccattctgtgccttccccacccgcagggtggagaggctggggctgcaccgacagtgcagatgcgctcacctatggattccagctgctgtccacactcctgctctgcctgagcaacctcatgtttctgccacctgtggtcctggccattcggagtcgatatgtgctggaagctgcagtctacaccttcaccatgttcttctccacggtatgcggtggtgtctgcatcttatcactgggtgcttgtgcatggtggtgggtcacagtctgtatttccaccacgttctccgagggtttgggaatgtctgtgccttcactgtgtcttctacagacagagacagcagtgcttcccaaactgtcatgcatagataatggtcatttttgtaagacacattggagtaaatgaacaaaactgtttgcaacttaataaagtaagtttgggcctccagctgttccacactctgtccaccctgagggctgaggggacctttactcaaatcatgggccaagaaactggcctaaagtatggatttgtgtctgcacagtcaccatgttctctgtatgggggcaggaaatctatgctttcccccacacctctgcacacagtgtcttcatcttcaccacattcttccatgatatgagagctagctagctactctgagctccccttctccgtcgcactggggacctgcacatcgttagcacgttcgttcctgtggtctgaaatggcgttcccattcagtcaccatgccaccttgatttctcatgagaactttggaaagatagaggggatctctctattgggggattataggacaatctgactctcagagtcctgagaagctttacagactcaactatgtcctgaggcattgtcggaagtggcagtgtcatatcacatcccagctcaaaggagtgcattttgatgaagattaatatagtttaaaacccctccattcccattgcagaatcgccacaatctctttcctgtgttttcctcactcctccataatcagaaaagttcattataagcaagcgtccagaaactataaggaaaggtagagaagtgagcctgctaatgttacttaacccccaagtagactttttacccctgaagtgtcacatctgggaatcttttcaactcatctctaggctcttggcaccatgtgacatgcatgtgagcactgcaaaaactcttagatggtttcagactgctcaggccttgtcagcaaggatatcacagaaagcaagacaggccttcctggcatcctgcattactaggtcagacatatgtctaaattagaaaaatcatagttctcatctgggagaaagcaggggcaaatgtgctgaaactgaggggcctgggtcctcctggagattcatccagagatgaggaagaagaggctgcaaccatgctgcagagagagatcttggccctttaagctgggtgagaagcatataccccagttttgcttgattggcccctttttaggcctgcccccacagtgcctcattctatttttatgttagacactgtttctctttcgtattgccagatgccctttctactgtggctcaccaaatcctccagcaacagctgttctaccagcccactctcggctacatgcagatcgaatgtgattcataattagtaagaatacctaagtgtgtcaggagcctgaagcatgtagggagagcatattcactctctggacttgacacaagtatcctgattggctccagagtgttcagtgctagatgactcttccttatctggatacagtggctgtcagcctgaaaagaccttccctgtagcaggagtactaggagagcctcaagtgcctggcaccacataaaaagctcccggtttctttctttgttttttttctttttttttttttttttgagacagagtcttgctgtgttgcccaggctggagtgcagtggcgcgatcttagctcactgcaacctccgcctcccaggttcaagcgattctcctgcctcagcctcctgagtagctgggactacaggcgcatgccaccacacctagctaatttttgtatttttagtagagacaggatttcaccatgttggccaagttggtctcgatctcctgacctcgtgaaccacccaccttggcctcccaaagtgctgggattactggtgtgagccactgcgccgggccaaaatctcacattttcttaaataaggcaataaggaaaagctactggctttgagttgttgcctaaagtcctgctctcactcctgttcttttccacatgggccagaacataaaactatgttttctgttttccctgcaggttctctgtggtccctccttgccattcgtagacttatttcattctgcagcagtgtccatttaaggacccattggtcaaattgcagttgtcagtactaggacaggagataacagtcctcttccttgtcttcaaataatccaggacagtctacacttgggagtagtaatccattcttatctggaacataggagcagacagtaggtttataattcaggagtttacagatgtaaaatatgttttgaaaaaacaaaaacaggccacaaacttagcatttgatttttgtatataggcaaacaattcagataatgattacaacaaaatgacatacactgaatatgtgctgtttcagacactgctaatttaatcctcacaatagtactgttatagttgatacatgcttttattcttgtcatcctttttttgtagataagggaaagttaaatattttgcctgaggtagaaggtgagtatctaccttagaatctgggtgagcctgactccagatccctcacatgtaacagatgatattgctccctttgcaccagggcagtgagcatgcattgatatgcttttaacccaacttcagtttctcttaagtcctggagtatgtagaaaaaggcatggccccagtttagtagttctcaccaaattcttaaaagataagagccgatcaagagatctgaaaatacaactaagccaaatataagaaaccatcaggacaaagatatcaaacattttaattgtgcaacttgaacccgtactgttcaaactgtgtatccatcacagtgctccttgaatccttgtaattagatctcagaagacccagacagagctggcattctggggctgtgcaggtgtccttgctgattgctggcatcctggctacaagcccaccttctcattacgccttatatccctcagaccatcccaggtcattctcactgtctcttggcaaaatcccataactgtttccaagagaaaatgaaagcagaaaacaggaaataagggagtaacagcaagttccattatattccaatctgggcatggattaactacgtttgcgtttatagtccacattctgcagtgcctggatagcccattttggagcattagatgcactgttacaaaaatgtaaaattccacagaaaaaaaaccttgcaggataatttccctacattgcttcataaataatggccaaagctgagaaagttatcaacttagattagaattatattaatagaagtcagtttgtagtctaatttttttttcttaaattccctgatttttctatgtcacttctacttctttttattgctgttgacaaaaggaatgccaatctaaaaattagtccacggtttttagtggactaattccctcacactacaattttaatttaactctacccctgtggatttttcacaaccttaaacaatctctttgaccttttagtatacctggaaaataattagtcgtaaaatattagtgaaatgatttcttcaaatcctctccactctagagataatatctccatttttctttattcttcttttagtgcaaattcctaggagaaagtcagccctcaattattcccctagatgtgtcttcaatgtttagtgattcagctttgccttttttctgctgatatatatcttcctttgtctgaaatatagtacaaatctctctcccagaaacttctgggtatttctttctatatacttgaaagtgaagcatatggagccagtgcttggttaaggctggatgtaaaattagttctttaaaataaaatccaagtcataaaacagtattgggtaatttagtggcctatagtacttatgtctggtcttggaggcaaagaataatcaatttcctatagctaaaatagaaaaagaccaatatattgatttgtttaggaactaaattaactcccaatgaatcagcacatataaatagttgaaaaataaaccagtctcttaggtgtattcaaacattaattacttaaccatttttatttatttatttatttttgagggtctcgttctgtcacccagggcagagtgcagtggcatgatcacagctcagtgcagtcttgacctgggctcaagcaatcctcccacctcagccccttctgccccccacccccgccaattccctgttccccaccaagtagctgggactataggcacacgctaccgtgcccagctaatttttgtgtgttttgtagagatgggggtttcaccatgtcgcccaggctggtctttaactcctgggctcaagtgatctgcccacctcatcctcccaaagtgctgggattaacaggcgtgagccactgcacccaacctaaaaaaattcattctaatgttgatatggacctacatgaaaagtctgaaaatttcccattgagaactcactttttcaatttaacagtatattaagagggaaccatgtccccaaaataacaagccctttcgaaagcctggaacacccacttaaaacatgttcatccttaggcagtctctttttgcaggagcaaaattctttacctccaaagtgaaggaaaagaaagaagatagatacgcaagcttgagtcttgcagcttaaaatttaaaggaatcaaacccaaagtttcctgatgccaatttatatcccaggttttcgtcttcattttgttttctttttctaagatcctagcttcttcctttccaaatttgtctgttgaagttgtaatttttgcagtttaaatgattggatgacatcttcagtagggtcaaaggaaacattagcgatttctttttcatcttttgtctctagagactgactttggaatatgttttccagattttttggtggcatctctgccactaaagagttatgcctagaaaacttttttcacaaataagggaacacaggatgctggaagccatggcattgtccagagagacaatctggacatgggttggaactacagacaagggagctaatggcagactttgcttggttccttaattaggatgtccagttgagtctgatccgattccacttctgctccctgcatcccctttgaacctcctcaatagtccactcttcactatgttctccagagtgtaggatgggtggacactgtcccctctccatgttcttccccatggtgtgaagtgccatgcctctctccatggccttagggactgccttttttcttacctgccacacactccccgcatttgttgggaagggatgaagagggtcagttggtggaagccctgagagtgaagcccagttcagagtctgagctagcaggggaaactgggacatagtggggagatttggtttctgggtagcttagagcttgggccagggatggggattataggtgggatccatggtgagcatgaggagacagggacaggattggcctcagcttgagggtatcagaaccccctggcagggcactctccacagcaccttccagaagcaggaagattaggaagctcagggtcagggtcagggctgccagatacatattagttatgtagcagactggacctccttaccacattcttctcaggatttggggagtcaggcatttcccagatcttctcatctgtgacctttcacctctgctgcactgacagcagcacaccacccctgggcccacccctccggttttgtagatctggacctctgcctcaagttctctcaatgcctgtcatttcttccttcagttctatcatgcctgtgaccagccaggcatcgtggttttctgcatcatggactacgatgtgctgcagttctgtgatttcctgggctccttaatgtccgtgtgggtcactgtcattgccatggctcgtttacagcccgtggtcaagcaggtcagtccagagtgggccctggggaacaaccatggccaagtctccttgaaatccactcctgacctctccctgggggcatttccaagtgcctctcatgattctgacccaggccctggagtgctgtctgtcacctggccctagcccagcccttgagtctctttctctaggtgctgtatttgctgggagctatgctgctgtccatggctctgcagcttgaccgacatggactctggaacctgcttggacccagtctcttcgccc

SEQ ID NO: 97955 - DNA, 12839 bp, Homo sapiens
atcatttatgactattgtaaggtaattgcgcaggataaaagtggcatctcctaaggggcatactcagggtccaaaagaggctacttggaattggcaacaccgggggtcaggatggctaagacagaacccgtctcagttcaggtggtggctctagtgataccagcccaaaacaggatggaggagaggctcctcagggccatcctgttgaaaaacagagtccaagagtaagctccccttctctgggacaagatagtgttttgtcctaaataataataataattgctttggagagatgtgcttgctcacagataacttgcacagttatgattcttgctggtggaattaggatctattcctcccacttcagagttgacagacttgggcagaggagagtctccattaacttttgtgcaaagcctgagctctggagttttccactgagaggcagaaaggatagagttcccaaaggaagggatgtgtggcttctaggcatgtgacctgcagaggagttgttaggagcagaaagggtgtgaggaggagatagaaagaggtcaggagagagggagcctccaaaggtctcagcctggagtttcctccccttagctgcaaagaccaaggctctcatccttccgctgctgtgctctgagacactcacctggcccttcagtaatttggctggtctagggaggctgggaagctagagacaggaaggtatttgcttcctgattgccacaggctgaaatgcagttcagcgtcaaccaccttctctcccctcctccactcacatttttaaaatatctgtggcagtgccacccctgagcactagtggccattgacaggtgacattccaggcctataagactgagtggcttgttcctgatggtcctcaacctccctgccctacacactcaccccatgacctagtaaagatcacttcccaggtctgcaagggagggactcacctccacacccacactagagtctatctgttttccgtttctagtttcctccctcattgtcaagctgtcagcagtaaattccaacttgtttttattaaaaaggaatggggacacttttgtggttattttagccaagatgcatattctaaatctaatcatgatgagacattgcacaaaccccaattttataaaacacctggcctgtatttctcaaaaacatcaatattatgaaagacaaagtatggctgaggaactattccagatgaaaggaatcaaagagaagtgatgaaaacacggaacgtatgatcctgggctggatactatactggaaagtgttgctataactgtattggctataactgtggcaaccattgacatttgaatgtgaactgtagataagacaatcatattgtagcaatgctgaatttcctgagtttgatcattgtagtggaatacagtgaaagaatatacgtgtttttatggaatacacatgacatacacaacctaccttgaaatcattcaggaaaactatgtatacacacacacacacacacacacacacacacagaatgataaagcaaagcaaatgtagtaaaatgttaacaagttgatagactgcatatgggtttttttaatatgattattgcaacttttctttaagtttgaaattctttcaaagaaaataaatgtcgaaaagaaagtgatgaggaactccaaaaaaatcatggaaggactatttaaatatcagcaattcaaataaacatgaaaaagttcaacatcactaacaacccaagtggtgcaaaatggtacgttaaaaatcgaatcccattaacctactacagaaaaggataatataatatccatttttggtcatggatcagtgacacaggagcccttgtccctgctagtaattggacactgtttttgaaaaacaatttcagactttaaaatgctcttataaggccaagtatggtggctcacacctgtaatcccaatgctttataaggagatcaaggtgggaggatcatttgaagccagtagttggagaccagcctgggcaatatagcaagatgccatctctttacaaaaaaaattttttttagggccaggtgcagtggttcatgcctgtaatcccagcactttgggaggctgaggcaggcaggtcactggagcccaggagtttgagacagtctggacaacatggagaaaccctgtctctacaaaaaaaaaaaaaaattagccagatgtgatggcaagcacctttagtcccagctattcaaggacctgaagtgggaggatcacttgagctcaggagtttgaggctgcagtgagccatgatcatgtcactgcattccagcctgggtgacagagcgagactctgtctcatgaataaacaaataaaatattcttttccttcttctttttgagacagggtcttgctctgttgcccaggctggagtccagtggtatgttaatggcccacggcagctttgacctcctgtgctcaagcaatcctcccacctcagcctttggagtagctgtgactacaggtgcacaccgccacgcctggctaataaaatgctcttatacttagacctcataatggaattcttaaaaatttatcctaaagaaaaaaaaaatcagagatagagatagagattttatggctgggtgcggtggcccacgcctctaatcccagcactttgggaggttgaggcgggcggatcacgaggtcaggagattgagaccatcctggctaacacggtgaaaccccgtctttactaaaaaatacaaaaaaaatagctaggcatggtggcaggcgcctgtagtctcagttacttgggaggctgaggcaggagaatggcgtgaacccgggaggtggagcttgctgtgagccgagatcgcatcactgcactccagcctgggcgacagggcgagactccgtctcaaaaaaaaaaaaaaaaaaaaaaaagaaaagaaaaatctctatgatgtaatttaccaaggagaaaaacagcatcatctaaatgtcccaaaatagcataatggttaagtagatgatagtatacttatacatgaaaaaagccagtttttcatacagaccctcaccaagaagaaaatataataaggaaaaaaatgttcctctatattagcaacaaaatggagggaaaatgccctagaataaagttaagaatccacggtatgtacataaataagaacataatactctattggaataactcaaagaaatattttaataaatttaaagataaatttggataagaaatctcaaggctgggtgtggtggctcatacctgtaatcccagcacttcgggggaggctaaggtgcacagatcacttgaggccaggagtttgagaccagcctggacaagatgatgaaaccctgtctctaccaaaattacaaaaattagccaggtgtggtggcacgtgctcataatcccagctactcgggaggctgaggcaggagaattgcttggacctgggaggcggaagttgcagtgagctgagatcaccatctgggcaacagagtaagactctgtctccagaaagacaaaacaaaacaaaacaaaacaaaagaaaaagaaagaaagcaagaaaagaaatctcaaaaatgtaaacttttcaagccttctaaattaataaattcaatgcaacctcaatcactaacaagctaattctaattcacataaacaattatatataaattaattcatatagaaaacttgtcttggaaaatgatcaggaggggaaaactagtcccactagatatcaacatgtataaaagttacagtgataaaaagtttggtactggtaaagaataaatagatcaatcgttggtacagaataaagtctagaactagacccaaggatatatggccatttaatttgtgataaagttaatatgctaatcgttaatctattgtcccccccgcttctgaagtatgcctctatactcaatttgtgacatggctgaaactgaaaacccatttctactttggcaggtgactccctgtagaccgacccacagagggcgcaagagggagcgtggaggaccagacgagggaaaagattctttttttctctctctcttgggaaaagagggaagagcttcttgctccttccggtttgcttcctgttcctgtccgcttagccccgcagtgttcattgggtggtcctatatcctggtttctcaacactttcagaactaggctcattgtttaggatctcagttccagaatgccctttctcagacaccaaaatgaattccaaagagaccaaagattaaaatataaaaaataaaatattatggattctagatgacaggggtaaggaggaatctgggaaaatggcagtttgttctgtaacatccatgatgcatcccgacccagccgcagcccagctgctgttctcctaagctagggagctgctgaggctgaaaggtgtgggcagtgccagtggctcgggtgggcacataccagacaggagtggaacaggaattttcacctctgtgccagaggagatcctggaaacaagcctcaaaaagtcttgaggcaagaaaaaggaggaatactgtggtatctgggagtcagtttgaacaggccatggctacaggggggcagggctgtggcttccatgtcagtgttgccaaaagagctagaggtctgggaggagtctccctgtcctcaaggaggagctgagttctctctcccccagcaggggatgtcccaggtgttaccagcccttccaacttggggcctattaaaggattgataactggccagtggctcacacccctatccccatgggcagactatggtgtctgcccctctctcaggatagccgctccctaaagacctctagcagctgggaacccagcagccagacacaagagcaaacagaaccagagaaacatgtctcctagtgtaattgaactgctggaggaatcagaacatgccaagggcactcaaggagctctaagtccagtatacaaaaaaaaaaaaaaaaaaaagtctctctgataagacagcagattgaacacttgcatatagtgaagttagctaagaagagaagacactatgcaatgcagttcaaggggaattcgagggcagacgaggactttctttggggggtgggggtgcagataagaaaggtttaaaagtgttcagagaaggaaatgcagggatttgaatccaactctaactccaaagcccacgcccttttctctggcagcactttgctaggatctggtagggcccagagacaagtgagaatagagcttgctctcctcgtattttagaacagagacagagcaagcaggtgaaggtcagttatcccattcttctcccagaagggctttcactgcccaacacagctcaggtcctcctttcacaaaacaaactctcagatggactctggctggcagaggtatatctcagtcctgttctttaagtcactgagtaaacagcattttggtaattcctacagcagcttcgtagaagtactaaaactcttccctacccacaccccatgtccctcaagtctggctgaaagaaaacaggaaagatttgaggccctggggcccttggcaaaaagcctatgtgtggcagaggtttgtctgcagcctccctgactttcgccacacctacctcgtaaggacttaactgactgtctcagggtaagaccctgaaaagagaatttgaggtgttgactctttctgacccccatcgtcccaattacatacttatccacataataacagctcagtgacaacttcttgtcattatggctttgaaagcttctactacgtcccagacaaggactcctttttctccccccagtacaacaatgtttttatccaatgacatatgctacaagaatattctgactttctgatttcaggcaaagacacactcaccaacttattacttgacacagcaagtcccagtcagagaataccatatgaaacaaataggaatttgcaagaatccaaaacataggctgcatccccagcccaccgccatggtcacctacaagctagtactgatcagatgtggtgagagcacgtggaacctggagaatcacttcagcagctggtacaatgccaatctaatcctggtaggccacaaggaggcaaagcgcggcaggcaggctctgcgagatgctggctrtgagtttgacacctgcttcctctcagtgcagaagagagcgatcggatcctctggacagtgctagatgccattgatcagatgcggctgccagtagtgaggacttggtgcctcaaggagtggcattacgggagtctgrctggcctcaataaagcagaaacttctgcgaagcatggtgaggcccaggtgaagatctggaggcactcctgtgatgtgccaccacctccgatggagcccgaccatcatttgtagagcaacatcagtaagggttgcaggtatgcagacctcactgaagatcagctatcctccggtgagagtctgaaggaaatagttcctcagatcaaggaggggaaatgggtactgactgcagcccatggcaacagccttcggggcattgtcaagcatctggagggtctctctgaagaggctatcatggagctgaacctgccgactggtattcccatcgtctatgaattggacaagaacttgaagcccatcaagcccatgcagttcctgggggatgaagtgactctgtgtaaagccatggaagctgtggctgcccagagcaaggctaagaagcgaaggccagcaggcatgctactgtcccccggaacaccctccctggccatcccttcctctgcccctgccccctgcacatgtcacactgaccacatctgtaggcatcttatgttgtagctgcagatggggaccagtggctcacattttcgttttagccatttgtctcctgcacccactcccttcatacagtctagtcagaatagcagttctaggtcacaggttctcagtccaagctgaggaaaagattcccttgtccaagagagttgaaaggtagtgacttgggtttttgccagtgttttctttactaaggatttgtggagaggaaccatgctaagccatgaccaatgaggagaagcaagagcacctatctggccccaggagccagttctctgctcttctgcagtcaggccactgcctgggggctctagtcattccagtggaagatgaatgtaacctgcatgatgatgtgacaaacaacatttcctccccaaccccagaagagctggctctagaaggttgggatcaatcctgaatttagtttatgtgttacatttacttttaccaaaaaaaaaagtatagtatatgtaaataatactaaacagtaacctttctggtgtttcttgtagtgattgaaatagtcccacatgtggtcatcagaatataagccattcctcataccaagatgggataagctctgaggggtaggagtgcctcctgctgtgtgttttagaatccttcacctgccttgtttcatggtggtgaaatgcctcttcgtcctgtccaagtatgtctttcacggattgatttctgaatcatgttctagttgcttggccctgccacaagggcctagtgttcatttaagcataactgtactaaatcctttttctgcgcatgcctgtaatcccagctactggggaggccgaggcaggagaatcgtttgaacccaggaggcggaggttgcagtgagccaagattgcgccattgccctccagcttgggcaacaggagcgaaactccatcttccaaaaaaataaaaaataaaggagtgatgtgcaatacaattttttaaaaaagaatcccaaacatattggcatgcaagggggatgaagagataggtagcatcttctgtgatatgtcagtgggctgtgcacgtgcactattttttacattatttgaagcactcacgtacttagtttttattttgccctaaaagtattttttgtgctatgattttatttgtggtgccctttgagtgcaagatgattatgaagcctcaaaatgttgaaaaattgttgaagaaaatagtacagaaagaagactgcacctgccaaagaatgacctctccgatctcttctctaccagcccactcacatctttcttcctcccttgagagtaaaatatgctccactatagtatctgtcacatataaatgccttctacctatgtacttctacctaataactttctaattattgtttcttacataaacttgctttcattgttcagtcaatagatttttctatgtgtgaatattgaggatatcattggtcagaatgaaatgcatcataggtttcccattaaaataaatggaaatatttttccatctaatgatttattttcccctgagcagcaaggtttttcaggaaagaattgacatctttaagcaaaggataggtgttttatatgttttgtatatgcgatgctccctacagagtaaaagtgaagtcacattgcccccatggagctcatggctactatttcaggaatgaattgaagtgcctggaaaacttaagtccctgggatggctagacatgtccctattccttgctgcaggtaggaagacagcattctcaacatgttgtatttgtgatcagagggaccaagatttggcctctcaccactaagaggaaatgacctagagacctatggactatgccccatgaagtcaagttaacataagggaaaaggtgtgtatcagcaaggattaggattaactgcaaataatagagtctcacagaagcactgtttaaaccagatggcagtttatttctctgtcctgtgtagagactgaagcataggcaatctgggactgtggtaggagctctattccttcaagtcctcagggtctcaaactccttctagcttacttcttaatcatccctacagtgtggtccgtattacctcacagtctaagaaggcagcaagagctccagctccacagcacattccaagcagtaggatagaaagagtgacaaggaggaagggatgcaaaggccatataccagctgtcctctaagaaaggtttctagaagctaccatactttaattctgcttgtaacttattagcctgaacttattcatgtggccacagaagatgcagttcactgcagaagatgctgaaaaataaagccttaattctgggcggccatgtttcttagtcagcttgggctgactataggcttaaacaacagacactaatttctcaccgttctggaggcctgggaagtccaagatcaaagtgccagctgtttccgtttctggtgagggctctcttcctggcttgtagattttgagcttcttgctgcatgcctttcctgggtgtgcaggtgtgggaggagaaagggaaagcatgatcttgatcagagagaaagagcgtgatcagctcattctttgcccttaagtctcactcaggttctgatgaagtggacaatataattgtaattgggattatgggtactatttccttatgcgcatctgaaataataaattatgcatttatatgtggacttagattctttggctgtttccagacaacaagaacgtttcatcttttgtgacatactcccaaaaggtatgacaataaaatcttcacttttatatctctgagaagatgagatgtttttacaattgttatcacaattctctatcctaggaaatgggctttctaagatctcactgtgtgttgtgctttatccaacatgcagccagatgacccatggccttagagatatggcagtatgctggtttcatcccctgttctgcaagctaagcatcaacagctatgacatatatttgcacattcgtgtttcaactcaggccccaaagcatcattgcagaattcacacattattaatttcctaaagtctaaacatgtaacaaattccaatgagagaaatagtgcaggtacccatggaaagatacaggccgtcatgacgcagacagggatgcacgaccaacactcaatagctaaagtagccagaattctcagaaaacctgcatacaactaagaactgcctttcctcataactctgtcagccctttgagagacaaactgcctctttgcagctgatcagtgcacccaaggacaaacagagaccatctggaggttttttttgttttgttttgttttgttttttgagatggagtttcactcttgttgcccaggccagagtgcaacggcgtgatctcagctcaccgcaacctctatctcctgggttcgagagattctcctgcctcagcctccctagcagctgcgattacaggcgcatgccaccacacccagctaattttgtatttttagtaaaaacagggtttctccttgttggtcaggctggtctggaactcctgacctcaggtgatctacccgcctcggcctcccaaagtgctgggattacaggcatcagccactgtgcccggccaggttttgtttttgtatactctgcctttacctttgtccaaggagacgatctatgcaatccttgtcttctccatacacaagtaaatcttcagctgtactctaactaaatatctgagttactgtcctcctcataatgttgctattgtaatagcataaaaaacactttggaacagaatcgatttcaccactagtaaaacacttgcattcctttacttcagcaaccttcacaaatagtcttcaaagtgcacattatggctcaactgaatcttctggtagaaaatcccgttataagagacagctgggcctgaggcttcaattaaccccatttcaccaaactcactgggtaagggagctataggaactaccaagtggtggtttttgcttggatcacacaactatcatctgcatgaaccactctcatattttttttattgctgtgacagttaacctgaacgatacaactccagcaaaaaccctgcaacactgggccagacagccacaggcccacataatacacacggtggtacaaatcaacaccatccatttcaaaatactgaggattgagaagaggttgactcatcccacaggtgttgaatgtctgtcgttatggtccaccggccttactaagggctcctattctatctagatttaccatccagatttagttttaaaagtccctaaccctaaagtacctcattgatctctcccaaatcctcaccgctaagggaacacaaagttctcaccaaaagtttccagtgacttcaccttcctggactgtaacagggatacttggggggccaacctctgtttctcttggatgatcgcaggttttaatgtccaagtgacaggccctggaaagtgctgggccctccaaaattcttctgtgggctgaccacacctcgggatttgacctgtggggcagggagacactatgttgcaactgtaggtgcgagacaacggccctgggcctatgtgcatctgggctgggggaccctggcacatgagcactgacagcaacctgctgctgctttttaccagagcagttgacacaccttgcttgtgtgttctgtttttaaccattctgaactgaatgaaatttaagaattttttaatagccaccgtcatccttgtttaaattagttttaggaagtagctttatagttttacaggattttttttttagactcagaggaagtcaagcatcaaagcatttttttttttaagactaacaggatttcagatacataatgagaaagtcactttattttctggctaaaattttcagacagtttaaaggaaaacttttcattttgtgggttagttacattggaaactgaggcttgggaggttatcaggtctccagggtcttttattttatttgtttgcttctacacagagattagtcataggaagaaacttaattattattattttttttttttttgagatggagtcttgctctgtcgcccaggctggagtgcagtggtgcaatctcggctcactgcaagctccgcctccttgggttcatgccattctccttcctcagcctcccgagtagctgggattacaggcatctgccaccatacccagctaattttttgtatttttagtagagacggggtttcaccgtgttagtcaggatggtctcgatctcctggcctcgtgatccacccacctcggcctcccaaagtggaaacttaattttttaaacaatttttcatcttgctaagatgcgtagtcttgttacattacatctggggccaaagtagacagtccaaggcatgtaggctgcactgctccccaagaagacttgggtgccccattctttcttcctgctccaccttaccctatagtgttgtcctcatgcaaatgattaaatccggctcaccacttcccttcaaaccgtccagcccaaagaaagggggacagagaaagaatggatagtttttcctaaggacttgacttggaagttgaacgcattgtttttgcaaacatctcattacccagaagttagtcatatggccttacccagatgcaaaggattgcaggagatatcatatctgtctgtgaggtcatgtgctcagctaaaatgtagagggttttattggtgaaatgaggaagtgaaaaatggatattgaaagattagtggtctctgccacaatgacatttgtttcatggatgattggtggatcatggctagtggttaacttggtgattgggagtgcttaggggaaggggtatgattagttttgggggaattgattactttggaggatgtaatggtttctaggggtttaattaggtttagggctgtgtgttagtccattttgcattgccataaaggaatatctgagactgggtaatctattttcaaaaagagatttatttgccttgtggttctacaggctgtacaagtttg

SEQ ID NO: 97956 - DNA, 23518 bp, Homo sapiens
aagacttcaacttgaaccctacctagctacacatggtctggatcctggggttggtttcctgcttcattccaaagtcagttctaaagcctcaatcccccaacccccaaccaggggagcccgtgggaaaaccttcccaccaaaaagctgcaacagagctggctttatgctcccagtaataacaccttggaccagagtgaaggggggagggaggagagaaattaaagagtttcaggaacagaaactgccagaggtcccagaggaggaggcatcagaacagagcggggaggggacaaccaggagacagccctcccctcgagacagacctctggggagactgaggcagcatgggggacactgagggacaaagatctcgggaagcgctgggtaacacttccacaatattcactggcaaatccacccgcctccatgccgcctcctcccacctcaagccaaccggagcgattatgggcagacaggggcagtgggggagggcgaggggcagcccgggcccaccgtggagacaggcagggggtgtctgcttgcccgggggtcccacgccctcagagctagcagtaggagggcgtgcgcagggtggggtggctgggcgtcccaggggaaggggggccagtttagcagatccccctgcttccgctggcgatgggaaatattgcgataaatttccctccatccccattctacccccagcgcccgggcttccccaggagcccatgtccaaggatcagggaccccagttaccgggtggccgctcccaccttccctagagccaaactttctgcggggccccgggaggggtgttccggagggaggctctgctgaggtggttcggggagggggcggggcgccggcgccgggacggggagcggggaccggcggggggaggtgcccgagaggacccggaccccggcggggaagggcgccctcccccggcctcgcggccgccccaaagcacatccccttctgccggccccaagtccccgcgcgtccacggcgcccctgtgcccacgggagagcgacccccgcccagatggaaaagggggtagaccgggcagagcgagaggcggctttggctcgtggggagcggcgacccaacccagcgcgcatcccgcaagccctcccggctgccccggaccttccccctcgctacctcggaacagggtctgcccgggggctgctgcacaaagaggtggtggtcgagggagacgccaaatcgttaagacggggagcccgtttcggccatcttggaagagaggaaagggaaaaagggacagaaaaaagggagaaagaaaggcggacggggcaagctgggctagggactgacggggcgcggggggtgcgaaggcaggatcggctcagagcctccccctcccatcggggcttgcgaagaacggccggcccccatcccaatccccagagggttacaggccaggagagggaaaggcagggggagtccgctccgcttacctgggttcggggtccggtgggtctcggggagggggggatgggagggagggagggaagggaggggaggggggccgcagccgtgtcgctcgcccgggcggcgggaggggagaaacctacggtaagaaaggagtttgtgaaagcggcttggggtgggagggagaggggaggggaggggaccgaggggggaggggagggaccggagtgtgggggggagacaaaatggcttttttcctccagacaagagtaggtcccgcccaccactcacccacgtgacctcattccttcaggatgctggcagagacgggaagaggagggggaggctggcgcggccgctccccgccaccggctgccgggtccctagccaggacgagacccctcccttcccatgcggccgccccgaccccggaggatggattctcttatgttaccttccgcagttagcccccctcccttcaaaatatgggttccccccactgacactgtgatgcccatccctaactggggcgcctggaaaatggtgaaatggggactgggctgaaaggtggctcgtggtcctccacgccccggcctagaccaaagggcgcggggctccggcgggggacgcgacgccttcagccaggcgtccgagcgattttcattcactccaagtgacactcccttaaaattaataactgcatctgggagggcgagcgtgtcctccccactccccttgccccctcggcggcaggggcgctggccccgaaaagcggcgcaccaggatccagcctgggcgcctggcagggagcaatcgcgagaggggagtggaggtgcggggtgaggccgggtggggggcctcgccgcggggggatcgggtagctctggcggaggctgcgcccccggcgtgctcgggcagagaagaacggaggcccgctgaggatgggaactcaggctccgggtctgggacacaataatccggccgaaggcgagcggccacactggactaggaaacgaggcgccgggctgtaaggtgggcccgcgccttttctcctgcctggcgctgattcccgcatttttcgctcgcgccctgcgctgcgcgctgcctgtgcgcctccctgggcgcgcgggcgggagagtcgggcgagcgccaagacggctgggcccgactcccactggcgccccggctccacctggcgctggggctccggtccgcagtggctccggcaggagggagagaacgaggagggaggcttggaaacgccgggagtagcggtgaggccgacgccggggaagcgaatcgatactgcgttactggacgcccgtgggcctcatgaggatggtcgattccctcattcgttattcacgatttattagggatggcggccgcgtctgtccctccagagagctcgattatccatccggccagcagcgccattaagcgcactgacggtgggaggctcgagttagaaattaggataggaatcttcgcccagttttggagcgcctgcctcctcttccctcgttgctcgcagccaaggcagccgcgaagctgggggcctcgggtgaatgctttcgccctctggccggcgaccaggagacctgcgcacactggccgccgagtgaccccagctcgagcctgcagccacaccagcgggacgggggcggggaggaagaggaagggcggagagacttccttccagagggagtggtccgagaaccggcgggagaagggccaagggaagatccggtcacctgctccggagcctgcaggcggagaggcgagtagttcaccggccccggaggaaaggggaccctcccactgttcccaggcaaatgtgtcgccggcatcctgcactctgccggggaagacgcgcatccactcgctctgcagggaggggaacgcgggaaggactcccagtcagccgcccctctctggctacaagaccccgaacaagagaaacctgtaacaggggctctgcggagatctggatcccacccaccaaccacatgggcacctggggggctgcccctcggggcattatcagccagtgggaagggggttgacgttcctctgcggcccatgaatcctggagggctgcccgaggggccaccggggtccatccacttattcttcggttgttaagcgccagacaggagagaaccgctagagaggagtgtgctaagaccctattacccactaaaactccattttcatcttttgcgtcctggatgactagtctccacattcctggcctttctggtttctcaggagaaccttctgacccaactcttcccacatcgaaagagtttcctagtcttttgttctactactagccgacatagaaagcacctgtcatgtgccagtgtcaaatactgcgctaggaactgggaactcaaggcacaggagcctggcttttgcgcagggcgctcacaggccggtgggtgcaaaccctgaaggacacacagcctgtccctttagcgcccatcgcttctggtgtgagctcccgctaagggtgggtgagtactggggtgggcttccagaagaggcctcctttgagccgaatctgcagagaccaagtgtctatgagaactgctcaagagtgctttgcacattctcctccacaaaggtcgaggctcccactgcgcccaggaatgcgcctcgtcagacattaggcgccccttgattttgtgtttgcatctcacgcggtcctctagctgacaagtgcatcagaagagtcacagtggctgtcacaagccagagactcgcagaggacaggaacgcgggaaatctaggcaattacctccagcatataccaagagctattgcgaggatcagatccctttaaaaatggtgacgagacaggagagggcggctcctctagagctttccggaacgtctttacctctgtgtcctttataccttttatctcccccaaacaaggtccttagtcagtttctccttctatttccccatcttcctcccccacctccctgtgtagttctagggggaaaaaatgtgttgttttcctttttttctgatgcttctaatattaaatgcgtctattttcccactctccattgtcttgaggtcttcccctacccaccctgcctagttctgtcacgtcccttctttccctgtatcacaacaatgttctccctttctcacctttgtttctcttcatacttgtttctctctctgtgtctctctcattctcttcccttccaaatgtagtatttggagactgtaatatcgattgaggcagacaatagaaaactgtcgaacctccactgtaaattcattcttaatcctatgaaaaaatgcatcctgaaacgtgttgcatgcacagtgagacaaaaacctgtgtctttaggtttcctgcgatctagcttggaggcgggttgggggggtgtggagggaagtgctggagaaattatcccattattgactgagcagcaaagaattttcaagaacagtgattctcctagaaaaagtattgctgctgccatttcaatgcaaaatttggcttttgagtaaaaggcttaggtttttatcttccggggagaaaaaaaaaacccaaaagacaaaaaaaaaaaaaaaaaaaggtcatagcgtccctgggtgggctcgaaccaccaacctttcggttaacagccgaacgcgctaaccgattgcgccacagagaccgagtcgactaccggcgtagtagtgagccgagtcaatgggagcgagcctggacggcgcagacgccgtaagagatgccgccatcgggcgaaataagtggaacccgggggagaaagggaaggatcctgatgggggagggaggcgaaagagcttgggaggagaggacgcgggacgtgcacgcccttcctccattggaacggcgagaggtcgactctggctatcctcaggttctacctcaaacgtggagaggcgcggaacgtccctttttagggtgacctgagattgaggatacgtgaagtcgggccgcaggaagtcccccaaatcagaacaagcttcggcttccaaactccctttcacagctgaacccctgcagccgcaaaatacccgcgacgcctacacgcgacgccttccccttcccacctgcatcattaaatttccatttaatgggcgcctcctatatactaggcactgttgtgggccagtgaatattccgagcctaggcaagtgcctggtacacagtaaacgcaggatttctggagtgaataaataagctagcacgactaatacgacgaactcatacatcacgttgataagcgtcacggtgccccttcagctggggccgcagcttcctaaacccagtttcaccagcccacgtgcgcgcaggctccgcccccagtccctgaggtcccgagtccaggtccgccgagatcccactatgcaccgtgtcgcaagtctcttccgcagccacagtgacttttcacttccgcttttcccgcctccgttttgactttgcaaccaaactacctgtactggtgaccgacagggacgtgtgaccaatagaaagcccagatgtccaggaagagtccgcctatcagccaatgaagagacagcagtgagagcggttgcgcagtgaaggctagacccgrtttactggaattgctctggcgatcgagggrtcctagtacaccgcaatcatggtgagatggggagttaaagcaaaggggcatggggaaggattgagaagcggagggggtcaggagaggcttggggacgaaaagggcctagggtcgatggaaggaagcggtttcagttcgaggggagcgggccccggtgaggaccaagagggtgagtgcggctcattgccgccacacagtgctcatcccagctggagaaccaggggttcagacgcctccggaatggagaacgggcgtacaggagcctccgcatcaggagctgggccgggggctgtggcagcgtttgaccccccgcgctgacccctccgctctgtctgtcctagtctattatgtcctataacggaggggccgtcatggccatgaaggggaagaactgtgtggccatcgctgcagacaggcgcttcgggatccaggcccagwtggtgaccacggacttccagaagatctttcccatgggtgaccggctgtacatcggtctggccgggctcgccactgacgtccagacagtgtaagtttcaagggtccccgcccacacccaggcctcttcttggaccatccaaccccggcgtcttgaccggccaaggtgtcagtcatctaccacacaccaccagtgagtttgagactttgccgcctccaaaaaacatgtccttccctttcttttttttttttttagacagggacttgctctgtcacccaggctggagctcagtggcatgatctcagctcactgcaacctccacctcccaggctcaagcgattctcgtgcctcagcctcctaagtagctgggactacaggsgcgcaccaccatgcctggctaatttttgtatttttagtagagacagggtttcaccatgttggccaggctagtttcgaactcctgacctcaagtgatccacctgcctcagcctcccaaagtgctgggattacaggcatgagccaccacacctggcctgactttgattttgacaacaattttgagcagacaagacaagcccaatagaaacatcttgcaagcagttggggttttgttattacatctcagggttggggaagcattggcaatgtgccaaatctatgggagcagattctggagagacaaagtctgtagggagggaaataatgagcggcagtttgagagctgaacgttacatttagcagtgaggggcgaagagaagccagagaagaataagagaggaaaagaacggtgataggttttcaggagggaatacgtggtcacagggggcaggtcctgcagggtactggtggcctgaggagcagcaggtcctggatttgtttcctagaaggtggagagactagctcacaagcgtgggtggatgcctgtcagaaaatgttctcatttcggctgggcgcggtggctcacacctgtaatcccaacactttgggaggctgaggtgggcggatatcttgagatcaggagttccagaccagcctggccaacatggtgaaacgctgtctctactaaaaatacaaaaattagccaggctgggtggtgggcacctgtaatcccagctactcgggaggctgaggctggagaattgcttgaacctgacagacggacgttgcagtgagctgaaattgtgccactgcactctagcctgggcaacagagcgagactctgtctcaaacaaaataaaaaaagaaagaataaaagaaaatgttctcatttctcttaaaactccctgagtctcaagaacataacacttactgagatctcacccagcctgyccttttttcctgtctggtagagtcagagaatgacatcctggggttcctgtcagtgaagtctcccgtgagccttcccttctgcagtcactgctgttctcacaccatttccttttcttcagagggcttttctcactgcgtttgcttccttctgggcaatgactgctcatttcactaggcctcagtttccttacctggaagatgaagctcaagtcatttctaagtctctttgctctggtgtcctgagactcattgcttttcctccagcmkgtgtggcattggtctgctctatgcaggggcctatcctggggctctgagatggaactggcaagctgtgaccttttttccttttttcaccagagctgccaaatggcctttttctaaggcatctttcaagtctgttagcacatagcacagcagttggtgctgcccccttttttttttttttgtcacccaggctggtgacataaacttaactcactgcaacctccgcctccaaggctcaagtgatcctcccacctcaccctcccaagtagctgggactacaggtgtgtgccaccatgcccagctaatttttgtagttattgtaagaggcaaggtttcgctatgttgcccacagctgaactcctgagctcaagcaatccttccgcctcagtctcccaaagtgctgggattacaggtgtgacccactgcgcccagcctaaacatttttaatatggaacgcttcacaaatttgcatgtcatccttctgctaatcttccctgtattattccagttttaatatatgtgctgctggccaggcgtagtggctcacgcctgtaatcccagcactttgggaggccaaggtgggcagatcacgaagtcaggagatcgagaycatcctggctaacaccgtgaaaccccatctctactaaaaatacaaaaagttagccgggagtggtggcgggcgcctgtagtcccagctacttgagaggctgaggcaggagaatagcgtgaacccgggtggcggagcttgcagtgagccgagactgactgcgccactgcactccagcctgggcgacgagtgagactccgtctaaaaaaaaaaaaaaaaatatatatatatatatrtrtrtgtgtgtgtgtgtgtgtgtgtgtgtgtgtgtgygctgccaaagcaagcaccagttgctacttcctaacacatgtaagactacagttttccctgggcagggactgagatgagatgtctccttatgtttccctgacctcaacagggtagacactcaggaatattcaataatgacttactaactcacttttctcctacctcagtgcccagcgcctcaagttccggctgaacctgtatgagttgaaggaaggtcggcagatcaaaccttataccctcatgagcatggtggccaacctcttgtatgagaaacggtgagtgcaagtgtagctagcactgagggaatgcagacatctttgaatgtagtatggagtaggtactgaggaagaggactctccttgtttttccrtctcttatttgcaggataatatccttattttatgggtgtgttttctttgggcctgtctggcaaccagataggaaagaaaatacttatgttggaagaaggcaaggaatgcacatagcagataaatttgcatctaggcaaaagagttagtcccaccagagtgttctggggtctcccagcaggagccactcttgccctagagctattctgtcagcactggcttcttgggaatagcagggagcctaggaatggggtgttcattttcgtcagttctccttgagggctttatggtgagaaacaaggggcctaactgtagaatttagtgcagaaatctaggatggaattgaaaggaaaccctgtgggtgctttctacctctgggcaaacctgggtggccagaatataagttgagctctctttttcttttttttttgagacggagtcttgctctgtcacccaggctggagtgcagtggcgtgatctcggctcactgcaacctccasctcccaggttcaatcgattcttctgcctcagcctgccatgtagctgggaccacaggtccatatcaccacacccggctaatttttgtattttcagtagagacagagtttcaacatgtgggtcaggctggtctcgaactcctgacctcaggtgatccacctaccttggcctcccaaagtcctattataggcatgagccaccatgcctggcctgatctctttttttttcttttcttttaactttttattttgaagtaatttttgtaatttgtaaaaataccctttagctttcaaaaactttttctttttttttttttgagatggtgtcttgctctgtcgccctggtgtgcaatcacggctcactgcaatctccacctcccgggtccaagtgattttcctgcctcagcctcctgagtagctgggattacaggtgtgtgccatcacacctggctaattttttttttttttttttttttttttttagtagagacaaggtttcaccacgctggtcgggctggtcttgaactcctgacctcaactgatctactgcctccgcttctcaaagtgctgggattacaggcatgagccactgcgccctgcaaaaagtcttataaagttgtaacaattaactcatatttggatgtatattaaatggcttgctgggcgtggtggctcatgcctgtaatcccagtactttgggaggccaaggaaggtggatcacttgaggtcaggagttcgagaccagcctggtcaacatggtgaaacctcatctctactaaaaatacaaaaattagctgggtgtggtggtgcacgcctgtaatcccagccactcgggaagctgaagcatgagaattgttgaacttgggaggcagaggttgtagtgagccaagatcatgccactgtactccagccttggtgacagagtgagacttagtctcaaaagaaataaaaaataggtcgggcgtggtggctcatgcctgtaatcccagcactttgggaggccaaggtgggcggatcacgaggtcaggagatcaagaccatcctggtcaacatggtgaaaccccatctctaataaaaatgcaaaaattagctgggcgtggtggcacacaccggtaatcccagctacttgggaagctgaggcaggagaatcgcttgaacctgggtggtggaggttgctgtgagcaacttgcctcagcctcctgagtagctgggattataggcgcctgccactgcacctggctaattttttaatttttagtagagacaaggtttcatcatgttggccaggctggtctcaaactcatgacctcatgatccgcccacctcagcctcccaaagtgctgggattacaagcatgaaccactgcgcccagccaacgaaaaaaaaagttaataatatctgggattatctggataagaaccttaaaaccaaatactataacacagctcagggcctgtgtttgaacttcctattatgctgatgccgagttaccatctgaagtaacttttactgcagtgtttcagacagaggtgcgtagatggtatctctggggtccagattttaaaaagggtctggacattgctcaggtttgcagttcaatgcctcagcctgtcctgccagaaaaatcactgatttcagatgggctcatagaggaagctcccgtcaatagtagctaagaatccagaatttttcaggtcacctaatgtattttttttcttttcaataagagtaagacatttattttattatttttattttttattttattattattatttttttgagagtttcactctttcgcccaggctggagtgcagtggtgcgatcatggctcactgcaacctttgcctcctgggtgcaagcaatcctcctgcctcagcctcccaagtagctgggaccataggtgcatgccaccatgcctggctaatttttaaatttttttgtagagacaggggtctcactttgttgcccaggttggtcttgaatgcctaggctcaagcagtcctccagccttggcctcctccctaagtgctgagattacaaaygtcagccatcatgcctggcctaaaaaagttattttcatggtggctcatgcctgtaatcttgaactgtgcgtgtgtatgtgtgtgtgtttctatttagagctataactgaagatcatgcccttagaaatgactgtgatccaggcctggagcattggctcacgcctgtaatcccagcactttgggaggccgaggtgggtggatcacaaggtcaggagattgagaccatcctggctaacacggtgaaaccccgtctgtactaaaaatacaaaacattagctgggcatggtggcgggcacctgtagtcccagctactcaggaggctgaggcaggagaatggctcgaacccaggaggcagagcttscagtgagccaagatcgcaccactgcactccagcctgggcgacagagcaagactgtctcaaaaaaagaaagaaagaaagaaatgactgtgatccaataagacatatggataacgtctcttttactgactctttctactgaggatattggccatttgttatttggtattttatagatattccttaccttataaactgttataagtttaaaatattgtaagttgaaatgggtattttgtagacataggatgcaaatacacaaaacactatatccaaaaattgctcacagcagaacagtgtaaagyatctgttgtttcctctggtgattgtgtggctgactgggagctgcggctcattgtcactgcccagcatcaggagtgggtttggtaccacawattgctagcctgggaaaagatcaaatttcaaagcatagtttccactgaatgcctgttgcttttgcaccatcataaagttgaaaaattttaagttgaaccatcataagtcagggaccatcatctgtacataaagatccctaagactgatttttcttttttttttttcttttcttttctttttttctgagatggagtctcgctctgtcgctcaggctggagtgcagtggcgcgatctcggctcactgcaagctccgcctccygggttcatgccattctcctgcctcagcctcctgagtagctgggactatagtcacccgccaccatgcccagctaatttttttttgtatatttagtagagagggggtttcaccgtgttagccaggaaggtctcgatctcctgacctggtgatccacccacctcggcctcccaaagtgctgagattacaggtgtgagccaccgcgcctggcccaagactgatttttcttaaagatcagtgtctagaacaagtttctgatgagctgccatttccttttgacaatgagagtaacccagccactgagtatccctctttgccttgcctgctagggggctcaaaacaaaactttgtgttcagtctgagttatcttgtattatgttttaatggtttagttttatttttcagtgtttttcatataaactgcctccaatcttttctstaaaggagtagaggtataaacatacacatagaggactgagtgatggtaggaccttgggtgaggagagggaggattagaagaaaacaattctgaaagaaagaaggagsacaagagggtcagaggtgagaaggatagaaaggtaagtgttgaagaaaagaaagtggaaaagtcttagaatatttctagctggcaggagaagggagagggagctggcctcagggaaaggtgatcttcctaaacaggtcctccatttccctttgggtctgggtctargccggggccttgtctgaataggcttaaacatgaaagcgagcgttcttgagttctggtttctctctctgatgctggcccccacaggtttggcccttactacactgagccagtcattgccgggttggacccgaagacctttaagcccttcatttgctctctagacctcatcggctgccmcatggtgactgatgactttgtggtcagtggcacctgcgccgaacaaatgtacggaatgtgtgagtccctctgggagcccaacatggtacgttggtggcatggagaggggctgggctctgagttacccacccttggtcattaggaaaaaagtgtgtttatgtggcaggtaatggggagaatggtgcaggtgggagagaaagccacagctgctgctccttggaagggtatccagaaattccatctgccaggctggctggctggctccagaggagagcatcttctgttaggagaccacagttagatatttgccacagcagtaagaattccttacattgggtttacagggttctcgcatccattcactgagcaaacatttaactcagtgtagggttagaggcagctcaacaggttgtctgggttggcaacctggatccacccaccaccttagttattgttcttggagaagccagtttccctctctgcctccactaccttgactgtaaaatgaggataaaaaagtctgccttagaagtggtgctgaggaagccgggcgcggtggctcacgcctgtaatcccagcactttgggaggctgaggcaagcagatcacctgaggtttggagctcaggaccagcctgaccaacatggagaaaccccgtctctactaaaaaaaaagttaaattagccgggcatggtggtgcatgcctgtaatcccagctactcgggaggctgaggagaatcgcttgagcctgggaggcggaggttgcggtgaacaaagatcgtgccattgcactccagcctgggcaacaagagctaaactccgtctcaaaaaaaaaaaaaaaaaagtggtgctgaggaaaacaaatgagtatatgtgctgccgaagcgagcacaaaaacaagtgagaagagatgagatagtgcttgacggcgagggtcggctgtcgttattaagtgccagctcttccggccactggggaaagcaggtacagtctgctttcaagggcccactgcagtccagtgaagcaagacacatccaaatacctgttgaactgcagtttgttgggaagaggaggaaagaaagggtctgggggcaaaggtacaggaaggggcaggtatgctcagtgactggagagctgagcctggctggagtgtgggttaaacatggggagaaatgatgctggagactgagatgagacctcaaagggccttgaatgccatgccaaggagtttgaactctgtcctctgccataggaacctagggaatcaggtgcctttaggtggacgtgacaggctgttaccgcctgcaggaggcgctgaggtcctgagcaaagacagtggcagtggggaggcaggaaggcagctgtcaaggggacttagtcacttaaaacagaagcgaaggatgtagagacagaggatggctgggttctccagctaggctagccaagacagaatgtagaaggaacaggtttgggggaagtgggtttgtggttggacaggttgggttttgaggtacctgttaagatatccaggatcagagcccatcagacagctgctaaagcacactggagctaaayagggattcttctccctattttacagagaaactgaggctcagtgaagagagacatactatttgcccaatgtcacactgctgattagtaaaagaaattcagggcttgaagtctctttcactttcctttacataattctgcttccttccaaggaaggagctgagaggggcttcccacatcctgggaatcatcccttacttcagkcatgtcttggggccagagctgggaatcttgagcctagaaaaaagagagttaagggaccagaccaaatcagagccagaggctgtggtttgaaggggttccactctgttggcaggatccggatcacctgtttgaaaccatctcccaagccatgmtgaatgctgtggaccgggatgcagtgtcaggcatgggagtcattgtccacatcatgtgagtatgggctgggagaagtctagaagctctgcagacaccctgcctctctcccttctccacgagcatacaccccattttcccagccccctggtcaggtgtgagataagaaaggtgcttttggcagtcctgggtgagcaraagtccatgcctccctatggctggtaactggcagcctacccagcttcctctggcctcttgtcaggtgaggttctgtgaccccgtgctcacaagagacatttcttccttaacaatrtctccgaagtctcagggatccgtgttggggtgagccacaacaaagctactgcagatggattgaaattctaggtggctcgcatcctctctccagcccagatctgtgtgatgttctgagctctagagaccaatttccaagcctcagccaactccctaagtgccatcctccttgtccttttacttgtttggggccatcaccaggaacctgattggatagagtaggaggtatccttccaaccactttcctacattgcaggataagcatttggacccttttgggggatagcctgcttaattaccgtgaaatagtatttggccrggcgcgttggctcacgcctgtaatcccagcactttgggaggctgaggtgggcagatcacttgaggtcaggagtctgagaccagcctaacatggcgaaaccccgtttctactaaagatacataaaattagccagacgtggtgtcacgtgcctgtaatcccagctactagggaggctgaggaaggagaattgcttgaacctgggaggcagaggttgcagttagtcaagatcacgccattgcactccagcctgggcaacacagtgagactctgtctcaaaaaaaacaaaaacaaaaacaaaaaacccaaaaaacagaatttaccaccgamggtttttttttatgttctttggggtgaaacacaccacaccttctccttcctaagtggcttgttctctaggcttggaggagcttcttccccctttttttttttttttttttttgagatggagtctcattctgtcgcccaggctggagtgcaatggcactatctcagctcactgcaaacctctgcctcctgggttcaagtgattctcctgcctcagcctcctgagtagctgggattacaggcacgtgccaccatgcccagctaatttttgtatttttagtagagacggggtttcaccatgttggtcaggctggtcttgaactcctgacctcgtgatccgcctgcctcaggcctcccaaagtgctgggattgcaagcatgagccaccgcgcccggccaagctccttcccttcttttgagagctgtgaagtctggccctgaatcattttctgggaaagcctccctgaggtggttccacctgtggaaagtcggcccaggtctctgttcctatccctccttcctcaccacaggcggaggagatgagctagcaggaatgaactagagcaggatagttacacctagaggcagcgggcagctatttgttctgctcccttgccgcagggcttgagggcttggtgctgagggccaggagagctagtcacagtcacggtccagatgggtagagatgttttcttgtgattttctccctctgcagcgagaargacaaaatcaccaccaggacactgaaggcccgaatggactaaccctgttcccagagcccacttttttttytttttttgaaataaaatagcctgtctttcactcctgcttttgtctttgatgctttcctgcagatctctgccctagctgggcagctacagccagccactcaagtgtgtgtggcctggccctcggcttgctttctggctcgtgctctactccatcagtgcgtgccagtggggacaatccacatgtcacttgctgcatgctccctgtgtgctaggccccacacaagtgctttacacgatctagaatttattcatcataatgactcaaggtagttgagattatccttgtttggagaagaaggacagttaaataacttacccaagtctactttaataagtgataaagccaggacataaactcatgttccattgatgccagagcttagaatccttttcactcaaactctacgggaaaacccttacatcttttattgcttcaggtagaaatttggtcaagtacccataagtagtctagattagtgtttcttaacctggccagctcattagtcacctgtggaattcctaaaacacataccttgatcccaccccttgagattccaattggccttttaggggcctgggtacctgtcttttccagaattccccaagtgattccagcttgcaatctgcagtacatagatggcctaataagcaagtagaaagtttgcatagcagagtggttcccaaacgttagcccccatcacaatcacctggagggctcattaaaagtttgattcagtagatctgggttggaacctgagaatttacatttctgactcccaggtgctaatgacactgctggtccaagaccacactttgagaactactgggttttaagctaaatgcccagatgcagtagatgaggtgcacagaggtgacatgttcaaagttatgtcaggtgagtggctcctagccagagttcgttctacacagctggaggcgggggggcgggggggggttgtccattcttccatgtgcatggtagtaacagctaacaggcagattggctctggtgctgtggtgttttgtttgttttttccttaagagtctcattgttgctagggctggagtgctgtggtgcaatcatggctaactgcagcctcaacctcccaagctcaagtgatcctcctgcctcagcctcctgagtagctgggactacagacatgtgccatcacatccagctaattcttgttttgtagagacggggtctcactatgttacccagaccggtactgaacttctgggctcaagtgatcctcctgccttggcctccccaagtactgggcgtgagccaccaaacccagccagtggtgctgtgcttttaaccactgtttattaattgcatctgaaagcgggatgtcattgaccatattctttctccaaactcaagccatacattgatttagccgaagctgcctctaaagctaggaccaaaactttttaattctgggaagaaaaaaaaaaggttcatttcccaaggactcacacataacagatgtacacaaagctttttgagttttatttttttcctcaggttggagattcatcgtaacatgcatgcattttcaaacagtaacagggtctcaaactttttaaagcagacgttagacaagcacaggggattgaaaattcccatttaaaaaatggaaactgcagtgggatatggagaagtcacacacttggtggggtggtggtttgtcctgcttccccaaaaggtggatatgaacttaattcacattttttaatttcagtgatctgacctgatgctgggatgtgccgagcagtactgccccctcccccaagggtgttggctcccaccgcctctcacagtggctctgcgcaagggcaagaggctcctgtggaaacttctgccctgggatactggcacaagctgccaagggacagctgagtctccttttccccatggggcactcttcataagtggcacattctagaggagggagagggccacggtcactgacccctgcagatggctggtagattggggaacagttgtctgaatgggttttccctttcaggacctcctgcccgcatgactgccaggaagagatgaggctcctagacttggggggccacaggtttaaggccagagctctgagtgttgtttaaacgcactgtcccttctagcccccaacacctgagtaactcacatgctggggtgctgcagttttctctcccaccctgaattggtaaaaagacaactggggggtaggactggctactgcaaaaagtcctgggtctttggtccacctccccaaggtatgccctggcagaccatgaagacaggaaaggcagggcaggagtgtagcctcacgccctgagcgctaccagcaggcctgtttgaggccaaaagcacaggcaagagaaagagtcaagtagggagaggggataaagagctgcctgtggtgggaacttaagagactgccactgagaacagccacaggggccactcgtggcgcctgccacagaccagcaacccctgagctaaagaaggagaggtggagcactgcttcagtctgcgcccctcagctgtggcttcccggcatgccctgtgaccccaagccgcagggtacaggaaagaagtttgtgctgggggactcaaagacccagaggttaattaacaggaaccagggccaggggccttcatctagaggtcagtggagtctccagggcactcatcactgtggctgggagactacagtgtctcggctgcggacttgtggaagaagagggggaaggatgggagaaggggtgactggatgccagccaggaatcctggccttagccctatcctggcctcgcctaatcagccatgtcgttattcttacacctttcttcttgggagacccaacattattctgagatgccatgagactgtttagcttttcttcatggccccagggagtgaggctgagggcagtcacttcccctccaatgccctcgactgcccagtaaaagaatggcgggacccaaggaggaaagagtgggggcagacaacgcttgggggatcagtccactttctctacattcaaactgcagaccaaatagaataccatgacaaaaagaagagaaaggaaacttgtataaaccaagataaatagcttttaaacatttgaatgccaaaaattgggggccaaactcaaggttttgaagatagcacagcgaatgacctttaaaaaaaaaaattgaaaatccaccaaaccacagctcaaaatgttatgacccagtcaacaatactgtcagaaaaacaaaaagcatttgaaacagaatgctacctctcaaaatgtaaacaatatacaaaacacacaaacatacacacacacacacaaactcaatgttaaacaagttagatacctggtagtcgtctttaaccagtaagaatgtgttacactttccatacacattatggcaacatgatcagcagaccaaatgcagagaagccggtaggaacccgaggccacggaggctgctggaagacagctttccaagcttcagagatgctgcgcctgacgaggagcagatccaaacttccattcttcattatgacgtggggaaatcaagtccaaacattattcctacataatccctttcccaagtcaaatttgttttctccatgagccagttggtttcaagttccctaagtcatgtagtggtcttgcggcagttgttcagacctacctatggccccttcctggggccaaggcagtggtttgacccccatctgcctcttccagaaggtttcccatccaatccagcagccccagtgaagtccaagaatgccgtctccattctttcctgacctatatgctgtgagtcaggcacagagacagtgctggttcctgcttcggaagctgggcttggccaggtttggagggagccacaggaaaccaatctattcattcaaaatggtttcacaagcgatcttcacatctttggggttatctacaagtctgaccatatctcatcccaaatccccagttcctggttgagggggtgagaagatgcaggaatgtacctcccccaatgcagaacaacagagctgtttctctcctggccagagcagcctgtggctcagttctgagggcctgggtggcaggctccgaaggcaggtggaacacctgcaggaagccactccttccaaaaaagcctgtgggctgcagatctgctaaaagtctagagcggggcaacaaggaaaaacagccccaaggctgaggccaggtcaaaacccacatcaagcctccaaactggatttcctggatcacatcctcatgtaactaggaagccacctcacgtttggacaccacactctaagatgggggcaccttgctggctgtaactctccaggcacagggagacagatctcctacaaggtcatcccggagcttaacgaggtgtctctgctaaaaagcactccaggcgcttggagatctgcccagagctaagagttcggctagaagtaagagtgcctgggaggaggtcagaaggaagaaggaaatagatcgagggcacagggcctcatttgatacatcagtttctgaagttttcccaaagggaaataaccatttaaacatgagggtcctgataaatccaaaggtactctagttcctcttgacctagtgggaggcaggctttacagagaggacttctgaactccaggggctaagacagcctggggcttgggtgatcatcacagggttctctgagaaccaggtgtccaagagcccagccgctttcctgcccctcaccatcccatgaggatgaacttattcccctctgagatctctgattctgatctgagatctctggtgttgacctggtgtattccagacaggatggaggaataatgcaacagttttcacttgaatccaagggaaaggtggaggaagttgtgcacaatactccataaattacaaagttaatccagacaagagcaaatgcagcagggcgaggtgtctgacctctccaatctggcatccatagcacttggttctggaaggacccttgtgctgggtctaccgggtatctctttaattgaagggaactgagagctcagcaaagatggggagggtgggtaggctgatgaaatatgattataaatagcaaacctggagcaatgaaatttcagaaacaaaacccaaataaacccacgaagtcatctctagccccaaggtatcttaaaaggttacaaggtaccaaaaagggaacccctttttaacctgggtgtcaaatggggagaaaaaatcaagggtaagcagaaggtggggttacatcctgtgagcaggtgcacacacagcacatccccctcctcttcagctaaagtctctttcggtgtcacaggctgcagtctcattgctaaagccctcccaaacccgactctgctcccaccctcccatctagcccaaatacacccttctccctaactcccgatccccgaccccatatccagctctctggctctggctgaaggtagaagagaactacgtcaggatgttggacataaactcgttgaagcgtttggagtactgctcagggttcacagtcgagatctcggcccctgcctgtaatacacaagaggctgattcaggttgagttcctgtgccccaatcaggaggctgcacatggggggagccagggtattcagaagcctcttactcagtatcagagctgaataccacccccaaccccaccaagactgagcagaccacctcaggaagtggcatacaagtcctgaactgtcctggccccactcctgtgatttataaccccaggcctgcaccgaagtagaagaaaggcagtggggaggtggcaacgcggctctggatctctgtgggggccactacatggagaacagggcttcaggcccacagggaaacaggcctgtggggagcagtatgggcatggaaacaaagctattactcgcccttcaacaagatgcacaacaggcccagcaggccctggggaaagacactggcaggcttggccccgagggctggagaactgggggataaacaaattg

SEQ ID NO: 97957 - DNA, 36923 bp, Homo sapiens
ctactcaggaggctgaggcaggagaatggcgtgaacccaggccactgcactccagtctgggcgacagagcaagactccctctcaaaaaaataaaataaaataaaataagatgaaaaagaattgcttattgcttaaatggaaggggcatatgtcacattctgggtggtgtacttcagctttacatctttttttttttttttttttgagagagggtctcgctctgtcacccaggctgcagtgtagtagcatgaccacggctcactgcagcctgaaactcatgggctcaagtaatcctcctgcctcagcctccccagcaactgggactacaggcatatgccactacacctggctaattttttttttttttaacataagtagagaggaggtcttgctttgttgctcaggctggtctccaactcttgggctcaagtgattctcccacctcagcctctgaaagtgctgggactacaagtgtgagcaccgtgcccagcttcacatcttgtgtctgtttgtcccaagtgtgggatgggtactgcaggcatttgcaatttgactggagatagacaaaaacactgaatcacagaattaaaaaaattattccctttcctatcctcagtaacttaagaaaaaagtcgtttaaaaaattttttttaaagagatggactctcactctgtcacccaagctgaactacagtggcacaatcacggctcactgtagcttccaactcctgggctcaagtgatcctcctgcctcaaccttccaagtagctgggattataggtatgtgccaccatgcccagcactgtacactctttgaataaaagagagggagattggctaggcgtggtggctcacacctgtaatccttgcactttggatttagaagatttagaagtgttagagagctggcaccaaataagaattcctcctgtcaggcacagtggtggctccagcctgtaatcccagctcctctggaggctgaagtgggagcatcacttgagtctaggaatcgagatcagcttaaccaatatatttagaccctgaccaacatattgagacccatttcaagaaaaataaaatgtatctagttagtgtttaataatgtcatatttaggccgggcgcggtggctcacgcctgtaatcccagcacttttggaggccgaggcgggcggatcatgaggtcaggagattgagaccatcttggccaacatggtgaaaccccatctctactaaaaaatataaaaaattagccgggtgtggtggcacgtgcctgtaatcccagctacttgggaggctgaggcaggggaatcgcttgaacctgggaggtagaggttgcagtgagctgagatcgtgccactgcactccagcctggggacagagcaagaccccatctcaaaaaaaaaaaaaaaagtcatttttagtttccattctatttatggcaagtaatactgattctctttaatagctttattgatataatttacatgccgtgcaattcagccaacaaaagcctacaattcaatcatttttagtatattcacaaagttgttcacccatcgatacaatcaattttagcacaatttcatcacaccaaactgaaactccatacccattggcagtcaacttcctatttcctcccaacctacccatctctaggcaaccactaatctactttctgtctctattgatttgcctattatagaaatttcctataaatggaatgatacatgtggtcttttgtgactggcttttttcacttagcatactgttttcaaagtctatctatgttgtagctcttaacagtacttcttttttatttttttttggagatggagtctcactctgtcacccaggctggagtgctgtggtgcaatcttggctcactgcaacctccgcccccctgttcaagcgattctcctgcctcagcctcccaagtagctgggactacaggcatgtgccaccacgcccagctaattttttgtatttttagttgaaatggagtttcactgtgttagccaggatggtctcgatctcctgacctcgtgatctgcccgcctcagcctcccaaagtgcttggattacaggcatgagccaccatgtgtagccagtacttctttttttatggccaaataatattccactgtgtggatataccatactttatctattcatcatcatcaggtaatggatatgttttgattctctgccctactttatttttgagacagagtctcactctgttgcccaggttggagtgcagtagtacaatcttggcttactgcagcctccaaatcctgggttctcagcctcctgaatagttgggattacagatgtgcaccaccacacccagctaattttttacttttagtaatttttgtatttttagggttttgcaatgttggccaggctggtctccaactcttggcctcaaatgatctggccatcttggcctctcaaagtcctgggattacaggcatgaaacaccatgcccagcctcccccatgttttaactggtatgaataacggctactatgaacattcacgtacaagattttggccaggtgtggtggctcacacctataatcccagcactttgggaagccgaggtgggcagatcacttgaggtcaggagttggagaccagcctggccaacatggtgaaacctcctctctactaaaaatacaaaaaaattaaccgggtgtggtggtgtgcgcctgtaatcccagctacttgggaggctgaggcacgataatcgcttgaaccaggggggtgaaggttgcagtgagccaagagcacagcactgtactccagcctggaagacagagcaagactctgtctcaaaacaaaacaaaataaaaagccattcatgggcaatattttgtattgatgtatgctttcatttctcttgggagtatatacccaggagtagaaatgctgggttatatggtaactaagtttaaccttttgaggaactgccagactctttcccaaagcattgcttttctttccttttttcttccttttatttttttgtcagacagtgtcttattgtgttgcccaggctggtctcaaactcctgggctcaagcagtcctcctacctcagcctcccaaagtgctgggattacaggcatgagccactgtgctctgcttgcttttctttatttaattaaattaattaattaattaagtttgaggtggagtctggctctgtcacccaggctggagtacagtggtgcaatctcagctcactgcaacctctgcctcctgggttcaaacgattctcctgcctatcctcctaagtacctgggattacaggcgtgcactgctacgcccagctaatttttttgtatttttagtagagacggggtttcgccatgttggccagactggtcttggattcctgacctcaggtgatccacctgtcttggcctctcaaagtgctgggattacaggcgtgagccactgcgcccggccctcttttattttttgaaacagggtctcgctctgttgcccaggctggagtgcagtggtatgatcttggatcactgcaacctctgcctcctgggctcaggcagtctctcacctcagcctcctgagtagctgggactacaggcacatgccactatgtcctgctaatttttgtattttttgagaaacagggttctaccacgttacccaggctggtctccaactcctgggctcaagtgatccacctgcctcggcctcccaaagtgctgggactacagcagtgagcctgcttttcttttaagtaaactttattcaaatacatttaagtaaatatttaataggtattttgtttgtttcttttctttttttttttttctgagacagagttttgctcttgttgcccaggctggagtgcaatggcgctatcttggctcaccacaacctctgcctcctgggttcaagtgattctcctgcctcagcctccagagtagctgggattacaggcatgtgccaccacgcccggctaattttgtatttttagtagagacggggtttctctatgttggtcaggctggtctcaaactcccaacctcagatgatctgcccgcctcagcctcccaaaagtgctgggattacacgcgtgagccaccgagcccagcctgtttctttctttctttctgttttttttgagacaaagtctcactcttgtcgcccaggctatagtgcagtggtgccatcttggctcacagcaacctccacctcctagggtcaagtgattctcttgtgtcagcctcccaagtagctgggattacaggcacccgccaccacgcccggctaatttttgtatttttagtaggatggggtttttccatgttggccaggctggtctcaaactcccaacatcaggtgatccacccacctgcctcggcctcccaaagtgctgggattacaggagtgagccaccgcgcccgggcaataagtatttttaaaaagccataagaactaataagtgaatttagcaagcctgtaaaatagaaggttactatacaaaagcacgttcttatctattagtagcaaacaattggaaaattaaaatttttaaattttatttaaaatagcatcacaggccgggtgcctgtaatccttgcattttgggaggccaaggtaggcggatcacctgaggtcaggggttccagaccagcctggccaacacggtgaaatcccatctttactacaaacacaaaaatcagtaggtcgtggtggcgtatgcctgtaatcccagctactcgggaggctgaggcaggagaatcgcttgaacccaggaggcggaggttgcagtgagctggtattgcgccactgtactccagcctgggcaacagagtgagattccgtctcgaaataaataaataaataaataaataaataaataaataaataaataaataaataaaatagcatcacaaaaaatacaacatttagaataaatttaacaaaagatgtgcaaaacttctattctgaaaattacaaaacaggtcgggcgcagtggctcacacctgtaatcccagcactttaggaggccgaggtaggaggattgcttgagtccaggagtttgagacaagcctgggtaagatggcaaaaccctgttgctacaaaaataaaaatagccaggcgcggtggcttatgtctgtaatcccaacactttgggaggctgaggcggggagatcacttgaggtcgaaattcgagacaagcctgagcaacatggtgaaaccctgtctctacaaaaaatacaaaaattagccgggcgggtggcgggcgcctgtaatcccagcgacttgggaggctgaggcaggagaattgctgtccgggaggcggaggttgcagtcagcttcgaccgcagcctgggagagcaaaactccttctcaaaaaacaaaaacaaagggagaagaagaaaaagaaaaagaaaaaagaaaaacatgccaaaaacacatagtaactgaagggaaaggaatctgccagcttcccactatgggaaaatctgccactgtggaagctggcagattttaaaagtttggcaaacggaagctgatggaatttcgatttgatggtttctatttagcttcgtaaaataggcctggcataaggggatttgctgtgagtcaaggtctgaggaaagcgccagtttgcaaagccgttttggaaaactggagcgtgggggtgtgtgcagggtgaggggaggaggcctagtctggtccaccttaggtctagcagagactacgtggagctttgagccgaatgccctggtgagctgccatggcaacacagccgtgggcacaggcccacggcaacccatcactgaacagagttgtggcgtttcaacagagagtctgggacatcaggcaacgtggcgacccgaagcagccaaaatgagacctcgacagcaaaggcctcgacagcggagcccggacctttgcaaaatctgcaagtaacgccaacgtcacaaagcgcgaccgagccctgtacgtcatcgttccgcgacgccgacgcggtgagatgacgccctcccggaagtgacctctagagcggtggtgaaactggcagttgacggctcctgggactagatcccgcgaggtagcccccgaactatttctctacgttttctcttgatcctcccgaaatcttccagatccgcgtagtgaggaatcgtctccaccgtcatggggggcggagacctggtgagtggagggaggcctgggcgggggaggactgaggccgggacggaaattggcagggggtgggggtagaggaaggagtggataaccatggcaacgcagctttgctttcgccgggaggaggccgttgccctgaagaggggatggatccttagggcaatggaggggtgggactgagatttgggaaagtccgaggtgtgtcgcgaacagtgacaggtggtgtttgcgtgtttgttgactgcggctctaccggctgtaaattctgggaagaccggggagggggcggatggagccatggctaggaaaggaggtagatatggaggacgtgtcaccacactttgttttgtatatcttgtcttgccacacacctctcttccttgggtgagagttcagagtcatgtcctggactgaagtaggggtggtttgtgccccattctccctaccctaagccatgccctggggtcgttttttattttttatttttttgagacggagtttcttgttgcccaggctggagtgccatggcgcgatctcggctgaccgcaacctttccctcctgggttcaagcgattctcctgcctcagcctcccgagtagctgggattacaggcatgcgccaccacacccggctaattttgtatttttagtagagacagsgtttctccatgttggtcaggctggtctcgatctgccgacctcaagtgatccgcccgcctcggcctcccagagtgctaggattacaagggttagccacagcgcccggccctggggtcctttttaagcctgaagggatcttcctgtccatctttctgacttccacacctccttcagtgctggattctgatstgtagtggcagagcttgcttttgaattcataccacttaatataagttatgtggcaatgtctcttaaactgaaacgttcatttgtaaagcgctaaggccccaaatagggtaaatgtacccacaagagcatggggcaaggttgggaaaatgctagcctccggaaagtggagctaattgaaccagcaagtagatcagcttagccgcctgcccagtaaacctattagtttgtcatgtgttctcaatcacagtgagtgccaggactccatctagtttcatccaatttagtgtattcttcacataactgcatttaaggacaggaaagctctaatccagggtttctcaacattagcgctcttgacagtttggcctagataattctttgggggtgtgtggtagtggtggtagttgggctgtcctgtgcattgtagaatgtttagcagcatcactggcctctagccactagactggagctatccactaacacccgtctccaccagttgtgacagccaaaaatgactccagaagattttctccctggggagcaaaatartctatgcttgaggcagggaggacaagatgggaagggttagagggagaaagagggagggagtgagggaggaaggacggaaggatggacggatggtcagaccaactgacggactgacccacaaccaaccaactgaatgacctgacgaaggggagaggcaggacaaggaggggaagagaaaaggaagaaaagggagctctcattgaccgaacattttccacatgccaagtaccttgtggacatgatcttattttcttaattggtctcctggtcctctccagtccattctcttttctttttttttttttaagatggagtctcagccaggtgcagtggctcatgcctgtaatcccagcactttgggaggcagaggcgggtgggtcacgaggtcaggatttgagaccagcttggccaagatggtgaaaccccgtctctactaaaaatacaaaaattagctgggagcagtggcgggcgcctgtaatcccagctacttgggaggctgaggcaggagaatcgcttgaacccaggaggtggaggttgcagtgagccaagattgcaccactgcactctagcctgcgtgacagagcaagacctcgtctcaaaaaaaaaaaaaaaaaagttaaaaaaaaagttggagtcaggctgggygtggtggctcacacctgtaatcctagcactttgggaggccaaggcgggcagatcatgaggtcaggagatcgagaccatcatggctaacacggtgaaacccgtctctactaaaaatacaaaaaaaattagctgggcatggtggcggatgtctgtagtcccagctactcaggaggctgaggcaggagaatggcgtgaacctggaaggtggagcttgcagtgagccaagattgcgccactgcactccagcctgggcgacatctcaaaaaaaaaaaaaaaaaattggccaggcgtggcggcgcatgcctgtaatccctttacatggcttataaggcccttattctgctcctttctcacttggcttcttcttgcgtccctgcaccatcagcttgccacatctccagccacactgaattattgctatgttctttctcaccaccaggactgcacttgtctgtactgttcccctctgtttggaaatctacccccctcatctccccttcacacatcaccaggctagtttacaattgtctttagatattacttactttggggaacatttcattattgggaaagtgaaccaaagcagtatctgatggggaggagagagagaagtgttctttgagggtgaatggggagatcagaaccaaggagagattcctgggaaggaaagttgaaagagattctgggtgggttgtaaaccatgcaagtttagggcaggtgaagtagaccaagctaaggtaggttgagttccaaagaatgaatgtccatgccaggcacggtagctcatgcctgtaatcccagcactttgagaggccaaggcaggcggatcacctgaggtcgagagtttgagaccagcctgaccaacatagagaaaccccatctctactaaaaatacaaaattagccgagtgtggtggcgcatgcctgtaatcccagctactcaggaggctgaggcaggagaatcatttgaacccaggaggcagagtttgccgtgacccgagatcctgccattgtactccagcctaggcaagaagagtgaaactccgtctcaagaaacaaaaaaggctgggcacggtggctcacccctgtaatcccagcagtttgggaggccactgcgggcagatcatgaggtcaggcgtttgagaccagcctggccaatgtggtgaaaccccatctctactaaaaaatacaaaaattagccaggcatggtggcacgtgcctatagtccagctactcaggaggctgaggcaggagaattgctggcacccgggaggcggagggtgcagtcagccgagatagctgcactccagcctgggtgacagagtaagactttaaaaaaaaaaaaaaaagaatgaatgtccactgtcagaagtgcatgagttctgttctctttcaaaatatgtgccttcctgctcattactgcattcctcctgtcttgtcatcaccaactctgatttaggtatggctagtggaaggatgacttgtatgcttttaaggttaaaactgtttgaagggaattcaggaaggacycgttctatcctgaagctttcttgttcttgttcttgttgttttgagacggagtcttgctctgtcgcccaggctgtagtgcagcagcgcagtttcggctcaccgcaacctccgcctcttggttcaagcgattctcctgcctcagcctgctgaatagccgggactacaggcgcacctgccaccacgcccagctaatttttgtattttcagtagaggcgtttcatcatgttggccaggctggtctaaaactcctgacctcaagtgatcttcccgcctccgcctcccaaagtgctgggattacaggtgtgagccactgcgcccgacctgtcctgaagctttatacacttgaacaagctccccttcccctctagatgtgtgagagattattggaagaaaaccttgccattgttgaagacatcttgccctcacacgcctgccttgggtrtggaagggtgggtgaggcagggctagttatacccaccactcagtcaccccccgaattatcatcaccttctttttatttaccacagaatctgaagaagagctggcacccgcagaccctcaggaatgtggagaaagtgtggaaggccgagcagaagcatgaggctgagcggaagaagattgaggagcttcagcgggagctgcgagaagagagagccmgggaagagatgcagcgctatgcggaggatgttggggccgtcaagtaagtgaggagctgggggtgcgcttgtgtgtagggaattgcagagctgtcctgagatgcatcatccagtgttgtataatggctgagtgcttaagggcatgggttktaatgccagactcacctggattctaaggttggctttgcatgtactagctgtggaactgtgatcaaatttgagagacttggttacttcagtaggascagggagtaataatacccaacgccttcttaaggtttgttgagaatcaaatgagataacacgtaaggacttgctgtaagccgagctcacagtagatggctgataaccgtgatggaggatggttgctctaccctgcttctcagcatatgttgaggatgcagtcctgcctttgttaatgtatttcaggcttgcttgggtcggcggggacagggggcagggagtgagstcccatgagagaaggtggatggtatgcttgtcaataaaagctgagtgattacggccaatgccactagattttaccctgcttcaatttcctgttgtataatataggatacgagtagcagataataactaccccatccatctcataaaaggagatgggagtaaatatgtttgagaaaataaaaagcatacaatatgcagtgtattcttaagtcagaataaaataaaataacagatagactaaaactggggactaggtgcggtggttcatgcctgtaattgctgtattttgggaggctgagaaatcacttgagcccaggagtttgagaccagtctgggtaatgtagtgaggctccatctctgtttaaaaatatataggctgagtgtggcggcttatgcctataatcccagcactttgggagactgaggcaggcagatcacttgaggccaggagttctagaccagtctgtagtaggaacccatctctacaaaacaatagaaaaaaattagccaggcacgatggcttacgcctgtaatcccagcactttggaaggccgaggcgggcagatcacttgaggtcaggagttcgagaccagcctgaccaacatggtaaaaccctgtctctattaaaatacaaaaattagctgggtgtggcggtaatcccagctactcaggaggccgaggcaggagaattgcttgaacccgggaggcagaagtttcagtgagctgagatcatgccactgcactccagcctgggcgacagattgagactccatctcaaaaaaacgaacaaacaaaaaaaaaatagaggctgggtgcagtggctcacrcctgtaatctagcactttgggaggccgaggtgggcggatcacctgacgtcaggatttcgagaccagcctggccaacacggtgaaaccccatctctactaaaaaaaaaaaaaaaaaattaactgggcgtggtagcatgcatttgtagtcctagctactcgggaagctaaggmaggagaatcgcttgaacccagaaggtggaggttgcagtgagctgagattgcgccagtgtactccagcctggcgacagagcgagactccgtctcaaaaaaaaaaaaccaaaaattagccaggcatggtggcacatgcctgtaatcccagctactcgggaggctgaggcaggagaatcacttgaactcaggagttggaagttttagtgagctgagatcacgccattgcactccagcctgggtgacagagtaagacttcgtctcaaaaaaaaaaaaagaaagaaaggaaaagttagctgggcatggtggcatgtgcctgtagtcccagctacttgggaggctgaggtaggaggattgcttgagcccaggagttcgaggctrcagtgagctatgattttgccactgacttcggcctgggtgacagagtgagactctgcctctaagtaaataaataaataaataaatawgtaaaaattgattttagactgaatacccattagtcataagccgaggtactatccaaaggtaaaaattgttttgacatttttattcaccaaagcattacacatcatgtgctcaatttatcagaaatttgggcttttgtggagtctgattaatgaggtcagagtacagatgcacaactgtagagaaaggagccagcattgttgcagactcatgcctgcttgtctgtcgtgaatgggggaaggtgattttatatgctttgttttgttttgccctatcacatgtcctacaatattgtaaaacactaagatcagcatttggttctctctgccccttctctttttggtctttactgctaatgtatttagatgacttaagtattcatctgtttgttttgtatagttcttttttttttttttttttttttttttgagatggagtctcgctctgttgtccaggctggagtgcagcacgatctcggctcactgcaagctccgcctcccgggttcatgccattctcctgcctcagcctcctgagtagctgggactacaggcgcccgccaccacgcccggctaattttttgtatttttagtagagacggggtttcactgtgttagccaggatggtgtcgatctttgacctcatgatccgcccgcctcggcctcccaaagtgttgggattacagatgtgagccacagygcccggctggttttatttttgttatttattttattttattttttgagatggagtctcattctgtcgcccgggctggagtgcagtggtgcgatcttggctcactgcaacatctgcctcctgggttcaagcgggtctcttgccttagcctcctgagtagctgggattacaggcgcacatcaccacgcctggctaattttagtattttaagtagagatggggtttcaccatgttggtcaggctagtcttgaactcctgaccttgtgatctgcccgcttcagcctcccaaagtgctaggattacaggcgtgagccactgcacccggcctattatttattattattattattattttttgagtcagagtcttgctctgtctcccaggctggagtgcagtggcacaatctccgctcactgcagcctccacctcccaggttcaagcaattctcctgcttcagtctgctgagtagctgggattacaggcgtgtgccaccacgcctggctaattattattattattattgttattatttttgtgtgacagagtctcgctctgtcaccaggcttgagtgcagtggtgcgatctcggctcactgtaacctccgcctcttgagttcaagcgattctcctgcttcagcctcccgagtagctgggactacagatgcacgccaccaggtccagctaatttttgtatttttagtagagacagggtttcaccatgttggcctggatggccttggtctcttgaccttgtgatccgcccatctttgcctcccaaagtgctgggattacaggcgtgagttacygtgcctggcctaatttttttgtatatttagtagagatggcatttcaccatgttggccaggctggtcttgaattcctgacctcaagtgatctgcccgcctaggcctcccaaagtgctgggattacaggtgtgagccacagcgcccggccccatgatcaattcttatttttttttttttgagaccgagtctcgcactgtcacctgcgttggagtacaatggcatgatctcagcacattgcaacctccacttctcgggttcaagcgattctcctccctcagcctcccgagtagctgggactacaggcgtgtaccaccacgcctggctagttttttgtatttttagtagagacggggtttcactgtgttggccaggctggtcttgatctcctgacctcgtgatcagcctgtcttggcctcccaaagttctaggattataagtgtgagccaccgtgcccagctgatcagttcttaactgtagactacagtgtttctcagactcatttttttaatatgaaaaaaattctaaagggtcttggggccaggcacggttgctcacgcctgtaatcccagcactttgggaggccaaggctggcagatcacggggtcaggagatcgaccagcctggccaacacggtgaaacctcgtctttactaaaagtacaaaaaattagccagtcttggtgacacatgcctatagtcccagctattcgggaggctgaggcaggagaataacttgaacctgggaggcagaggttgccgtgagccaagatcgctccactgcactccagcctgggcaacagagtgaaactctgtctgggggaaaaaaaaaagggtcatggccctgcagtgttggtttaaattattcttaccaaaaatgtccaagcatgcaactaggaaaacattctttatgctcacagttgttatataacctcaaaaacaagtatacacatttaaaaagtcatattcaggttgggcatggtggctcacccttgtaatcccagcactttgggaggctgaggcaggaggatcacttgaggccagtagtttgagactagcctgggcaacatagcaagtcccatctgtttaaaaattgaaaaaataaaaaatcagcaaggcatggtggtgcatccctgtagtcccagctacttgggaggctgaggcaggatttgttgagcccaggaattcaaggctgcagtgagccatgatcgcaccattgcattccagcctgggtgacagagtgagaccctgtgtctaaaagaaaaaaaagaacaaaaaagtcatattcaaaaagcatttaatttcaggttatagataatactgtcaatgaaagtactttcctggttgcagtgtgaatgtagtattggctgcttccacgcatgctcttatgaatttagcctgcctttactgtctgtggtatgagggttccactttctcaccacttttttctcccagaaccgcagggaaatgtttgtgtggcatgatgctgtgacttaatttggcccctagatggctgagaccagggtttattcacttgtgaaacccagatagttacctaatgattcacgtattcagtgtttggctcttttggcttgaaagcgtcacttattcagttacctctgattttttcccatcatcccctcaaatgtgtagtgttaccgctggtgtctgtgtgcccacaagcaccaagatgcacaatcaatgcaactgcgtatgtggtcactgaaattgttcttgatggtaagatggtgatgtagaatgtgcttattcattgttttaggtcatcttggaaatgaaagcataatataaagactctgtaaaggagactcgagaagctctgagccaagatccacaccccatgttgaggaacactggttttccttataaattgctttatgtgagtgaatattctctctccattcactcgtaagcctcatgaggacaagcaccatttatttatttatttatttgagacaaggtctggctccgtcacccaggctggagtgcagtggcgtgatcttactgcaacctctgcctcccaggttcaagtgattttcctgcctcacccttctgagtaggtgggattacwggcgtccgccaccacgcctggctaatgttttgtatttttagtagagatggggtttcatcatgttggccaggctggtctcgaactcctgacctcaagtgatccacccgcttcggactcccaaaatggtgggattacaggcatgagccactgcacgcaacccgcactatttctttatgccggccacatggggtgccgtgtttattgcatggtaggtgccagtagaatgaactctgattagctgtggttctctctcccttgtgtccaggttttaggtgtaggtttgcagaagtctgctttttaaagaaattgtatttctttttcttcccttgaaccaggaaaaaagaagaaaagttggactggatgtaccagggtcctggtgggatggtgaaccgtgacgagtacctgctggggcgccccattgacaaatatgtttttgagaagatggaggagaaggaggcaggctgctcttctgaaacaggacttctcccaggctctatctttgccccatcaggtgccaattcccttcttgacatggccagcaagatccgggaggacccactcttcatcatcaggtactaatggggggctaggaagggggtttgttacagatgctttgagaccctgctaaggccattgattctcttgctttacagttttctcttcgcttttttttttttttttttttttttgagacggagtctcgctctgtcgcccaggctgaagtgcagtggcgcgatctctgctcactacaagctctgtctgccgggttcacgccatcctcctgcctcagcctcccgagtagctgggattacaggcacccaccaccacgcctggctaatttttgttgtattttttagcagagacagggtttcactatgttagccaggatggtctcgatctcctgaccaccttgtgatccgcccgcctcggcctcccaaagtgctgggattacaggcgtgagccaccacgcccagcctattttcttgataatattaatgagaccctgggtgcctgtagtcccagctatttgggaggctgaggcaggagaatggcgtgaactgaggtggtgcttgcagtgagccgagatcacgccactgcattccagcctgggcgacagagcgagactccgtctcaaaaaaaaataaaaataaaaaataaaaataaataaataaataaatacagtcaaagtgttgtgcaaccatcaccacagcctgtctccagaactctttcaccattctgaattgaaactctataaccatcaaaaaacaactcacggctggaagcagtggctcacgcctgtaatcccagcacttcaggaggccgaggcgggcggatcacgaggtcaggagatcgagaccatcctggctaacacggtgaaaccccgtctctactaaaaatacaaaaaattagccaggcgtggtggcaggcgcctatagtcccagctactcaggaggctgaggcaggagaatggcatgaacccgggaggaggagtttgcagtgacctgagatcgcgccactgcactctagcctggacgaaagagcgagactccgtctcgaaaaaacaacaacaacaacaaaaaaaacaactgacagccgggtacggtggatcacacctgtaatcccagcactttgggaggcagagatggatggattgcttgagcccaggaaattgagaccagcctgagcaacatggtgaaaccccatctctataagaaatataaaaattagctaggcatggtggtgggggcctatagtcccagccacttgggaagctgatgtgggagtatcacttgagcccaggtggtcaaggctgcagtgagccatgatcatgccactgcactgcagcctggacgactgagcatgactcttttttttttttttttttgagacaatctcttatatttgtgagagatttttggctttgacaccatcatgtcgttttttatttatttattttttttgagacagggtctcactccgtcacccagactggagtgcagtggcacaatctcagctcactgcaacctccgcctcctgggtttaagttattctcccacgtcagcctcccgagtagctaggactgcaggtgcgtgctgctaccatgcccggctaatttttttgttttgttttttttggtagagaygaggtttcaccatgttggccaggctggtcttgaacttctgacctcaagtgatccgcctgccccagcctcccaaagtgctgggattacaggtgtgagatgagccactgcacccagccccatcatcatgtagattttttttttttggagacagagtcttgctgtgtcacccaggctggagtgcagtggcacgatctcagctcactgcaatctccgcctcccaggttcaagcgattctcctccctcaagtagctgggagcgattctcctcctcccaagtagctgggattacaggtgcacaccaccacacccagctaatcatgtagattttaacatgggccagtttgtctgtatatgtttggagaaaaggttactccatagaatttggagaaaagaaatagtcatgaattttgtaattatctctctttaggaagaaggaggaggagaaaaaacgagaggtattaaataatccagtgaaaatgaagaaaatcaaagaattggtaagtagtataccagataagcaccaagagcatcttttagccatataacgtgagaacgtctctccatttactctcagcttaccaggggaaaaacagaatggcctctaaaacttttgtcttttagagaccatgttgtggctattttatgtaatcatttttttgtttttgagacggagtttcaatcttgttgcccaggctggagtgcaatggcatgatctcagctcaccgcaacctccgcctcccaggttcaagttattctcctgcctcagcctccctagtagctgggattacagggatgtgccaccacgcccggctaattttgtatttttagtagagacggggtttattcatattggtcaggttggttattttatgtaatcttagtttattaagcttaattaagcttgattttggttgaaagtcttttgggtgggagaatgcaccatgtgatgtcgtttttccagaagaagagtgtgggctaagcctgtggaaagcattaccatgcagtgtgttcaggaggttggagtatgcccttggtcgtggtataaagcttctaggggctgggcgcggtggctcatgcctgtaattccagcattttgggaggccgaggcgggtggatcacctgaggttgggagtttgagaccagcctgaccaacacggagaaaccctgtctctactaaaaattcaaaattagccggggtggtggttcatgcctgtaatcccagctacttgggaggatgaggcaggagacttgcttgaacccgggagatggagtttgctgtgagccaagattgcgccattgcactccagcctgggcaacaagagcgaaactctgtctcaaaaaaaaaaaaataaggcttctagggcccacttaccrttcacatgacatattatgtaattgtgtcttggatcagttggtaaggaaagttaaagattgaccttatagttcctgactgctttcagtggaattggagttcctgtgacacagaatggaaactcctaggcagtggttttggtgactgtttaaaaacacaaattcttagtctcacctaccagataccagttcagtagttgggggtgttagtgcacggccagggttaagacccttcccctggtgtgttgacagggaacccctataatgtcctggacttctgtagacccagaggcatggagtcaggcagtttgtgcatgagccacgcccctcaaaggagactgataggggtctcagtaatctttttttttttttttttttttgagacggagtctcgctctgttgcccaaggtggagtgcagtggtgcagtgacacgatcttagctcactgcaaactccgcctcccaggttcatgccattctcctgcctcagcctcctgagtagctgggactacaggcgcctgctaccatgcccagctaattttttgtatttttagtagtgatggtgtttcaccgtgttagccaggatggtctccttctcctgaccttgtgatccacccgccttggcctcccaaagtgctgggattacaggtatgagccaccccgcctgggctttttgtttttttttaatgagatggagtctcactctgtcgcccaggctgctggagtgcagtggcgtgatctcagctcactgcaacctctgcctcctgggttcaagtgattcttctgcctcagcctcccgagtagctagaactacaggtacacaccaccacacccagctaatttttgtatttttagtagagatggtctttcaccatattggccagggtggtctcgaactcctgaccttgtgatcctcccacctcagcctctcaaagtgctgagagattacaggcgtgagccaccatgcccagccagtaatctttttttttttttttttttttgagacacagtttcactctgtcacccaggctgaagtgcagtggcacaatctcggcccactgcaacctctgcctcctggttcaggtgattcttgtacctcacctctcaagtagctggtattacaggtgcccaccaccacacccagctgatttttgtatttttagtagagatggggttttgccatgttggccaggctggtctcgaactccggacctcaagtgatgatctgctccactcagcctcccaaagtgctgggattacaggcatgagccactgcgctggctggtctcagtaatcttgtgtgcttgtgttctcggcattttccagttgcaaatgagtctggaaaaaaaggagaagaagaaaaagaaggagaagaaaaagaagcacaagaaacataagcacagaagctcgagtagtgatcgttccagcagcgaggatgagcacagtgcagggaggtgagcatgtggcgactggmctcccttctcgttgattcacttgctcattcactcattcattccacagacatgaacacctgccctgtgctggaagctgccaggtactgggcattcagtgatgaacacttgaacatgggcccagtgcccacagagcttgccatctaatgctagagttccttggagatgctaaatgtgagtgggtatcttggccatgctgctggagagagacccttaataatgctgactttagcctagtaggtcttaggtaggtcagacatcctgggggtgactctgtttcatctcagcttaggattccttcaagactgaagtgggctttatataggctttttttaatggactgatggctgatgtgggcccattttgcatgtcttcctgtggragcagtcagctccgccgctgctgagtcactatttgtccctggaatagcagcatgaagtgagaggagaaggtgttcaggcgttggggcttagaagcgaggcccacagtttttcacaggaaaatttgattgtgctgatgcatttttcggcatagacagtccaaatagagaaacgtactgccaggtaactgctgggaggcggaaaggtcacattggaggcaagaagcatagttcagcataagatatttaaattggacctatatatattttctttttcaatgagtgtgtgtattttgatctcttagatcacagaagaagatggcaaattcctcccctgttttgtccaaagtccctggatatggcttacaggtagggatgtgggcttcttgaaaggagtgactgtgggactgtgggatgtgccacttggacaatgtggatagcagggaggtgggcagtgaagcctgggctgctgggaaacaggcccattcttatcgctgagcaccttcttgtggctgatgaccctctgagcagagagactaaaccaccaatggggcattgagacattctacccatccctctacaaataatttacatgaaatgcacacattttaagtgtataggtttttttgtttttttttttttttgagacggagtctcgcttgtcacccaggctggagtgcagtggcgcgatctcggctcactgcaacctctgccttccgggttcaagctattctcctgctttagcctcccgagtagctgggattacaggcgcccaccaccacgcccgactaatttttgtatttttagtagagacagggtttcgtcatgttggccaggatggtctcgaactcctgacctcaggtgatccctccgcctcggcctcccaaagtgctgggattacaggtgtgagccaccgtgcctggcctaagtgtgtaggttgatgatttttgacaaacataaatctgctgggttctttttttttttttttgagtagcagtgcatcattattttgcctaggctggtctcgaactcctgagcttaagcaatcttctgagtagctggaagtacaagttcaaggcacctggcttgacttctgtatttctgtattttttttttttttttttgaggtggagttttgctcttgttgcccaggttagagtgcaatggcgcgatctcagctcaccacaacctcgacctcctgggttcaagcaattctcctgcctcagcctcccgagtagctgggattacaggcatgcaccaccatgcccggctaattttgtatttttagtagagacagggtttctccatgtcaaccaggctggagtgcaatggtgcaatctcagctcactgcaacctctgcctcctgggttcaagcgattctcctgcctcagcctcctgagtagctgggattacaggcacctgccatcacacctggctaatttttgtatttttartagagacagggtttctccatgttcgtcaggctggtctcaaactcctggcctcaagctatccgcctgtctcggcctcccaaagtgctgggattataggcgtgagccaccatgcctggcctcatatttctgtatttttaaccttgggtcctgtcctccatgcttctgcatctcgctcttccttaacctatagtgaagagctaagccaggtgtattcttttctttcttttttttttttgagagggagtctcgctctgtcgcccaggctggagtgcaatggtgcgatctcggctcactgcaacctctgcctcctgcattcaagtgattctcctgtctcagcctcttgagcagctgggactacgggcacccaccaccacacccggctaatttttgtatttttagtagagaggggtttgaccatattggccaggctggtctcgaactcccgaccttgtgatctgcccgtcttggcctcccaaagtgctgggattacaggcgtgagccactgcacccagccaagccaggtatattcttttcttttcttttctttttttttttttttttgagatggagtctcactctgtcgcctaggctggaatgcagtggcgccatctcggctcactgcaagctctgcctcctgggttcatgccattctcctgcctcagcttcccaagtagctgggactacaggtgcccaccatgcccagctaattattttgtatttttagtagagacagtgtttcaccatgttagctaggatggtcttgatctcctggcctcgtgatctgcctgcctcagcctcccaaagtgctgggattacaggcatgagccacagcacccagccatcttttttttttttttttttgagacagggtctttctctctcatccaagctggagtgcagtggtgtgatcctggctcactgctgtcttgacctcttaggctcaagggatccttctgcctcaacctcctgagtagctgggactacaggcgtgtgctgccacaccgagctaatttttaaatattttgtagagacaaggtctcactagttgctctgggtggtatcaaactcttgatctcaggcagtcctcctgcctccgtctcccaaagtgttgggattcaaggtgtgagcgactgcacctggctgaccgaaggagattcttttaggggattctgcagataactaagtttatacagttctctgtgataattctatgtgatgatattggtgtgctcagtgagctccttatgtaacatttcctgtttcactgccttttcttttttttttttttttttttgagacggagtctcgctctgtcawccaggctggagtgcartggtgcratctcagctcactgcaacctccacctcctgrgttcaagcrattctcctgcctcagcctyctgagtagctgggattacaggtgcccaccaccacgcccagctaattttttaattttcagtagagacagggtttcaccatgttggccaggctggtctcgaactcctgacctcaggtgatcccccccgcctcggcctcccaaagtgctgggattacaggcgtgagccactgagcccggccgcgttttctcctgaatagctggattttccatgygaataacttctcttttccttaatgaygtaggtcmggaactctgaccgtaaccagggtcttcagggtcctctgacagcagagcaaaagagagggcatgggatgaagaaccattccagatccagaagctcctcccactcacccccaagacatgccagcaagaagagcaccagggaagcagggtcccgggacaggaggtctcgatccctgggcagaaggtcacggtccccaagacccagcaaactgtgagtgtgggattcactgggaaataacctgtgactgtgggggcctggtcccagcaggcatttgtttttgcttttggtgatgtccgtccattgactttcccaaatgtctttgctttggtatttcctttacatcattttttttttccacctcaatgtaaagctcaggcatccaaagccacatatctgtaggtgtattctgtgctttgggagctctggggtgagtctaacatcaaaccctatacctttgtttttctcacacttagattatacctctaagaccattagctcatcttgcattgtttgagggattcagtgtaagcccctggacyaaaaaggctttttcctctytgccttctgtgtctgctacaggcacaactctaaggtgaacaggagagagacaggccaaactaggagcccatcacctaaaaaagaggtctaccaaaggcgacatgctcccggatacaccaggtgagtcaggagcccagttgattaaccacattttgcaggcctgaatctagaaggggctcaaaccatggcaaatggataatccatcattaccttttcgacgaaccaacttttatttatcttgccaacctgtaagggtctgcgtcccctgcctccagccatgtgaggacattgaaaggacgaggtaaggctgggcgtggtggctcacgcctgtaatcacagcagtttgggaggctgaggtgggtggatcacctgaggtcaggaggtcgagaccatcctaaccaacacggtgaaaccccatctctactaaaaatataaaattagttggtcatggtggcacatgcctgtaatcccagttatttgggaggctgagacaggagaactgcttgaacccaggggttggaggttacagtgagctgagatctcaccactgcacagcagcccaggcgacagtgcaagactttgtctcaaaaaaaaaaaaaagtctcttaacaaaaaccaagccagacacagcagtccatgcttgtaatctcagcgctttgggaggctaaggcagggaggatcacttaaggtcaagggattaaggttgcagtgagctacgatcaagccactgcattcttgcttgggcgacagagcgagaccctctcttaaattaaaccctctttaaaaaacccctcaattattctctctgggtgtggtggctcatacctgtaatcccagcagtttgagagtccaaggcaggaggatcgcttgaggccaggagttccagaccagtctgagcaacataataagacactatctctacaaaaaattattttaaaaacatttaaaaaaacaaaagctagtagttctttgccctgcctgatcccacttttagtcatgctacccaaaggcaactactttcagctttttcagtagtttcttttcatagctacatattcctaaaaatacaaatatgttgctgcctcttcatccattaattttagatattagatattktcttttttctttctttgttttttttggagacagcatcttgttgtatctcccaggctggagtgcagtgccacaatcttggctcactacaacctctgcctccggggttcaagtgattctcctgtcccagcctcccgagtagctgggactacaggcacatgttgtcacgcccagctaattttttttttttttttctgagatggagtttcattcttgttgcccaggctggagtgcaatggcccaatctcggctcaccacaacttccgcctcctgggcccaagtgattctcctgcctcagcctcctaggtagctgggattacaggcatgtgccaccacacccagctaatttttgtatttttagtagagacaggctttctccatgttggtcaggctggtctcgaactcccaacctcaggtgatctgcctgcctcggcctcccagagtgctgggattacaggcgtgagccaccacgcccgggcttccttttttttttttttttttttgtctcgctctgtcgcccaggctgcagcgcagtggcacgatctcggctcactgcaacctctgcctcccgggttccagcgattctcctgcctcagcctcccgagtagctgggactacaggcgcatgccaccatgcccagctaatttttgtatattttagtagagatggggtttcaccatattggtcaggctggtcttgaactcctgaggtcaggtgatctgcccgcctcagcctcccaaagtgttcggattacaggcatgagccacagcacctggccctaatttttgtatttttaatatagatggggtttcaatgtgttgtccaggctggtctggaactcctgagctcaggcaatccacctgccttggcctcccaaagtgttaggattacaggtgtgagccaccgtgcccggccagatcttagatattttcttactgttatagtaaataatctgttagtgtaaatgagctctcatacactcctagtcccatgtttcttctatccctatctttccaatatggttacatcagaatttttggttcagtgagtatgtggattcatacttgtatgatatataaatattgtttactgatacttttcattcctaagccaagcwgaatatggaggttacatttcctttcttgtatgatttgtatattttttcctagtgtcagtatttgcttcctgcaatctaaaccatgtctttgagttctaggaaattttcttgtattatttctttgataacttctttcttctccctacaaggtctcactctgttgcctaggttggagtgcagtggggcgatcatggcttactgcagcctcacactcccaggttcaactgatcctcctacctcagccttccaaatagttggggctacacgggtgccaccatgcccaactaattaaaaaaaaattttttttttgcagagatgggaggtctcactttgttgcctaggctggtcttgaactcttggactcaagcaatcctcctgcctaagcctcccaaagtgctgggattacgggctagagccactgtgcctggcaatcgtttttgttttttttttttaagcctcctactctcatttgaatgctctaatatctttcatttattatctgaagcagatttttaatagtaaattgtttttcgtttggaggtttttatttttttttgagacagagactcactctgtcacccaggctggagtgcagtggtgcgatcttggctcactgcaacctccgcctcctcggttcaagcgattctcctgcctcagcctcccaagtagctgggattacaggcacacaccaccacacccagcttatttttgtaattttagtagagacagggtttccccatgttggccaggctggtctcgaactcctgacgtcaggtgatctgcccgccttggcctcccaaagtgctgggattacaggcgtgagccaccatgcctggccctatttattattttctgaggctaagttattccttcagcttctggcttctagcttagtcctaaagtagtgtactcatgggctgtgtcatgaatttctagtctccaatgggtagttagatggtagatgttaacagttacatkgataacctagtcttctgttcttctgtcaattgttgagcaaaccattgggatataattgctacaagtttaggttcctgatgagttcccaatttatttcatatttcatatttcagaataatcactctagagattactgagtgagattatggaatactttactaaaagcctttgaaatttggatgaaacctcctgaccaggacgttagaagggaactcaggctggccttgcacttggagagagcagtgaactggagagcttggggtcccacctggcttctgtgcttcttgtgctgcttctggtttttttgctggaagagacctgatcgtatggtttctgtgctcaacagaaaactctctgcagaggaattagagcgaaaacggcaagagatgatggaaaacgccaaatggagggaggaggagagactgaacatcctcaagaggcatgctaaggatgaggaacgggagcagaggctagagaagctggactcccgggatgggaagttcatccagtgagtgcatcttcttcctgccagggtctttcatggggaaggtcttaagaggcaggctggcagctggttcccgttccagtgtttctgtgtttgcacatggagcccagccttcagaccaccttggctactactcttcctttctgaccacacagtgggatgtktttcatttgaggggagragaagtgaatttggtattttctaaatcattgaaattccttgaccttccttttwartaagaattcatggcccaggaagcctttttccartgaggctttgacttattttccaaaacagatacattttcccttatggacactggtttaaaaacatttggttccaggtggagtcactcgaaagttatctatgggagcttaaaagaggttgtgtttttacagctgctctatggctaacaacccatttcttctgaagctgccagaatagttgactgattgaaaatgtttttgacttgcatttgcctgtcttctcttcctagccgcatgaagctggagagtgcatctacttcctccctggaggatcgggtgaagcggaatatctactctttacagagaacttcggtagctctggagaagaactttatgaaaagatgaaaactgtcccctctcttattggttttcctgcattttccagggaagctgctgaccccttaattctctttataagagttcaaatgacttctttcacagatgtcaaaccaccagtgttcaaagtgaccctgcttcattgagtcctgaaacagctcacttcctttgagagctagtgtgacttgctttgtgggacactcagtaactttgggttttgactctttaacgggtgggcactggaccatctcggtgggagtgcttgtgccactctggaaggctgttcccyggggttgtgatgtttatcatgccacttccttcttacctgtgccaacagacctatttcactgcctcagcgtacaccagacccttcagaaacctctctggtgtcaccyagatagattgtgcttactgagacaaatgaacgtttacttgatttagaagataatgtgacagaatgatgtcaggttaggtcaaagccaagggagtgacagaatctggaaaatcaaacaatacaaaaagccctaaatgaactgttaactatttgatctttggatgtaaaattgtaatgcgtatatgtacaaatgtacaatttttacatgcttttaaaaaaggttagctttgtgaaaataccttgtttggtcaatgactttactgggtaatagaaccacattgaaccttgatggcaagtaatacaataaggcaggccagctcgtttttctctctgaatctggctggtttaggaggagcctgggtttatcgacgagatctggagtatctattcttttccactgcttgcagtctccaatgtaggcagtgtaaaggtatagtaaaatgattttaggagtcagaaccaaattgccaatatgctccatggctcctaaaggaaaataaaatggaagtttttattttgcggcttcayttcttaccgtgtagtaaccttactacaattacagattttcaggagttgtttgctagtctctttcagtcaggtactaaaaaaaaaacaaaaaacaggctgggcgcggtggctcacacctgtaatctcagcactttgggaggctgaggtgggcggatcacgaggtcaggagatcgagaccatcctggcgaacacggtgaaaccccgtctctactaaaaaaaatacaaaaaattagccgggcgtggtggcgggcgcctgtagtcccagctactcgggaggctgaggcaggagaatggcgtgaacccaggaggcggagcttgcagtgagccgagattgtgccaccgcactccagcctgggtgacagagcgagattccgtctcaaaaaayaacagcaacaaaacaaaaccctcgaggggccactctcctgtctttactccttttcccttctctattctttcaccagaagccctcatttgaccagtgaactcctaggccctcttgacccgcacattagctgggcgatttccttgttctgctaattcctaattctgcttaaaatgtatttggatttctgtttttgaacacttatgatgccaggcactgtaatgcttgaaacccgatctttccctagagaatgtaacatacgtttttattcatttaatcacttcattatgccggggttaattatgtttattttataattggtaataaaggccacatttatttttgtaactgtttaaagagcgaccacctgtggagtaccgtgtttacgaatttccatgcagaaagaacaacgttgacctgtaatttgtgtcgaatatatggagatccctcatctgagaattatgtaacaaagcgtggggcagtttactcaaagattttacgaaatgagccagagtaagacgattagtgggataggtgtctgaaggtgctggcggcctctgagctctgaccctttgcggggagaacaggcagcaggtgggtgggcgcggggcccattcataaaaaccagtgttcctggcctgcttctctcattggccctgggggcaaggggcgtgccccgcgggtggagcgcgcccggggcccagcagagtgggcagatccacgcttaggtggagcgagggggcgttccttggctttctaggctggactttctcttccccttgctgcgtccctcctctcccccggggtgggcatggtacgtcccgccctcctcgcattcccgtccctccttcccttccggagcggtggcatcgccgccatcttggcattcgggttgcgggaaagagccaaaccctggcgttggggggcccgggcggggagcccctcccgcggtccacagcgacgcctgcccagccctcctccccttccggctccggcacggggccccgaggcgttcggaggccaggcgggtttctgtcaggcccggggaggaggggcgggcggggcggccgctgcctccccgggacgggccgtaccacgcggacggggaggacggggccaggggactgcagggcggctgcaccgcccgggggcggggtgcggagcgggccggcgggctccccggggcggggcgggagggcggggcgtggggcggacggaaccaccggggcggggtgggaggtaacgggacgggcgcgaccatggcgcggtgagggagcgggggtggggatcggtccgggggaggcctgaggccgctggcttgtgcgctgtctccgccgcccccctctttcgccgccgccgccgccgccccgggcatgtcgtccaactgcaccagcaccacggcggtggcggtggcgccgctcagcgccagcaagaccaagaccaagaagaagcatttcgtgtgccagaaagtgaagctattccgggccagcgagccgatcctcagcgtcctgatgtggggggtgaaccacacggtaaccagctcctgcgcgcccctctgagcgcggccccgcgcgctcccacgccccctgcagccctgggcccttgccccgcaggccctgccggtgacgcctgccacccctcgccaagccacttgcacgcccaccccacccttgcacgcctttcggccccgtgtgcactccccgcacgccacgcgaggcctggtgtctctgtggtctgccgtcgccacctccccttccctccagcccttctggcttcctgcgtgtggcgtgctcgcttggggcagcccatggagcgcaaaggcaaggcctcagtgcagtggagtcgctttcatccctgcttctcctcctcccccctcatcctgtttgtgagggtgtatattcccccttgttccttacagccggctgccagctctgtcaagtagcagtggtctgcccaaatagtcctctctttctgatcgtttggttgttgtggctgctcaaattctcccatcctccaggcctccttacctttgaatgtagaactccaccctgggtttccttttttttccctcttgaacaagatgtatcaactggagaagcacaggcttccttgaaccagacacttcacctgggtctctctgggttagggagaagaaagaatggctattaaccatttgagagaagaggatgcctggttataaggagggactattcatagtagaaataatatgtcttcccatagtttttgaaggtgatcattttaaagatgttgacttatctgttgtgtggctgcaatgttgtgatgatgcatagtgattatggtcctagataggagagataggtcccctgggtccttagggtgctttgagattgttcaacagcccctgccaggaagttggatcctgacagtttaagctggaagactgtttatgtggtgtttgttcagggtctttattctccctcttccaaccacttgctctttgccttctgaccatttctttatgaatccccacactaggaatgagcagaggaagtaaaaggacccgaaacaccaacttcactaactagaattttggaataaggaggatcaagcttgggtttcctgtggatttcagttctttaggttcacttgtgagtgcttgaaattgctcacaagaccaagcgatgacaaagagggccagcaagactttgcattgctttggcagaggagctgaaggtgcctttgggtggagatcgatgaaccgtaatctgagctagggttttagatcttgacctgtcatttaggaaagtgcatgtgtaaattgaggtctctgtggtttcttggtcttgggcaggttactgttttcactgtcatcactggtgttagtgagggtcctgccaggatagcgagtaccagtggtataatgcccagacctctaggagctgcttcgggccaacaatccagcccagtttgttactcggtcttcctgctgtcccaggggtcatctgacaacatttctagggaaactgggtgatcagaatatgaaccccatgtccctttctggaagtcagtccttgattttgttctgcatcctgcttctcactctaccaggcctctctctgctggttctgtttctcacagaaagcaacctgtctgtagagaactggtagaggcctgagagtcaggagtattacagctagctgcaatgaaccttgggtcccttattttacacatgaagaaaaggaggcctcaggtggaggattagcttgcctgtggttacagcaagagatgtcgcttattgtctagcaccatgggactgtatcggccaagggtggtgcctgagtggctggtcttgttttctttgcctcctgtttcttttcctctccctcagccaagtctcaggatagatgcgaagtatagtccggttagagaaggtgaatatatgctctgggttatacgcctatgcatgtcaggtcctgggagtgtgtgtgatgcatggtgttccgataggcaggcatgagtctgtccatatgtggttatgaagtttctcaatagctgatggttaggtatcacgagtcaggagtcctgtgagtcctactctgttggacaaagtggtcatcttttttctttgctaactttaagttgaaagtttgtttgaggggctagttggaaaggcattgactttaagcaagatccgtgcctctggacataatgaacaggcatctcatgggaacttcccaccactgccctggacaggctaagcttcagaggccagttagtcgtaagttttattgcttcatcctggtctgcagtaaggtctgatacttcagtgtccccatttgggaactgagacatctgcctagaagaagagtgtaatcttgcactcgtctaagggatcaggaccacattgccctcggtggactgctgcacttttttggagatttcctcccttcaaaaaaagcctactttgtaacattttgtcatctgagatttcagataccaccttttctttagtttctcacctgtttaggcatttaggcatgctggtctgtggctaatggtgtttcagataggaaggatggatatgtctttatctacagcagaagttagttaccctttcatgaggtgattagtttacttctaggtggaaaaagagaggactttgaacttggtgttgtcacaggagctgctctcatggacaagagcccatggattttgtggaggaagaatgtgtaggaaacaaggagaaaaatcagaagactttgcacctgtcagggaagaactagtgaagagcaaaaaccagtgttttagtggatgaaatacagttccgagggtttggaattagggaagagatggcctcagagaggagcatggagaccatgggaggtagacctgacttgatacttgttggccattttaagaaccaggtatgtgtgaagccttaccacagggatcagaggagcaggagcagttgatggtgactctgtatttaaccatttgagaaactgccaaactgttctctaaagtggctgtaccattttacatgtctaccagcagtgtataagagttccagtatctgcatccttgtcaacacttgttattgtctttttaaagttattaaagccattctgttgggtgtgaattcgtatctcattgtgattttgtttgtttgtttgtttttgtgatggagtctcactccgtcacccaggctggagtgcagtggtgcaatctcggctcaccgcaacctccacctcccgggttcaagcaattctcctgcttcagcctcctcagtagctgggattacagatgcctgccaccacacgtggctaatttttttattttagtagagacaaggtttcaccatgtcggccaggcttgtctcaaactcctgacctcaggtgatccacctgcctcggcctcccaaagtgctgggattacaggcatgagccatcgcacccggcctcattgtgactttgattggcatttctgtgataactaatgatgttgagcattttttcatgtacttactggccatttgtacatattcttttctttttttttttttcttgagacagagtcttgctctgtcgcccaggctggagtttagtgccacaatctcagttcactgtaacctccgcctccttggttcaagcgattctcctgcctcagcctcccaagtacctcggattacaggtgcctgccaccacacccagctaacttttgtattcttagtagatatggagttttaccatgttgtccaggctgatctcaaactcctaacctcaggtgatccacctgccttggcttcccagagtgctgggattacaggtgtgagccactgtgcctggcctgtacattttctttttgttgttgttgtagagacagggtctcgctttgttgccgaggctggtcctgaactcctggcctcaagtggtcctcccgccttggcctcccaaaggactgggattgcaggcatgagccacatccccagccttcattggtatcttttctttggagaatgtctattaaattttttgcccatttacaaagatctttttgcccattattaaattgggttatcttcttattattgagttacaagaattctttttatattctagatacaggtcccttatcagatatatgatttgcaaatattttatcctattcattgagttgtctttttcatttttcttttttttttttttttttttttttgagatggagttttgctctgtcgccctggctggagtgcaacggcgtgatcttggctcactgcaacctctgcctcccgggttcaagcgattctcctgcctcagcctcctgagtaactgggattacaggtgcccgccaccacaccaggctaatttttgtatttttagtagagacagggttttgccatgttggccagactggtctcgaactcctggcctcaagcaatccccccgcctcggcctcccaaagtggtgggattacaggcgtgagccactgcacctggcctgcctttttcatttttcttatggtatcttttgaagttcaagtttttaactttaataaagtccagtttatcttttttgttgttgttgtgtgtgcttttggtgttatatctaagaagacattgcctaacccaaggtcatgaagatttactcctttgttttcttctaaaagttttatagttctagctcttttttttttttttttttttttaatgaattggggtttctctgtattgcccaggatgttctcaaacttctggcctgaagcaatcctcccaactagagttttagctctttctttcttcttcttctttttttttttttaattgtattgtggtcagaacatttaacataagatgtactctcatgacaaaatt

SEQ ID NO: 97958 - DNA, 39781 bp, Homo sapiens
gtgactgtgagaaatcgccacacactgggtgactgaaaacacaacacaaatgtgattttcagagttctggaggccagcagtccggtagcaaggtgacagtaagatccaattccgccccccccccccccactcacgtcacaggaaattaaacatttaagctgaaaaaatgttcaaaccaagcagggcagtgcccatgcacagaagtgaggcccaacgggcgaagcggactcatcctccctcctcatgccaacagcagctcaaagcttctcaatggcaaaacttctaccaggtcctgtctaaggccaagattcctcctaaaacccaaaccatccccgagggggccagctcctcggtcccttcagcaggagggtccctgagtctggaaagaggagctcagctccaaggggtggtggtggaagatgcacccttctgtgtcttgtgccaggggtccccacctgtgggcagcaagccacccaggtgccaaggcaagagaccgagggcacaagctgttccagtataataaaatatataaaataacaagagttatactacatatagatcatagatatatgtaagtaccactaatcatcagtttgtagtaattactctttattcaactattataataatcctcgctctacaatcataacctaggaaaagccaggccatacagagataggagctgaagggacatggtgagaagtgaccagaagacaagagcatgagccctctgtcacacccagacagggccaccagagggctccttggtctagcggtaatgccagcgtctgggaagacgcccgtagccaagcggaccgtgttctagcagtagcatcagtgccaaggaaaagcaccggctacttagcagaccgggaaagggagtctccctttccctgggggagtttagagaagactctactccaccacctcttgttgagggcctgacccgcccacagttatccggaggcctaaccgtctccctgtgatgctgtgcttcagcggtcatgctcctggtccgctttcatgttccatcctgtacacctggctctgccttctagatagcagtagcaaaattagtgaaagcactaaaagtctctgatatgcagaaataatggtgtaagctgtctcctccctctctttctctccaccttggctgccaaatagggaagggccccctgtccagtggacacgtgacccacgttaccttacctatcattggaggtggctcacactccttaccctgcccgcttgtcttgtatccaataaataacagcacaggctggcattcggggccactaccagtctccacgtctcagtggtagtggtcccccaggcccagctgtcttttcttttatctctctgtcttgtgtctttatttctacgatctctcgtctccgcacaaggggagaaaaacccacagaccctgtagggctggtccctacatccaccctttccctgagcaacaaacgctggttgcagcacccaagcgtccttcaggagctccgaatctctcccgtgtggaagtggcacatagaggctgccccccacccccagtgtgcccaatccgcccataggaggtggctagagctgtagtgcccttctgtccagtgggatgaaatctgccaccccacagcagggcaagatgcgagaagcatgctgcgttagtctgttttctgctgttataacagaatatcccagactgggtaattcctacaggaaaaacatttgtttcttgtagttctggaagctgagaagttcaaggacacggtggcagcatctgctaagggtctttgcattcttgctgtgccataacatggtggagggcacatatgcaagagggcaggagagagagagccggagagagcttgcctctataacaaagagataagcaactcactcccacaacagcgacattaatccatgcatgagggcagagccaacattaatttattcatgagggcagacaaattaagtttccaacacatgaaatttgggggacattttcaaaccatagcatatgccctgaatccaggcagagaaagtgtcccctcagtgcacaaatattgtcacagctgcctgctctgaatgctgcaaggttttggagaacgttaaagctacttcttttttttttttttttttttttttgagatggagtctcactctgtcactcaggctggagtgcagtggcatgatctctgcacactgcaacctctgcctcctgggatcaagcgagactcctgcctcagcctcccgagtagctgagattacaggcatgtgctaccacatgtggctaatttttgtatttttagtagagatggggtttcactatgttggccaggctggtctcgaactcctgacctcaagtgatccacccgccttagcctcccaaagtgctgggattacaggcatgagccaccgctcccagccaaagctactttttaactgggttcctgatctttcttggcctgtctctgctcccagccttgccttactgctcctgcctctgacctcccgctttggatctcaggcaggaccaagtctaatctcaaaaagcttggtctgatgccctggggttggtcccttgtcttcccctcacactcagcccctcctcacttcctgtgcactaagggacactccttgtctgacaagccttgatttagtgtccctatgaccatgccctgacccggggctcgattgaaggctcaaataagacaagtggcctcattcagttgttcaataaatacttcctgagcacctgctctgtgctcagccccatgcaaagcagtggtgacagtgggaagacagtggtgaataagacagacatggtccctgtcttcagaaagttgccactcaagtggagaagtaaaaaagaaaaaaaataatagtgcttccggctccatgatgcagtgggtttggggccccgggcagcgaggatggcaccaaactagtgttttggggtcagggaggatttaccaggcaaattgaagtctaaggcaacaacctaaaggagaggagtagttagccaggtggtgggccagggatgctggggagtcactggaggcagggacagactgcgatctcattctggaaagatcactcttgcttcagtaaggaggaaaaatacagcagacaaactagagggtcactggattgcagggtgggctcactaaggttccaggtggcttggaatcagctttccaaattcagaaactcaatctcaatacccggaggtgggagtgccatatttagcaaattaaaaaatcacctagctaaatatgaatctcagataacacatatttagtataaatatgccccaaatattgcatgaattcaaatttaactgtgttcaatattttattggccaactctaccaacagtgaccaagtcttcatgactgtcttatgtgcaccaaactcacagggatctgatgtaaatacaccaatttattgatttacaattgcaggcaaggttaaaatatacatgttattcagtttctcctttctggaaaatgaaacagtcagaagactggtgaacatggaatgaggacaaaaggacacaaggaagtttgaaaggaaatttcatctcaaggcatggtaaattctggagaatcatcctggcctccctacagagaatcctctttggtggcagaaagtgcaggtcccccctggagagggcaggtcagggaccaccgggtcctcgtgtgcagctccctgtggaaacacgtggttcttctagctcaaccatcatctgctggtggttgatttcccactgtactctcaggaggtgttctttcaaagctttggggctcctgacccagccttccaattacaatacaatatatttcacattgaggttacactttagaatgtattcagtgggctgaattcatgtagctatttattctgccttcttaaacccaaggagagcaatcaggtactcttctgattaagaaatcacaggctgggcacggtggctcacgcctgtaatctcagcattttgggaggccgaggtgggcagatcatgatgtcaggagatcgagaccatcctggccaacatggtgaaaccccatctctactaaaaatacaaaaattagctgggcgtggtggcgcatgcctataatcccagctacccgggagtttgaggcaggagaatcgcttataccagggagtcggaggttgcagtgagccgagattgtgctactgcattccagcctggtgacagagtgaggctctgtctcaaaacaaacaaacaacaaaaagaaatgactttaggcaacatagtgagaccccgtcgccacacacacacaaatacaaaattagtcgggtatggtggtgcacgcctgtagtcccaactactcaggaggctgaggcaggaggatcacttgagcccaggagttcggggctgcagtgagccatgatcacaccactacactccagcctgggtgacagagggagatcgtgtctttcaaaaaaaaaaatcacttcagaaacggggtacccatacccaaggggtcacttgctcttactaatttctagctgtaatgcaagtggcatgatcatagctcactgcagcctccaactccagggctcaaaggatcctcctgcctcagccttttgagtagttgggactactgtggcatgcaccaccatggccggctaattttgtattttttggtagaaatggggtcttcccctgttgcccaggctggcctccaactgctgggctcaactgatcctcccgcctcagcctcccaaagtgctgggattacaggcgtgagccactgtgctgggccatgattctcatctcccaatattctcaaacccagtcccttcatctcttgactggattatgcagtctcggagctggtttatctgaactcactttctccccctttgatctgttctccacacaacagccagagaggtctttcaaatgcatgaatgggatcactgctccgcataaaacccttcaaggggccaggcgcggtggctcacgcctgtaatcccaggacttggggaggccgaagcaggcggatcacttcaggtcaggagttcaagaccagcctggccaacatggtgaaacctcgtctctactaaaaatacaaaaattaaccgggcatggtggcaggcgcctgtaatcccagctactcgggaggctgagtcacgagaatagcttgaacccgaggcggaggttgcagtgagccgagaaagcgccactgcattctagcctgggcgacacagcgagattccttctcaaaaaaagaaaccttcaggggctctccacggcactgggaagcagccagcccgacgggtggacccttttcgtgggtgcgggtctctgacctcggtcggcctcggacctcatctcctccctgtttgaggggccacactcctcgctccggggctttgcagcagccctgggcgcctaccggacagacgccgttctccccgcctgggtcttgagtagggcccagcacacagtaggcgcttaatgtctgcctgcctaacagacgaacgccggatgcccgcgttcggccccgagccggcgcttcggggctttctgtggaggcggggcgatggttacagcacagttcccccgcgctcgccttttccacatccacctccgcgaggccccccgcaagcgccgttggaaacctagtcccgagggggctgcaagagcttgggagaagaagcgccaacaccgacagaataccaggccgacccaatgcggaaatcaattctcagccgggaccttttccccaccaagcaggcgggccggaagtctgcctctggcccgcccccgaggtgtcattgggtggaatacccagaagagggctgggacgtggttaactctagttctttattggttaaaacgtacgaagctggaggagaaggtgggacctagcttcctccggacttctcattggctcaaaaaaaaactcgctcggccctcggattctcattggctgaagtcgagggaggtttgtgtcttattatcctccgggtccctcgctggctagtaggagagactggtgcttgccccgcccggtggactaactcgcttaattttaaataaaaagtcgaggacacggcggtcgttttcccgaagacatgggccctcccatgggccatttgctccctggaggccctcgcgtcttgctgagcccggggagttaggatgacgcgagcggtgagggagcccggaacgattccttcgcggaacaattgaggcgaggcctttgggagtactttgtgggacggaccctggcgggccctgccagacgcacagggatggcggcggaggcggccgatttggggctgggggccgccgtccccgtggagctgaggcgggagcgacgcatggtgtgcgtggagtacccgggagtggtgcgtgatgtggctaagatgctgccgactctgggcggcgaggaaggcgtctcccgggtaaggggctgggaatctcggtgttggaataagagctcggagtcgcaaagaaaacgagcactcaaaggatttctcagcaagggaaatttagcaaatttacttacgcagaagggtgctgctcgctcttctggccgctgcaagagagccaacagaacaaagaagggaaggatttttgtttttgtttttgtttttttgttggtttttcaggcggagtttcgctcttgtttcccaggctggtgtgcggtggtgcgattttggctcactgcaacctccgcctccagggttcaagcgattctcctgcctcagcctccagagtagctgggattacaggcgcatgccaccacgcccggctaaatttgtattttttagtagagagggggtttcaccatgttggtcaggcttgttggaaataaattttgggtgccgcaaagaagaatcagcactctggcaaacagttttctcagcaaggcaaatttccttctatagaagggtgcatcttgcggatggagcaatggcgagagcacaccgacaaggaaggggaaggggttcctatctcttacacagctagtctctactgctgtgtctttcccatattggctagggttggaccgcacagtctaagctaattccgattggttatttcaaagagggcaggggcacaggcctgagtggcggggtgagtagttttggtgggaaggatggttacagagcaggtgactcaggatgactaaggacagagcaggtgatagaagctaggaaggggttgtttactgaaactaggggcaaggaggcgtaaagaacgaggggttaaactttaaaatggagaacaaagaacagggaagctgaacatactgacatattggttctttgaaatggaactcataactcattgtatttattaattttccccctcttgaatttaaaggaaggtaaaaggctaaaatctttgaagtggaatttactgtgtcctataggctggtcttgaactcctgagctcaggtgatccacccgtcttggcctcccaaagtgctgggattataggcgtgagccaccgtgcccagcctggaatgggtttttatccctaaggcagtcagtccctgtttttgtgtcctgtccctgctggttggagttggaccacacaatctaagctaatctcaattggctattttaaatagaacaggggtgtgggttacagtgacgggacgagcgatttcggtgggaagactagtttcggcgggaagggcagttaaacagagcgggtaactaagggcaaggaggcacaaagaacaaggaagttagactttgaagatggagaacaaagaacaagggagttgaacaagctgaacctttgaagaagaattcactgtatagaacagtttccccctcttgattttcatacttctttctcttcaaacctttttagcatgtctcgactttgctgttcttggttttctaaaagtagaagtttgtctgaataaggcggggggaaattggaggttagtgagagctgtctccgtaagtctttgtattaaccctcaggcacagggtatgatacaacatcctacgagaataaacacgtttattacaatggcaagggacataaggatcgaggacataagtcctttccacctgccgaacaatcttcccrttagatcagtgaagagatcgtttatcccagaattttaagctagctcattggataaagcagtaagaccttgcagtgcctttgttatggttccgtcaggaacagtattatttgggataaaagtacaacattgggttccaagcatgacacaaacgccacccctctctgctagtatcatttctaatgctattctattttcccaagccatttgactggtgggtcctagttgttcagctgttcctttgatagcattcctagtataattaacaaattgttgctggttgtaatagatgtaacttatccaatctacatttttatttatagttaaccaccagaaaaacatagactcaaatcccgcagctatttgattacaagccttaaattcatcaggtacccctcggggaactccagtggcatctgtataaacacragggtcaaaggaaccacggggggcatctcttactctacggtgtcttgtttttacttcttctggttgatgaaatgccagagtgaaagggatggccaattggatcagagcacaggtaccgctccagttacttggcagagtatccagttacggtccaccacaatgccaccatacatctgctcaggataaatgactaggggcagattcatgggtaagctcttggaagggcttaagctcactgcatcctgttaggtccccaaggaatgccaaattttccctgtcacaagagacacaaagtaaaattggcactgggagacagaagctggatagccctcaggggctgacccgcagggtgttgaacctcagggaacagcagagagagagctcggcacgatttatcaccccaggctgtggggtcctggaaaagagctaccgtacagcccatgcccactcgtctggaggaccatccaagtggaaaggggacagtctgggcttctggtctactgtgtgcacaagtgtaacaatcacttttgtttaaagtgcggacagaatatttaatccattccatccaggcgtttgcatctcagtaccctgtttcaattgctagagtttgctttaggtctcttacttctacagctgctactttggctgggtcgttgtggagaccggaggggaacactgggcctgatatgtttggggagagcgttgggtcccatacgttccctggactctgggtctgggtttcttcattgtttttaaccgccgatggtccagtcaaccttagagagggttcctatgggatcccgtcctgtaacatctgctcctaacccgtaccgtccgaatacagagggttcttgggccattgtttggggattatctataattagcaataaggggttacaccgcagtggcttacaatttggtggagtggagcgatggataagttagagtttttgtttgagtttccgcaacttatttaaaggaggggggttggctgtccgcctcccatattgactggtccaccaaacatttgcccagtcaccacaggggccctttaaggctccatacttatacttgtttgactgtctgcgatatggacatggatacttaactacatcggatagctgcctttgagcttgttcgtatctgcacggggtaagaacaagkgtcgaactgaagggtcaagggatggttagcctgagtcacattgatgacaagatgaccttmtgttggaaagaaaaggaaaaatagacaagtgattattaagccctttttagggttagtttggtaggggtgggtcccggggtgacagcccatttttccctgtctgtggacattactcctttcacctggcgtgtagtgtgcccatcccttttcagccgttcgaatcgctgtttcagtagttaagagtaccagataaggcccttcccaagctggttcaagttttccctccttccagcttttgatgagaacgtgatccccaggctgatgctggtgtgctggaaactctagagctggcgtctgtgctcagaggccttcagtcctgagggaagaaaaagtggaggagagaccaagtttatagtttttaagaaactgatctttgtttcaaacgtagcaatgtcagcaatggagtgtagataaggcaacccatatagcatttcataaggggataagccaacatctttccaaggggcagttcggatttttcacaaggcaatgggaaggcatttagtccatggcaaccgagtctctaagactaatttggttaagtgactcttcagagtttggttcattctctccactcttcctgatgaaggtgggtgccagggagtgtggtattcccctgctatgtctagtacttgggctagtttcttgacggcatgtgcagtgaaatgagtcccattatctgaatcaatattttgtattaatctgttaaacctgggtataatattctcaatcaatgctttaattacattattagcagttgcacttgaaaagggaataggttccctccagtgcgtaaggtgatctactatcactaataagtactttaggcaaccgactgggggcatttcggtgtaatcaatttggacactttgggacggtcttaaccctggactcctttcccccagggagtggttttcttagggtctgcttattagtctttttgcatattagacaactatctgtaacttgtctttccagagtataaattcctatacatccctaaaccctgagaactgcatcacacatggcttggggtccccagtgaattccttgatgcagctgagataagacttctctcttgaggggtttggataacatttctctttggtctggtaacacccatttcccttcagaattctctttggcccctatttttattaatttccctttttcagtggaagagaagatgggaactgcggtcgggggaggaagacaaggggttaggtgaaaagtgagcgttttgaggaaatggcagcttgtttggctatttgatctgcaaggttattacctcgactttcacaagaaagacctttctggtgtcctgggacatggacagtagctatttcttctggcagctggaggttacctaacacttgggtgattaattccttgtgggcaaggtcttggcctttgctattaatgagacctcgttcggtccaaatttttccaaaggtatgagctagcccgaaggcgtacttggaatcagaataaatagttccttcttggttttgcaagtgctttaaggcttgattcattgcaaacaattcacatgtttgggcagaccaatgactgggcagccttcctgaccctccttctgcaagggcttccccatagactactgaatatccattatgtctttttccttcagttacctgggaagagccatctataaataagtgctgccctgtttgaaaggggtctcccttacatcgggcctgaatctaaacactcatgctcaggtccttttagatttggattccctgttaggagacctgctgggttaagtgaattatcagtggttagtgttaaatcatctctctaataggatagcttcatactttaaaatttttgagtcagtgagccatctccctgctttctggtttaagatagttctaacttgatgaggcgtgctcacaactaaatctcccccaaaggtcagctttctgcyttcttcagttaacaaagccgtagccgcaatggattgaatacattcaagccatccacaggttactggatctaaaactttcgacaggaacaccacaggttgccagtgacccccgtgttcttgagtaagtacccctaaagctacccccttctttacattaatgaaaagatgagatggcttttctagggaaggcagggctaggacggggcagttatgagcatatgttttagttcttcaacctggtggatttcttcagaggtccacagaagagggtcaggcttttcttgggcaagctttaggtataaagrttttgtttttagggcatatgagtcaatccgtaagcggcaatatccaaccaatcctaggaatgttacgagttcctgcttagttttaggcaaagttaagaaggacacgatcccttcgacgtgttcagttcctgtccttcgtatcaagtgtcctaggtatttaacttctggctctacagattgaagctttccctttgaaaccccataacccttttccttgcaaatggttaaggaggtggacggagagggcagctatccgttctgtagcttcaccagataccagcgggtcatccacgtattggagcaggcatgtgttttggggtagaaatttgttctagaacttgttctagaatctgaccgaagaggttagaggagtctgtgaagtcttgggggagaactgtccgtcgatactgttgcttccgtccggaatggggatctttccattcgcaagcaaaaatgtctcggctgtcctcagrcaaggggcatgcccaaaaagcatcttaaatatattactgtaaaccactgatggtcgtatggaattttgctgaggagggtgtaaggattagggacaacagggtgagtagtctggaatatctggctgatggcccagaggccttgcactagtcagtatgacccatctgactttcttacaggcagtattgggataaggggacacaccgggttcaaggagcccgtccctaatgagactctcaatgataggttttaggcctattctgccttctaaggggatgggatattgcttccttcttactatttccccccggggtttttaactttatatgtatggtgggggggtgggacttggagtcttccccaattcccttcccttgaccagagatcgggatgaatgtatttttcttcatggtggtaagtaggtttaatgaggtgaggaatccttctgggctaacatgtaaacctatacctaactttaagtctcttcctaacgggttagttcctgcttcagggattagcagaaatttaacgtgggctgttcgatttttatgtttgaactctgcgtcttctaagatttttgctctaaatccttctccctttacccctgaaacaaaaagctcttctgaggagcagctgacgctagacggaagggaacaaacagaagagcgagcagcacccttctgcagaagtaaacttagcacatttagttctgcagaagaaaggtgctgtgctgctcgctcttctggccaccagagcacacggaacaaaggaggaaaggttcctgtgtcttgtcccactggctggagttggaccgcacaatctaagctgatctcgattggctatttcaaatagaacagggatgtgggttacagtggctggatgagcggtttcgccaggaagaatagtttyggcgggaagggcagttacagagcgggtaactaagggcaaggaggcgcaaagaacaaggaagttagactttgaagatggagaacaaagaagaagggagttgaacaagctgaacctttgaggaggaactcactcaacctggatatctaatatccgggacactgagagagggacggagttgctggacggcggctgaaggggagagtctacccgggcgtgtggtttccttggcaacggagagtgtggtggactctgggtgcccaatgggcagggctttggtatctgtaattgccaggaacagcctttttctccccaggggacagaggggaagggactgtgggggagacccctaggagcttttttttttttttttttgagacggagtctggctccgtcgcccaggctggagtgcagtggcgcgatctcggctcactgtaacctccgcctcccgggttcaagcagttytcctgcctcagcctcctgagtagctgggattatagacacccaccaccacgcccggctaatttttgtttttttttttttagtagagttggggtttcaccatgttggccaggctggtctcgaactcctgacctcaggtgatccacccagctcggcctcccaaagtgctgggattacaggtgtgagccactgcgcccggctcctaggggcttttttttcattccatccacaaatgtgagccacagcctgggcactggtgccaggaatgcaactctgcagccccacagggtgtgttgcactgccgtatcctcattacccggggtagaaaactgaggcacggggagatgaagctctgttgacttacctgagagggatagactgttatgttgttaggattagaggtagtgatkgttgacatcttattctctgccacgtacggctctaggtgccttacttagagtccgtcctctttagaaccctaccaggtaggaactgtcagagtctgtattttacgggggaaggaacttgttcgaggtcacacagcaagtggggcagctggaggatgctatgtgtaagttctttacatgtaccagaacttgaagtgtctctttagagaagttttccctgattgccctaactaaagtggccactggcaattatctgcctcctcatcctgttaattccaatctgaaaatgttttaaaatgtttattctgacaaaggcttatacatataaaacatttaagaaaaaaggaaaaaaaaatttactgtctctcgtcctcttgaccctaagactgtcaactccatgagagtggggacttcttttgttcacttctgtacttctttatttttatttttttattttttgagacagggtttcattctgtcaccaaggctggagtgcagtagagcaattatggctcactgcaacctcaacctcctaggctcgggtgatcttctcacctcaccctgmcaggtagctgggactataggcatgcaccaccacgcccagctagtttttggtattttttgtagagacgtggtctccctaagttgtccaggatggtctcgaactcctgggctcaagcgatccgcctgccttggcttcccaaagggctggaatacatgcatatgaatctgccgggatcttgctaaatgagccaccatgcctggcccagttctctgttcctaacatccataacagtgcctagttctgtaaatacttgtcaaatgcacgattgagtcttcacagcaatctagtgagttagatgccatttttattcacatttttcagataaagacacaagaaagtttaggtcagacatctacatggtacaaggggatttgaactcatgctttgctctagagtctgaacttttacctgctgcttcctcatcctttatgaatatggaaaagccctgaattcattaagcacgggctgccagtagagccccagttaatcacgttttcttcttttatattattctcttgatttatggctttgacagaatccttactctcgctaacctcagggattattacagtgtgagcactttgggaagggaccttccttactcattcactcttctcatgtttcttgagcacctcccctgtgccaggcctacgtttgggttcattcccgccccatcgggactcagaggtgtgtgttttatgaggaggagattcctgagaaccaagtcttcttcattctctcccgagatagttcctgatcacttcctaagggacagaccctgtcctgggtgttgggaaccagctcactagcacgtaggtgaccttgtcccagttcacgttgttggtgctttcatatgcacacatccagtgctcgttgtgacccagcattgggcaagtattcattcatatgtacgtggcacatattgaatgtctaccatgagttaggcaccaggagctgtgctttatagatatttaatcataacagtcgtatgacatagatgctattcttggggtttttaaggagarggaccaaaaagagtgttggtattcagtttcatgtgcttggaaagctagaggtaacagcaagtcagagcccaaatggttgttactgattgatttaatctcatttggacctcgaaacatttgcatatgagactaaataccaagaccctttatggtgggtagttgttagagtaggtaaccctagacaagccactccaccccgcaccaagcctgagttacctccaagattgtgggtggcaagccacccaggtgctgaggcaagagaccgagggcatgagctgttccagtwtaataaaatacataaaacaacaagttatactagatctagatcatagacatgattatatatgaatatcattaatcattagtttgtaggaattactctttattccaatattataataatcctcgctctataatcataacctaagaaaaaccaggtcatacagagataggagctgaggggacatggtgagaagtgaccagaagacaagagtgcgagccttctgttatgcccagactgggccaccagagggctccttggtctagyagtaacgccagtgtctgggaagacgcctcttgccaagcggaccatggtctagcggtagcatcagtgtcaaggaaaaacacccgctacttagcagacctgcaaagggagtctccctttccctgggggagtttggagaagactctactcctccacctcttgtggagggcctgacatcagtcagacctgcccgcagttatccgggggactgtctccctgtgatgctgtgyttcagtggtcacgctcctagtccaccttcatgttccgtcctgtacgcctggctctgccttttagatagcagtagtaaattagtgaaagtactaaaagtctctgatatgcagaagtaatggcataagctgtctctctctctccctctctgtctgcctcggctgccaggcaggtaagggccccctgtccmgtggacacataacccacgtgaccttacctatcattggagatgactcacactctttaccctgccccttttgctttgtatccagtaaataacagtgcagccagacatttggggccactrccggtccccgcrttttggtggtagtggtcccccgggcccagctgtcttttcttttatgtctttgtcttgtgtctttatttctgcagtctcgtctccacacacagggagaaaaacccaccgaccctgtggggctggtccctacaaagataagggtgatagtatctcccctcaagtgttgccagaaggaccaactaatgccccacaccgagcaggcacttgatggatgatggcatttacttagaaggaaggagacgattctcattttttccaccagataaaaactaagatacatgggtttaaaaaatgggccttttgggaattaagggcccagaatgaaacatgagcctcctggcctttcctggatcaccgtcaggcttttattgagagaggagcagctccccactggctgcttggcttgtcattgcttcactctgtctcctttggccttgccacagatctacgcagaccccaccaagaggctggagctgtacttccggcccaaggacccatactgccacccagtgtgcgccaaccgcttcagtaccagcagcctgctgctccgcatcaggaagagaacgaggcggcagaaaggggtgctgggcactgaggcccactccgaggtcacatttgacatggagatccttggcatcatctccaccatttacaaatttcagggtaactgaaatctgctcttgcaatgtctggttatttcagggctggccatcytagctgcctgcaggagctgtgtgggtcatctgcaccagtggagggggccaggatatgcccaggggctgtggggacacagcagggcacaggccccatccaggaggcagcctttcttccctccagccaacagttccccagagactgcaggttcattgctgcccaatcttcagcattcttaagctagaaatctcctaatttttaatgaaaccattgtgtgggaccaaataaaactggtcagtagacctccagtctttcccccaccacagtgttttgaaccttctcttgtctcggctgctgttggtcttgccctcctagctcccgaagccccttgggacctcctcctcctctgaactctcagcaggttgaacgtccctcgtggagccctcaatcaggtttcccacctaccaggaaccccagtgaggaagcaataaagcaagggagggagacgggtgagaaagacagactctggcattgtgcctgcctgagccctgccagtttctttgggaggtggcttggcttccctgagcctcagtgtccttgtctgtgcagtgcgggctacagagcctgcgttccttaggccctcgtgaagattccgggaggcaatgcttgtgaatgggccagcctctggcccacaggaggtgcctggcatattactaacaaggcttagagatggctaagttacatctgcagttctaggcagaatctgaagagtataaagattgagaagggcaaagagkactagaaagaaaagaggggaagaagaaagtgaaatgaaggagaagcaggacctggggtcccatgggttgggcatttttaatggcagtcattctggtgggtcatggcattcaccaaagagggctgttcttttgggacaasgtttcccaagtgattcataaaacataacacctcatatttttcatcgaattgaaccagcatcttgctgctctgtgtgtgtctctggactggcagcatcagcctcacctgggagcttggtagaaatgcaccaggtcagaacctgcatttagcaagatcccagcagattcatatgcatgttactaggttggtgcaaaggtaattgcaggttttacagttaaaagtaacattcatctaagaagcactgacctggactccatcctcacctatcatgtagctccccacctccccaaaataattttcatgtaagtgacttagactgcatggagccaactttgcagaggcatttgggaagggtgtgttttcctgccaccctcaccctgcagcctccaccacatggcccactcagcacctccctaagcagatgtgggtgtcggtgtgtggcagctgcccattcctggactcaatgtctgccatctgcccacctctctttctagggatgtctgacttccagtacttggctgtgcatacggaagcaggcggcaagcatacgtyaatgtatgacaaggtgctcatgctccggcccgagaaggaggcctttttccaccaggagctgccgctctacatccccccacccatcttctcccggctggacgcccckgtggactactwctaccgaccagagacccagcaccggtaaggcccccctccatgcagcctcggttctctatcctgaaaatgggatggtccgggcacggagrctcacacactgggcgtggtggtgcacacctgtaattccagctactcgggaggctgaggctggagaatcacttgaacccaggaggyggaggttgcagtgagccaagatygcrtcactgcactccagcscgggtgacagagtgagactttgtctcccaaaaaaaaaaaaaaaaaaaaaaagaaaatgggatgacagtagtactacccaacagacgtattgggattgaatttaaaaagtgtgtgcagttctcagcacagggctgagtacagaacagggccttagtaagcggtggcctgtgtgatcgccaggttggcctcagtcctgaggacagtgcaaagaacgtgactgtgggacatgtgggttcctgctgagaaatgtcctttggcttaatcccctggtcattgctgaccagccagtctctggaccttgctgtcactagtaatgacactacctaagcaagcctcgtgggaatgtcccactctctgaccccagctctttcctacttcctttgctccccatggcctcaccgtccctgtccgtggcggagattttgcagcctctttatcatctgtccctgccctgccctcctctctttgccacactcacctgccaagccttggtcctacttcaccccagctgtttaccctttcctggtctgccctgtgcggctggaggtcgcttcagagaacccctgaccctgcccatcgcccagtgccatccttctcaaggcatctgtgactctacacagctctcgcctgctctgtacttggttatggactgcgtcccctccagaacacggtgcctctcctgaggacaggcgctcactctctctcatcagtagtgggtttctcctacaccgagagctatgaaaagccacatggacgtgactcatagtgcacccaccgccaccccctgccacccacacacaggctccgtgcacagcctgcccaagcccacatgcaattcagatgaaatgaattctgtaactcagaggttcttgacataattagagacctcagcggctgttggaaaggcaggcctgggcattgtcaaatgtagtcaaattgtcaaatgccatacattgacataaaagaataggatttcctttatataaaatccaagattgaatactgtgaaaacaaaatgaagaaaacaagtttgacagtatccaactggggatgaataacattgaccagccacactgccagttatttcacgtccctgtgcarcagcgctgtgagtgcatctcacccaagcctgggagcaattccccagggttcctgacacccccatcgtacacatgaggaagccgagacatggggtcagcgccacgtcccgccggcagcaccgccctggtctctcccactctgcaggctttgctcgtggcccagtgccaacggtgtcctgatttttgtatgctctactttctaaaatgacgcacaaaaagacaacatggaaaaaaactttgcattgtaatggatgctccccagaagtagcgacttggcctgcttcggtctctgtcatagccccggtgcccagaacagagcctggcctgtgagaggtactcagcaagtgtccatgggccccacacagatttaggggagcaagattactgccaacagatgagcaaaatgaaagggcctttttttctttttctttttgaaaggcggagtcttgctctgtccacccaggctggagtgcagtggcgcgatcttggctcactgcaacctctgcttcctgggttaaaacaattctcctacctcagcctcctgagtagttgggactgcaggcgcccaccagtacgcccagcttatttttgtatttttagcagaaatgaggtttcaccatattggccaggctggtctcgaactcctggcctccagtgatccgcccacctcagcctcccaaggtgctgggattacaggtgtgagccacagtgtccagcccgaaaaggactttgaaaactgggccagaggtgatggtgtttgttgaataattgttccatagcatgttttaagcttccaaaaatgcagccctcaagagaatgggcttgggcctagtgtagtggctcacacctgtaattccagtgatttgagaggctaaagtaggaggatcacttgaggccaaaagtttgagaccagcctgggcaatatagcaagactctgtctctacaaaaaaaactaaaaaagttagctgggcatggtggcgtgcacctgtatagccctagctactcgggaggctgaggtggaaagattggttgarcccaggattttgaggctgcagtgaatatgatcacaccactgcactccagcctgggtgacagaacaaaaccctgtctcaataaacaaaacaaaaaacaaacagaaaaaagagcggactctgtggactgatgggacccatgcccaggtgcctcccttgctctgtgagaaaggcaggtgcaagaccagattctgtggaatagaaataaatggtggtgtgataacagaagcctagaaaagtctggaagatttggggctcagagcagttttctttgaaggggtgggagggctttctcattcctcattatgtgtttcctttatgtcctgactgagcacctgtggtggcccagggcactccctggagcctggtgtccacggacagcacagcagctggggtgcagtgcaggggcggggagctagacggagcatgagtacatggctgggagccttaaaggagatcatggggagtgggccacactggtggaaggcagtgggccggggctacaggtagcagcgagggccctcagaggagctgacatctggagctgagacagagccagccaggtgaagatccagggagaactttccagaccaggggattggcgcatgcaaaggaaggctggggaggctgctgtgccccagagcaggtgagccagagaatgggggtggggagtgaagaccagtgcctaggcttcatcctcaagagagagtgtgttattctctgcctccggaaaagcattgcagaaaggtggagagaattggattgtctagtagcccccacgtgcccatcaggagcgtccagtgagcaacattctgctcctctccacccccagtggcacagtgctgccttcagaaacaagcagtgcggatctctgacagggaagactcatgtttcagacagactcgcaataccagtctcctacgcaacagaattaatagcactccccaacatcacccacaaccagtccttgttcactttttcccgattgtctcaaaagccactcaggagccaaacaagggccacacatgttgcttttggttgctgtcccctagtctgtaacatcctctaccaccaccaccccctacttttttctgattgtaagaataaattgtacctgttagaaaaaaacaaaacattgtggaaatgtattaactaaaaagaatcaagtcactttgcctccctgcagaaaactgttgcacatagaatgataccattttctgtaagtgtattgtactcactataagagtttgaagcagggggtgacatgatccttcctttttttttttttggagacggaatttccctcttgtcacccaggctggaatgcagtggcgcgatctcggctcactgcaacctctgcctcccaggttcaagtgattctcctgcctcagcctcccgagtagctgggattacaggtgcgcgccatcacgcccagctaacttttgtatttttagtaaagacggggtttcaccatgttgaccaagatggtctcaaactcctgacctcagatgatccgcctgcctcagcctcccaaagtgctgggattacaggcgtaagccaccgcacccagcctattttttaaagttacttattggccaggcatagtggctcatgcctgtaattccagcactttgagaggctgaggtgggaggatcgcttgagcccagaagtttgagaacagcctgagcgacatagtgagaccctgtgtctacaaaaattttttttaaatcacccaagtgtggtggcacgtgtgcctgtggtctcagctacttgggaagttgagatgggaggatggcctgagcctgggaggtcaaagctgcagtgagctgtcattgtgccactgcactccagcctgggtgacagagtgggaccgtgttttaaaaaaaaaaagtggttttttggtttgttttttcttcaccacaagcagcatactcttgtcagaaacaaaaatacataaaagaaaacagactgggcacggtggctcacacctataatcccagcactttgggaggccgaggcgggtggatcacctgaggtcagatcaagaccatcctggctaacacagtgaaaccctgtctctactaaaaatacaaaaaaattagccaggtgtggtggtgggcgcctgtagtcccagctatttgggaggctgaggcaggagaatggcgtgaacccgcgaggcggagcttgcagtgagccgagatcgcgccaccgcactccagcctgggcgaccgagygacaccccatctcaaaaaataataatatacaaaaaattagccgggcgtggtggcgcatgcttgtaatcccagctacttggggggctgaggcaggagaatcgcttgaacccaggatgtggaggttgaggtgagctgagatcgtgccattgcactccagcctgggcaacaagagtgaaacyccatctcaaaaaaaagaaaacagcacttgtcagcactgccgcccctggcactagatggcagcagcatctgagttactgctctgccctgtgggccagtgggaagctgtttccagcccctggggtaaaatgagggaggagggccagctgccctcgggccccaaggcccccctccctccccatgtggtttatcagtttccagcacctggaaagaacctgcattttctcccagggctgctgtcgattctcctgccctgctcacgttgctgggtgcatgaggactggcagggaggagacctagccactgcctccttggccccttcctggggagattgagcttcccacaaaccaggtgggcaagcagaggctgctgggtggcctgacggggtcgtcctaactggaggatggtgggtccctcctgttcctcagggactctccaaggtggtcctgttgactttgccatcagcacccttcgacccctgccagcagttccccacctacttagaatcatggtgacacagaccacagcctgaggccaccatggggagcggtctggggatgcagccaaggctgccgcagcctctccctacagggttgggcacaggtgggctgctcttgcaggtgaccacccggttttcctggggaacatctttgaaaacgcgatagtgctgacctgtcccrtgcggtttctaacgcaggcactttaaaaagaaggcccaggctcgatcccgtctttctagttttgtttcacaatgtgaaaattactgctattctttgtaagtgtgcagatgctatgtactcatgtagaaaactaaggtaaaatggaaacacattttaaaaggtaatgatcacccgagtgaatttgatgatgtccgagacctactttaagatgcacttcgatgaaatgcagttaaccatgtgctgatcattgctgaagctggtgacgggcttgtgggggttctttacactggcctgcctgcttttgtgtcagtttggtgtccaaccttaaagacgtaactactacaaatattttgagaaatacctacctaagggtgttctgtgccaacayacagaggtagttctagaatctctgctttgtatgtgtgtgtatgtgttttaagactttatttttttagagcaattttagaatcacagcaaaataaggcgcagcgatttctcctatgccccccagccacccccactcagcctcccccgtgatcagcatctcagtagagtggggcgcttgttaccagtggatgaacctatgctgagacgtcgtcacccagtgtccgtagttgacattggggttccctcttggtgttggacattctatgtgtttggacaaatggaacccttggctttaacccctgtgtttcatgacaatgccatttggtgaggttctttgttcattcatctacatgtggtcgagatgcttgtgagccaaagagtcatgctctgttgggtggcaggacaggtgtgtgatgggacctttgcagccagccttctcgatgggagtcccagctccttcccaggagctccgtctctgggcaaatttcccagtccctgtggtttcagctgctttattagaaaatggtcccttctctgtaggattagtttgagcgttaaataagtgaatcgcatgtaagcagatgtgagtgagtgcagctcttgtccctgttttgacaacggattgcgttctctcatgcagctgtgctgggtgatttcaccattgccagctgctggacattagactctgtccagtttttcactggctggacagtgctgtgcctgactcagtgcacttttggggccaccagccccatgacaggtgccctttcctgcactccagcctctaggaccttttggcctttccccagtttgagagctgcaggccccagggtttctctgagttgtcataggcagttgtggctgcgtctcttcctctgtgaatacaggttcctttagcagccractctggggtcctttcccagcacagatgtccagagagaggcacacggtggctgtgggccttggggggttctgggctccctgcctggtctggcccagcgggtgcctgggatggccttggtgctcctgttctcacctgtactctctgcccccagggaaggctacaacaatccccccatctcaggtgagaatctgattggcctgagcagagcccggcgcccccacaatgccatctttgtcaactttgaggatgaggaggtgcccaagcagccactggaggctgcagcccagacgtggaggagagtctgcactaaccccgtggaccggaaggtggaggaggagctgaggaaggcaagtcctgcgctgcgcctggccccggtggctccagcctctctgttggcttcccgtgtttacccagctgctccctgttcctggctgtggggttggctgcactgacctttacccattccttagtgcatgggaacttctcaccttcagatgccatgtctaaaggctgtgtcggtataagttctacattcccaaggttgaaaatgcttcttagagttcttaagaaaaatatgcgtgcgttgttcagatgtgacataaacgtggagctctgggatccactgagctcttattcttccattcactcattgcagccaagccagtggggcacctagtgtgccaggcccagcactttcttaccgttagaactggaaccgtgctgccaggcagccctccttccccgggcttgcgggtgccgtggagtcctgcgtccccactggcatgagcatcaggttcacaggccactgccacctggagcccggcgcttcccttacgcagtgtgcctgtgggagaccacgtggatgtcttgttgatttccagcagtcactggggcacactgtcagtggctccttattgcccaccaggcacagcccacattcctgacctgaattggctcgtgaggcccgctgccccagccccctggccctctacactccggccacactgacctttgcagtcctccccgggccaggctgtccccttcagccctgacgatgtcccacctcaggcacctgttctgtagattggggcagcatggggaccctgggactctagcatgtgccccctgagccgtactccccaccgcgctgtgggctctatgaggacagcgaccatgtctcttatcgtttgagagacccagccccacaactgcacttggcacaggctgggcatgcagcccaggcttctgagggaagggatgaattagtgagagcaggaggtcctagggccacgccctgtgtgtccagcccctgtcctctaccagctcctctctggaggggccgctggggcccagaacatgttgggagttcagggccgaagggtggaagctgctggtgctcatctcagcctctgcccttggcctccccagctgtttgacatccgtcccatctggtcccgaaatgctgtcaaggccaacatcagcgtccacccagacaagctcaaggtcttgcttcccttcatagcctattacatggtaagtgtcagctgcccacccacctgccttggtttccacccatgtggtccctggtccctgctgtgatgtcttagagccacagtaagagcagccaaccccctatcctggctccccatccttcctgccccacccccatcctggcccatccttcctacccacccctggcctggccctcatccttcctgccctgcccccaacctagcacctcccccgtcctggcacccccatccttccttcccccctgtcctggccccccgatcctagcatccctaagacagcttattaaagccagctagaaaagtttcagctccctgagtccagggcgccctccacagcctgttgggctgcagaacccagcccctgaccacagcggccccatgtcgtcctctacctgtgttgagtggggttcagtgggaggcagatccacctttgatccacaagcatgtaaagacacatgtcattactgaggttccaaaggtgctggttggaaagggatcctccccgctgccaggcctcacagagcattaggggaggccagcgtaagacatgactgtgagggtctgcaacaggcagtaggacacaagaaagactcatttcttctgccttgttggacttccggctcaggagagcgacctgtgctgcttggcgttggcattttattttattttatttattttatttattttgagatggagtctcactctgtctcccaggctggagtgcagtggygtgatctctgctcactgcaacctccgcctctgggattcaagtgattctcctgcctcagcctcctaagtagctgggagtacaggcgcacgccaccatgcccagctaattttctttttttgcatttttagtagagatggggtttcgccatgttggtcaggctggtctcgaactcctaacctcaagtgatctgcctgtctcggtctcccaaaatgctgggattataggcgagagccactgcggctggctggcattggctttttagacataagccattcaaaagctccgtttagggacagaagatgtctcatcgattaggccagtagtaacattgggcacttaatatgtgccaggaaccatggtaaaggctccacgggcgctatctcatttaatcctctgaaaaaccatgggaggccaggcatgatggctcactcctagaatcccggtacttcgggaggctgaagcgggagaatcgcttgcatccaggagtttgagacgagcctaggcaacataatgagaccccatctctacaaaaaaattaaaaattagctgggtgtggtggctcgtgcctgtagttccagctacttgggaggctgaggtaggaggatcacttgagcccaggaggttgaggctgcagtgaaccgtgattttgccactgcactcagcctgggcaacagagtgagaccctctcccccaaaaaacaaaaacccacaggaaagggtgctccttttccctccatctgacaggaagaccaaggtttggaaaggccacgtgccctcaccaaggtgacagggcctgcatgtggcagagcagggctgggcatccagagccctgtccccagctcctgagctcttctgctgcctcactgtaggctctggcccgtccagggacctgggccttcacctcacctcacattttccccacttttctgtcccagataacaggcccctggcgcagcctatggattcgatttgggtatgacccccgaaaaaacccagatgccaagatttatcaagtcctcgatttccgaatccgttgtggaatgaaacacggtaaaaattcctgaaagctttgcttcctgcctttctctctctttatctttcagtttctagcattctcttttgtagtaagaatcttttcatttggaaagaataaaaaaaccttttgcccccgttgctgagactcttttgaatgcagaatggcgtggaaacgaaagtcctagttctgtgctggccccaccactgaccgcccgtttctgaaccacagtccctcattaagtgactccacgtgccctatggtcctgtgatgcaggccaggcacttgtgagagcatcagtgcccgccctgcctgggaagtgctgagatgtgttggtgaccgcagtggcgtgcttggcagtctggggttgccctctcaggagctggccccatggacccaactcccatctccagtgtgaagccagtgttgtgtgcygacgggccctgtgcccgcccacctgacttgcccgccctcgcctacaggttacgcccccagtgacttgccggtcaaagcaaagcgcagcacctacaactacagcctccccatcaccgtcaagaagacatgtaagcgtgccaggcgccttttgtgggtcatgagtgatttgccaaggaaggcggggcacctggacccagacggggaggtggttcctgggggtcactccagggctctgccggtcattcctcccctaggagggggtgggctggcaggagggcagggcatggtggttgggagagacacctcctccccaccctgcacattccaagcactgctgttgtccccacgcagccagccagcttgtcaccatgcatgacctgaagcagggcctgggcccgtcggggacgagtggtgctcggaaaccagcttccagcaartacaagctcaaggtgggcgcccctggaggccaggaatggaggggaggacttccctcttggggccgggcaccttgtgggtgacacctggggggctgtgattagggcagctctgcccaccggggcctcggcaccttgcttccttttaggtcagccttcagacactgagggtgagaactcgggtgcaaagccccagggctgtgtgtgttggggacatctggcgaagaggtggtgacaagtctcagggaagtctggcaccagcagctgcatgtggttgtccttctcgagccctttgggagcctgggcccccactgagccacgtgaccactccgggaatgatcggaattgggcacacacaggaggacagagccagagcaggccatgtgggctgcagctgtggcaggagcctcactggctcacgtttccgtcagtgcggttgcccagcgggggttggcggtttccagagctgttcccacattcaggctcccgcaagccgctccacagccctgggggaggccgagaagggggcatcccgcacggtggaatcacctgcygagggagtgggtggcagagatgagtgcagcagagacgggtgatgcgagggacttgctgtcccccagtgtctggggccctgcctattttctaggttttttagacctttgctgccttcccagtgaggggcgatcatgccacagcctgtgcggccttccttctcgaggcctctcctaggaggccgttatccttactctagaactacatggctgggtacggaaaggagagagcaaacactcactaagccctgcttttcccagaaaagatgtcagggcagcccatagggggacatagggtgacaaattagcagcagtgggtgagggataaggtcagagtgcaggagggcacagagagcagagcccggcacaaggctagtgccagccccatgccatgggcgccatggcctgctgcacgggcgggctcaccgtttccagtggccccaggagggcctgggtgctcctctgcctctcccagagcctcctggggagttggacattgttttttccccaactcctccgtggccttccagcctgtctgcccaacctgctcctggtgaccagccagctccctggagagaccccatgggagcctacatggagtctgcaacactggcagccccagggctctggctcaccttccctgtctctctccccctttgtcaccaggactctgtctacatcttccgggaaggggccttgccaccctatcggcagatgttctaccagttatgcgacttgaatgtggaagagtacgtatgggaggggccctgagacactgagggggscccgtgggacccagggaccaaagcggtctctgaactcttccacttcacgtcggccttcatctccggcaagagcactcgcctgtctgggagtttggtgctgccgagagccctggcatgctggtggccctcgtagaggcggtgccctatagaaagccgtggctccaagctgcgcagagacagttcttactgttatgtccttgctcctcttccactgtccacataaaggccccatgaggtggttctcaatcccaggacccatcagatcccagaaaccttttatcgacttgttctcagtgatgtttaaagaattgcagggaaagggcactcactgggatgagaggagatgggaacacatcaaatacatcttgaactctgctgaaagccatggttcaccagaagcatgtgcagtggtaacacggccagcttcatgtgtgtgaggcggtccagggagcacacaggtttagggccccagctgggaacacacagcttgtgtttccagttcctctctgtagacttcgctcacggggctgcctttgatctcagtacagctctgcctctggcaaaaaccaacactggcatctcttagcagagacccgccctgggactttatgtcccaaccctctccccacccccaggttgcagaagatcattcaccgcaatgacggggcagagaattcctgcacagaacgggatgggtggtgcctccccaagaccagcracgagctcagggacaccatgtccctcatgatccggcagaccatccgctccaagaggcctggtaagagccgcttggggtaaagggggtccaggatgcctggtgatctcctttgagacagaggtgtccctaaggggacccattcctgggaaatggcacccaggtggcatcatcttgcccctggccctggtgggaggaggacattgtgagccagagcccagcccaggtgctggcatcaccccagctgcccagaggctgcctcagccgaggccctcagccctgcggtccggggcaggagacaagcccagaggggctgggtgcagcagcctggcactgccatcggggcctccacctgacgccctcacaccagcccatgtctttcagctgtgcatgcgcaggctctgcctctgtcttcttcctgttctgtgtggcccagccccttcctggaaccaggcagccctggcaggagtgagggccagctgcagggaaagtgaagggggcaacacctgccaggctgtgggtctcacgaggctcgggggagttataagaggccccctctctcagggaactcctcccaggcttggggaggaggcatcctggacccagccacgccccacagatctgaccgaagcaggggttcttggtcttgcttggaacccagattcagccccctttgggaatctaatcaagggtgtggaccctttcccagagraaatggtgtgttcactcctgagggtccatgggcccttgaagctgctcatggctcccctgctgcaggattcccctgggtgcccgtcaaactacagcttccctggggggcctccaccccatacttacccaccagcttcttaagagctcgagctcggacccttatagtagtaaacaggctycccagagcctggtggcctttctggggccacccggcagcctgcatgggacacccatggccttgtctcctccggccccagctctcttttccagctcagccaaggctgatggcggaaaagagcagctgacgtacgagtctggggaagacgaggaggatgaggaggaggaggaagaggaggaggaggacttcaagccatccgacggcagtgaaaacgaaatggagacagagattctggactacgtgtgacagggcccaaggctgggcctccctgacccggccagactggtgtctggcctaatgagggagccggggctccccattgccacccacagtgcccggaatggccctaggaggccctctgaggagagctagagtcccagcaaagggtgcagctgaccctagcactggctgtgacatgctgcttggtgctgcctctggtcctgaggggttagggacatccccaaagggtataccctggctctgccacccatgaaccagcccagcatccagccagtgagtgggcacccaatgcctctcaggatgagaccagtaaatgccggaggtggagctgggcagctgtggagccccaggccacaggccagtctcgcttggctctcatgactgtggtggtggagatagygtggggagcctcgcccatggtctcacgtggcaaraagtgcctttagctctggatcccaaccgtttggcacagctttggccacagccaggcccctctggaattgtccttattaaaccagtttcccgagaagtcttggtttcttggtgtgaatgttggcgctgcaggggagtcttcttattgccttggggcttgggccccctttgtcccttcatatattccttcattcattccttcattcattcagtgacatgctggcagtgctggcctgtgcccccctcacatgtggtcgggttgggtgagggcagctaggaggactccaggcctggggtcagttcttctctaaatgaataccttcttgacaaagtcatgggaaacgggccctgctgtcctgtggctgcccagtgtgaaactagtgggtcctgagcccaccgagcctgcctgcctggccccgctccccatgttgcccttggctgaggcacctcttgtgtctccccaagtcggcagcagcactccctcccaacctgtgtgcgtgccgagtatttgttgaagaaacagtcagttgtcagagaatggccctgttctggattggctggttgcttctgtgtggtgctgaacctgctcctctctcccctgtatttcctggggacaggtggaggctcagccagattcaggttcaaggtctcttcctaggctgcgtcagtctgcatgcacgggaggtctgcttactaggattgaccagcaggtttaggtgttgtcagcctgatgtgttggtcttttatctaacggtttttgggtttctgtggttttttgtttcatttgtgggtcttttttttttttttgagatggtcttgctttgtcacccaggttggagtgcagtgatgcaatcagggctcactgcagcctcaacctcctgggctcgggtgatccttccacctcagcctcctgagtagctggaactacaggttgtgtaccgccatgcccagataatttttgaatttttgtagagatgaggtctcactaatgttgtccaggctgggctcaagggatcctcccgcctcagccttccaaagtactgggattacaggtgtgagccactgcgtccagcctatttaatggcttttgaatagccgttgataattgcctggacctactacttccttaagggtgcaaaatggtgatttttttgaattatatcgttccctctgcatttagtagctggaatcctataaaggaatcttcctcatcgtctgtttgattaccctgaaatactattttcacagaaaagaagggaaaatgcctgttatcacctctaacagttttcagaacaatgagttagtgccctggcaagggccagtgacagggcaggagggggtggagagcgtgtttcctgggctgcctggtgaactctcacgtctgtcaattggaggcttgctttttcatgcccaacttgtctatctttgcccagaggcggcctcaggttgacctctgtagtcctttgacacaagccttgggtcttgggcaccttccttacttacagctaccacgatgctgcaggctccagcccctccctggcatttcctgttgcggacccggcccaaccatctccccagggtgcactcagtcggtgtgaatatggtgtttagagaccccagtctggtcaccaggggtggggcttgctcctgggattttgttactgctagggctttggaagagacagagccaggaaataagttttttttttttttttttgccaattttaaaaaaataaagtatgaggctgggcacggtggctcatgcctgtaatcccagcactttgggaggctgaggcgggcagatcacttgagctcaggagtttgagaccagcctggccaacatggtgaaacccagtctctactaaaaatacaaaaatcggctgggtgtgatggcgcacgcctgtaatcccagctacttcagaggctaaagcaggaggatccctcgaacccaggagttcaagactgcagtgagctatgattgtgccactgcactctagcctgggtgacagagaccctgtctcaaaaaaacaaacaaacaaaaaacctctgtggactccgggtgataatgacatgtcaatgtggattcatcaggtgttaacagctgtaccccctggtgggggatgttgataacgggggagactggagtggggcgaggacatacgggaaatctctgtaatcttcctctaattttgctgtgaacctaaagctgctctaaaaatgtacatagatataaactggggccttcctttccctctgccctgccccagccctcccccacctccttcctctccctgctgcctcccctctgccctcccctttcctccttagccactgtaaatgacactgcagcaaaggtctgaggcaaatgcctttgccctggggcgccccagccacctgcaggccccttatttcctgtggccgagctcctcctcccaccctccagtcctttccccagcctccctcgcccactaggcctcctgaattgctggcaccggctgtggtcgacagacagagggacagacgtggctctgcaggtccactcggtccctggcaccggccgcaggggtggcagaacgggagtgtggttggtgtgggaagcacaggccccagtgtctcctgggggactgttgggtgggaaggctctggctgccctcaccctgttcccatcactgcagagggctgtgcggtggctggagctgccactgagtgtctcggtgagggtgacctcacactggctgagcttaaaggccccatctgaagactttgttcgtggtgttctttcacttctcagagcctttcctggctccaggattaatacctgttcacagaaaatacgagtcgcctcctcctccacaacctcacacgaccttctcccttccctcccactggcctctttccctccccttctgtcactctgcctgggcatgccccagggcctcggctgggccctttgtttccacagggaaacctacatggttgggctagatgcctccgcacccccccacccacaccccctgagcctctagtcctccctcccaggacacatcaggctggatggtgacacttccacacccttgagtgggactgccttgtgctgctctgggattcgcacccagcttggactacccgctccacgggccccaggaaaagctcgtacagataaggtcagccacatgagtggagggcctgcagcatgctgccctttctgtcccagaagtcacgtgctcggtcccctctgaagcccctttggggacctaggggacaagcagggcatggagacatggagacaaagtatgcccttttctctgacagtgacaccaagccctgtgaacaaaccagaaggcagggcactgtgcaccctgcccggccccaccatcccccttaccacccgccaccttgccacctgcctctgctcccaggtaagtggtaacctgcacaggtgcactgtgggtttggggaaaactggatctccctgcacctgagggggtagaggggagggagtgcctgagagctcatgaacaagcatgtgaccttggatccagctccataaatacccgaggcccagggggagggccacccagaggctgatgctcaccatggggcgcctgcaactggttgtgttgggcctcacctgctgctgggcagtggcgagtgccgcgaaggtaagagcccagcagaggggcaggtcctgctgctctctcgctcaatcagatctggaaacttcgggccaggctgagaaagagcccagcacagccccgcagcagatccccgggcactcacgctcatttctatggggacaggtgccaggtagaacacaggatgcccaattccatttgaatttcagataaactgccaagaactgctgtgtaagtatgtcccatgcaatatttgaaacaaatttctatgggccgggcgcagtggctcacacctgcaatcccaccagtttgggaggccgaggtgggtggatcacttgaggtcaggagttggagaccagcctggccaacatggtgaaaccccgtctctactaaaaatacaaatattaatcgggcgtggtggtgggtgcctgtaatcccagctactcgggaggctgaggcaggagaaccgcttgaagctgggaggtggagattgcggtgagctgagatcacgctactgcactccagcctgggtgacagggcgagactctgtctcaaaaaatagaaaaagaaaaaaatgaaacatactaaaaaacaattcactgtttacctgaaattcaaatgtaactgggcctcttgaatttacatttgctaatcctggtgattccacctctctgttgttcccattttacagaaggggaaacgggcccaggggcagggagtgtggagagcaggcagacgggtggagagaagcaggcaggcagtttgcccagcatggcacagctgctgcctcctattcctgtgcaggaagctgaaagccgagctactccacacccgggtccgggtccctccagaaagagagccggcaggcaggagctctctcgaggcatccataaattctaccctctctgcctgtgaaggagaagccacagaaaccccaagccccacaggaagccggtgtcggtgcccggcccagtccctgcccccagcaggagtcacacaggggaccccagatcccaaccacgctgttctgccgcctgcggtgtctcaggccctggggactcctgtctccacctctgctgcctgctctccacactccctggccctgggaccgggaggtttgggcagtggtcctgggctcctgactcaaaggagaggtcaccttcttcttgggcgagctcttcttggggtgctgagaggccttcggcaggtcatcacgacccctccccatttccccaccctgaggccctctggccagtctcaattgcacagggatcacgccactggcacaaggagacacagatgcctcgcaggggatgcccacgatgcctgcatgtgttgcttctggttcctttcctccagttccaaccgccgcactctcccacaccagtgtgacagggggcccatcaccctagacttcagagggctgctgggaccctggctgggcctgggggtgtagggccaccctgcccttccccacctggaacctggcacaggtgacagccagcaagcaatgacctggtcccaccatgcaccacgggaagagggagctgctgcccaagatggacaggaggtggcactggggcagacagctgcttctcaacagggtgacttcaagcccaaaagctgcccagcctcagttccgtcagggacagagggtggatgagcaccaacctccaggcccctcgtgggggtggacagcttggtgcacagaggccattttcatggcacagggaagcgtggcgggggtgggaggtgtggtccctagggggttctttaccagcagggggctcaggaactgtggggacttgggcatggggccatcgactttgtgcccagccagctaggccctgtgcagggagatgggaggagggaaaagcaggccccacccctcagaaaggaggaaggttggtgtgaaacatcccgggtacactgagcattgggtacactcctcccgggagctggacaggcctcccatgtgatggcaaacaggccgacaggagacacggctgttgctcgtcttccacatggggaaactgaggatcggagtcaaagctgggcggccatagccagaacccaaacctccatcccacctcttggccggcttccctagtgggaacactggttgaaccagtttcctctaagattctgggagcaggacacccccagggataaggagaggaacaggaatcctaaagccctgagcattgcagggcagggggtgctgcctgggtctcctgtgcagagctgtcctgctttgaagctgtctttgcctctgggcacgcggagtcggcttgccttgccccctccggattcaggccgatggggcttgagcccccctgaccctgcccgtgtctccctcgcagctgggcgccgtgtacacagaaggtgggttcgtggaaggcgtcaataagaagctcggcctcctgggtgactctgtggacatcttcaagggcatcccctt

SEQ ID NO: 97959 - DNA, 20018 bp, Homo sapiens
ctggtgctgttgaggttcagctcttgacttctatggtggctgccactgggcaggagggaagtgatctacttcccagcaagggactgcagacagggccaggaggtcccccttggaacatccaggagaagataaagggtggtagagctacttagcatccatacagtggcaggacagacttcccggatgaaaggtccagctctcctcccacactgacccccactggcttcagtccatggccagatttttagagcccaaacttcattaattctgtctctctctctaagatataaccatataattaattaacaatttccttggtcagaagagagaaggtggttctggagtctcactgttgtggaggaatggtagccatgagctaccataaggccagccatgtctgctgcctgcctagcagggggctcctggaagcactgctcataggccacagacccaattctagtccccagggaggtccctggatccacacagagttggtttggcttttaattcatctatcccagtgccccaactaaaccacagatttagaagtccagggaaggcacgtctctgcagcaagctgatcccagcctaggtgctgaggtgtgcccccaatggcagccagacaggtctgtgtctccaaccaagcaccttcgcttgcatttatccgtatgaacccaatcattctttttgctgtactcatttttacttgggaaaccctttgatgcttaaaatcatcactaaggaaaaataaaactaggttggctttttatgcaggttcctagaattgaatgcaggtaacttataaacttgaatgtacaatgggagattatctatgaaggggatttagatccatgggcaccaatgcattctgtgggctccattcaagtggatcagctctgtcccactctccatgactcaccagtatctggcatgatgcacaggatggagggtatgctaggaaggaagggaggaaggaaggaaggagggaaggggaggggagggatggagagaggaagggaaggaagaaggaaagaatggagggagaaaaaaaggaagggagggaagaaggaaagaagaaacagggagggagtgagtggggagggaaacaggaagaaaaggagggtgagaggaagaagagagaggaagagaggaaggaagaaagggagggaaggggcaggaagggagggaggaggagccaatgggaaggaagggagaaagggaagaggggaggaagacaggaaggaagggagggaggagaggagaaaggaagggagggaggtaggaagagagggaaggatgaaaagaggaaaagaaaaaatatgttcttttcctggtttcaggagctctatgaggttttaagctaaaacaaaacaaacaaacaaacaaaaaaaaaacacataagaacagcatgaccttgaagcccacaaattgcccaaatccttgtccaactccactgtttgcagagcagagagatgacacccaggcctggcctgtatcattcgaatcctctgctcactttgccttaaaaactggttttggtaggaagaccctgggtaaaggtgggtgctgacttttctagagagggctgaggagacaagcctgaggactcaaacctgccagaggaaaaaggctctagctattattaacagcagttgtactatgaattacataattgctattcttcgagcctgcagccaagtgccaagattcctcacacgaaccacgtgaagagggcaacaatatccccaccttacagctggaagaaaaaacagctcagaaagtgacctgctttaaaaaaagaaagacggcgatttgctgaaggtcacagagtgcatcctggactaggatgagacgggagaggcactcgcgtaaggggcaaaatctaagaggcgccaaaaaaactcaggaaccaaaaccaatgatattttaatacattttaaaaaccaaaatgtaaaaattcatgatggataaaatatcaacattttaaataacatcttatgtgacctgcctcatctccttcaccttagtcccagccctggattctagagtctagagaatttgaactcaagtctgaccaattccgagtctgtcctcaacaacccctgcccatatgctaccactagacccagctattcagaagcttgaacagctctagtaggagccctgagtttaagccaccattcataagggaggaaagaccactttgggatcattctcaaaaagctttgggcagattgctctgtgtgattctgcctggggacctcggtgagcaaaaccagcagaaacaacccattcgctagctccagggctgagaggtgttacgtggagaaggaggtggggctaggagaaagttgctaagagccatgacctagccagggtctcaggcctgcccaagtcattcctgacccaaagccaaacccaagccaagagccccaggtggcgaagaaggacatggattctacagccaggtggcttctgaacaagcagggggactctcccacccgcatctctcactgccatgttccaatgttaatgcctttgtacccaagggaaagccgaggtctgggcaagagagatgagttgtccagagtgtgggcagtgccagagccttctggaggcttcttcatgcacctgcctgccctgcccctggagaagagcaactgtggtcggctctgtgggtatgggtgggaggtcttggacctgctagggctctgagtccatcaagaggctaaaggtctaaaagaaagcaacaccaaaggactgggcaggcaaggactggaattggaagcaagagatttcaagaggaagtgggaagctgggggatgagaggagttggggtcctgaaaagagagcacagagaacacagaacttggacactggggtggcagttctggctcttggttaagactgagtgatcctggggaccccggcccttgatgtaccttcatcacactgattttatttatttatttattttttgaggcccccaatgcacccctgccagtcccttggggagggggccaagaattgctcagggtggggacctggggctggggagaggggcctgcctcctgctgtgggaacaggggctcagagaagttgggcatattgccgaggctcatccccagctcctttggacctggaagccctgataccccacgcaaccaaccaggcctctttcccaaaggtgggaaagtagggtggactcagggccccctggacgctgagtaaattcccagctaaacgagagctcaggtgagcccccaaaaatctcttccgcagtggacagggtgagatgcaagacccacaccgataatgggaaaatcagaggaggaggcacctgcatggagctgggaatccccaaatcggaataaaacgatgttattgagagagggctaaatcccagagtaaatttcaaacgaaataaatcgcacagcacattttagatgataatagacggcggtaactcaatactaatgatagtgtactgacaacccgctaatagtcttgggctccaagaagcccggcaaaaccggctggggcggcaggaggtccggctttggtgttctttcccaccgggagaggttggagccaccctcactcccggccgctctcaatcgatcgcagctcccttcgctcccaagcttcgctttcgctgggtccgggatccaaatcccaacccaagagccaaaggccagaaaaggccctggcgttgccagctgcttgtcgccctggggaggggcggctccggacccgcccggggcagaggaggacagagcggacgctctggggaccaggcggtcccgcgcatgcttggccaggggcatcgccgtggctaacaggggggttgtgtggtggcgggggctcgccgtcgatctaagtgaggatctcggtgctccgaggaagatgagattcctcaggggatgcgggcgcaggcctgggaggagtgggtgatggggagggaagtggggtctccagagacgcccagagcaggagcaaggccaggctggggactggactggaagagccagggcagccggctctcctcgtgatttatgggcccctcctcatccaccaaactgaaatgagctgccggcccggaccgccgcgggaggtgcccactgcagtggccgccgccgatccagagcctgggcccccgccctcccgcctccccgacagcttgcagccgagccgggccactgtcccccgggagccgcccgtcctcacccccagcccggccggcggcggggccgcttccaatctgccggcgggcacagggggagagcgccgggagccgggcgcggggccaccgccgacctagcccgagggaggagaaagtttttgctcctcccgaccacgccaggctgcccccgggagaattctgcgtttagagggcatgcgggtgccttacgatttgctgcggtctcggtcgctgagcccgacgtaggagccggggtagtttcctgggggctgggggtggtggcaggggcgtgcaggccgggctggaaaggcctggcttcccgagcctgcggggggtaaaaggacgcctctgacccgcccgacctcgatgaaggcgtttgggctccgctctgtccgccctttccgccgcagacccgggttgcgatccctggggctgtgcagagaggatccaggcccgggacacagttcggatctgcccgcggtcctgggccccaacgccgggggctgaccctagaaaggcgctggactggagcccgtgacggggtgggaagggcgagggggcgcatgattcacaatgaaaaggccacgtttccagagttgccttgaaaatgcatccctggacgagctctggctctgcgtggaataagaagccgttagcaggcgtctacactcgcactcggaagctcttgcgtgggtcctgttcagaggtacaacagcaccggccccccaagaggtgcccatgggagaggccatcagtggggggtgggcgggttactgccttctttgtcccttgagctgcctcccttgagccacacggatttctcgaggtctccctaacgcccctgacaagatcttcccaagtcctccaacctcgccctgaagtgaagccatcggtctcgtcacttcccaggaagacacctggctttccccactcccgccaggcccacagggtcccaagaggccagagagacaggactgcaaattgtcctacatgggaaacaccgagagcccaacagaaatgccgcaaacaacataacttgaattttcttccccacactagaaaaggggttctcgacgcgcgcgcgcgcacacacacacacacacacacacacacacacacacacacacaccacacttcttcctccgctggttttagtccctttctgctgctggaggaagaaaaacgggggaaggaaaaaggatctacaatagacctgccgacgaataatttgaataactgtgggaaagggtcggggaacgctaaaaaaaaaaaaaaaaagcccagcgcacatcccagcccaccgcagcgcagtcggctcggccccctcccctccagccgtaccccccttggctaatcaccctcattaggagcttcgtcaccggcctaatgaaagcaaaccgtgtggaaatcgccggtaaacagttgggtctgtgctgtaattaattcggtgtctcttttaatcaaactgaaagggaatcgggcagcggcttgcggagccgtgacatcacccccaaaatcggccagagccaatcagcgtcatcactccggggacacgtgggcgagtccccttaaaaaaacacacacaacacaacgaaaaaaaagaaacaacaaaaaaaaacccagacccaaagtaaaagtgacacaagttcattttttaaaggaagggggggaggagaaggcgcgcgcggaccggcagagagctgccgccgaggagcagggaggcgctgtccacggtgctgacgggcccccggagcggcgagggcgcggagagaggacctccccggccaggtggagagtcatgagccgcgggcagccgccgccgctctccgcggtgctgatgccgccaggtgcgctcctttccgcccgctgctagcgcggcccgggcccgcagctatctgcggtgctgacctggccaccctcagccaccacttgcctggaagaagcgtgcggtttggatttttaaaacgccattctttatttagattccaacatcctcgcgtttcttctgtgccaagggggccctcgggccgtccgtctccccctttgctctccccaacttggcgcgccctccctcccattcctccctgacactcccaccaccccccctcggctcggcggctcggcgcgatgctgcagaagacgcactgagcccttttggatctaatgcgcagaggaggttggcccagagctcccgggctcccccaaggctgaactccgtccaaggtgcccgcaggctccctgcccgccttccccatgccagcccgcagctaggggcaggggcagcggcggctggggttgggggtgggtggggagcttttggggaggacaggtcgcagcttggctatggaaggctccaatggctttgggatcgactccattctctcccaccgcgcgggcagccccgcccttcccaagggggaccccttgctcggggactgccgttcgcccctggagctgagtccacgctcagagagcagcagcgactgctcttcgccagcctctccaggaagggactgtttggagacggggaccccacggcctggcggggcatccggcccaggtttggactcccacctgcagcccgggcagctctcagccccggcccagtcgcgcaccgtcacctcctcctttctgatcagggacatccttgccgactgcaaaccactygcggcctgtgcaccctactctagcagcgggcagccggcagcccctgagcctgggggccgccttgcggccaaggccgcggaggactttagagacaagctggacaaaagtggcagcaacgcctcatcggactctgagtataaaggtaagaaagcaggaggtgaaaacttggggggatgctatgtatctaaaaactgacatttaaaaggaatacacatggcgggacatgcactcgctcacctgggggctcccccagggctcaggttgagcagtggttctcctcagaacatttcagccagtcctgtggttatgcctttgagcaacaaagagtctggtggagacagtgtgggcaggggagggatactgygtgcccgagaggagatttccccaaaatgcacaaagcaaactttctaaacttcgactgggacccctgcccttccagcagtgctggtggacaggagcaggtcccaatcaggccagtggctctctaggaagaaaccgtgcagaagcaatggaagactgaaagggttctgctttatagagtgaaaatacagcagaaaaatttcagctggagccctgagaaccgtcagaattttctgccttttaatctacatttccagacaggaagaaaaacagggcttttcctcccaatgggcccagtgtgatccgggttctgtgagtcatgaaaagaggcactcacttcaaagcagaaacctcagccaggaagctgcctgggagcaggtcagggggctagtgcagagggcagtaccctgcacccaccccccaatggctctcattgaatttgattttaagtgccttgagcaaccaactccgggttttatgcaagttccagggattcctgagtaaccagccttttctcccgctacactggggttgttgcccctccacttttctttttacctctatgaatcttcgttgttgtttgttccattttcatcccatcgtaaccaaggagatgagatcagggttaaaaggaaagggagaaggaaggaaggaaggaaggaaggraggaaggaaggaaggaaggaagggaaagggaagaagaaaaaaaaagaattccctaattttgtttctgacccccagtcactacctcgactttagctgtttttcaaagccagaggcacaaagttctttctaagggagaagtcaaggggcagaaggtgaagaggagtatgagggcttcatgggagacagccccacgtccccatctagcagatcactgggagtgggcagaggctgttcagagctctttcaagcacataattgattcccagaaatcttttcaagagacaaaatttccctgtaagggcaacttctttattgtcttgccccctcccccaacacccccaccccacccccagcgccatacytcctggtccctatttggaccaagtcttcccaaaattttaggaaggctcatttaacactctcctcccaaccaagaattcgtttgtggatatgtcctgactccaaaccgaaattcatcggtccgactgcacatcccattttcttgatttcccccacacaaatggccgagcctccttcagccaggctgtgccgaccatgcctggaaagtaggcaggtttaacggagcggccaggaggagatccagaggcatgcgggtgtccccaggcccgggcccagtggtccttgctcctcccccggggggcctgcttagagaggcaaagaaaacttgcgctggagagagactggcatggagaagggggaggaggaaggagggggaagtcaatgtaaatatatattcataacatcatggttattatttaccatttgcaacaagaacggccccgctttagttagagcaaagagcacgaatcttccaccgcccatgctaatggctggaactggagatagtgaggcccttgcctccttttatttatttgcccccaggaaggattttgaggacaggtttcgtttaagataattagaatatcaattttcttctcctgtctctgaggatatctgatcgggaggtgacgagggccggctgtctacatatcgcttaaataggtttggagcgaagggggtagaaggtcttgcccaacccccaccccaggtgttgctgcctttgcccctagtgaaaaaaggagcagggtcaggcagcgaggccttgtctggagcgtttctcaaacgtggaggggaccttttcagagctgagaaacagacaccctgagccagtccgtggagcatttaagctggtctactctccagccgccttccaagctgagtcatttcctccaaggagggcatgggggaaggtcagcctcatcccaagtttctgctatcaaaggctcttcaaacaatatttatttgataatatttaaagaagccaaaactcggctttgaagtaaggtggtcggcgacactagcggctggatccaaggtccagggagaacccaaaccagagttttgttcccagcaggcagggtcggtgaatgggcctggaactcggggacactgagatgtagcctctagaatcagagtctgggaagccagtaccccctgggctgagcctatccaagaggaggccaaggcagagtgggcacagaacctgcattcaaaggctccagtccacgctggagggggaacagaagaaaagccccartagctgacccattcttcctgacaccacaaactgaatacctcccgacctccaacgcagacctcgtccctgagaagcgggggattttcattaagtagcccaggcaatttggtcaaaaagtaakagttctatgatatcaagtttgagatttggatgatcgtttcctcaaacttatttaaactatctgtctgcacagacagaactcaagtccccctattccaacacatatccttctccatgcccaaatatggggagcccacagggcagggagagcctggtgccagcctggaggaggcaggtggaaagccttagcgggctgccgtttctcctctgcactctcctggctcaccaggctggatgccaggccctccttgcagcgaagcgctgccttttcagttgaaaagtctcgatccctaacggctcaattaaccggattattgtttcctacagagagaaatcaccttgcattcagctgaaccccgtcactgcaaacgccacgcacaatgaaactccaccataaaagaaaacagagaaaaaagggagtaggttgggggaaagccccagtctgagccgccaattttggggaagtggtctagctggttatataatcgctttagagggagaaggagggtgagcattgagcttgttcgattaagtgttttctgtgcagtcaaagccgaacgaaagtgtctgggataaagaaactacctgtgccaggtctatccttcgacctcaggagctgggcccccggtgtaattctgtcccgactgtggggtgtaaacacacgatgccacgcaggtgtagcaggagccatcgttagcgggcaatgtaatgacaacggaacgcagacctgggcaatgcgcgctgcgcccaaggggcaagcgagtggcagggtcgcttattctcccagtgctcggcgctcgcagacccggagccttccgcccagcgccctgtgtaggtagcgagtgtcgggagaaatcatcactacgaattcgtttccatataggggcaacgccaggcggggcacaatgatctgtccttgaggacaaagagtgattccggagagagcaggtttttgtccctccacgcaggtttctctccccasaccccagccttcggcttcctcccttcctgtcacggacgcagccggagaaactggggcccagacgcggagctcactccgccagaaaccctgggtcccttcccctacgctggcaggctgggtccggttccatcgtcgcggctccgtttatccctccarggagcgcgggcagagcgccgagcgcggcgcagggactggagttctcgccagcttcgggttctttctccccggagctgcccggggggtctcggcctcgggcgctcccgccgccgtcctgttcccctcagggttcatgtcctgttcccggggccccagaggtcccgtctgagagcggcccccgcgagcttgggtgtcgcggaaccaccgctgtcggaagccgagrttacacaaacgccacgggcaggagcgggagggcaccggcggcggctgcgaggccgggccctgacatgccgctgtgtccgcagtgaaggaggagggcgaccgcgagatctccagctccagggacagtcccccggtgcgcctgaaaaagccacgcaaggcgcgcacggccttcaccgaccatcagctggcgcagctggagcgcagcttcgagcggcagaagtacctgagcgtgcaggaccgcatggagctcgccgcctcgctcaacctcaccgacacgcaggtcaagacctggtaccagaaccgcaggtgaggcctggctgcgggggtagaggcagaaagggaacttcccctttcctcacagctcctggaggggaccaggagtctacaggttggtgctaagggagggccccagagcctcccccattctgtaaaagtgggaaactgagtccctaaggggacaaggccttgcccaaagtccccacagcgagggacagagatgagactagacttggtgtccagcgtccagtcagccctcccccggatgggtggacagacacataggccactgaaaatccaagtcctgccccagctcagccggagtggggggaggtctgcctggagcccccacctgagccagcgtgggtcttggaagccccaggcccttggaggggtgacagtcttgatgcccaggaagcctgtgaagaggacggccaggcagtggcccttggggtgttgaagcctggcccagaccgggcagctgccgcaggggcctcagagtttctgtgaggctcttcaggcctccccagcctttctggtcccaaaacccgaggggggaactggccaagcccttgttccttggggacagggtgactgggaagtgggtgttggggcaccggacttgaactcgtttcctaatttccctcccgaacacactcaccagacgtagatgcaaatgtacaaacacagaggcatccacacactcaacccaaatagccacacaccgacacacacatcaatacaacttgcagtcacacacgcacgcacgctcagccccacagtcactcgcacgctcttagcagrggcaggaatggtgcttttcataaacaagcctcagaacacatcgccccattaataataaatactgattactgctccgggcatcaataattaaggcctgttacagtaattacacaattatgatgatgatgaataattcagggagggaaacagggctggtgtggctgagcccaccttagtgggaccctggctggtccgcctagcctcacctgcaggtgagcctagggtccaggcctgacttctccaaaccccaggccgttggctggccaaggcctctggactttggggccagacagtgcgcagggctcgcagtgcgagccctggaggatggcaggtgcagcctgctccagccggcagggcgtgcgagccgggagcgggtcctctccggttgccatttcaggcctgctcgcttctgctagcttgcagcccggccagcctgcagaggaatcaatcgcattcccttccctgaagagcacccccccatcccctcaggcctctccagggtgatcctaccttcataaagaggcacgcgcagggaggagcmccccctacccagctccaagggttcgttctgcgatctcctgggcagggtaaggcgcagttagagccgggctttggggtcagacagcagggcttaaaacccaggctcctttttgaaaaccggcccagacctcagttttcctctctgtaaagtggggtaagagccacggaaggccggtggaagataaaaggagaggatgcacgtaaggcgtgcgatggtgcctggcactcggttatttattaacaaatgagtacgatccctcttggcctccctacaggctctctgggccaagcagtggggaggggctggggtcgctggatgccctagccctgatcccgccatacgcgtttatttcggcccccaggactaaatggaagcgacagacggccgtcgggttggagctgctggcggaggcaggcaattactcagcgctccagcggatgttcccgtcgccttatttctacccgcagagtctggtttccaacctggaccccggcgcggcgctctacctgtaccgcggccccagcgcgccgccgcctgctctccagagacctctggtgccccgcatcctcatccacggactccagggcgccagcgagccgcccccgccgctgccccccctggccggcgtcctcccacgcgccgcgcagcctcggtgaggcgcccgtcggctccggggcctcctcccgcgggctcggcgtggccccttccgcccgcctttctgagggcgcaggttcgacgccctttcccgggagggggccctgcccggccctccctggcgccccagcccagtgccccccgaagggccaaatgccaagtccactgaggcccggaccccggactgcgtctccccagcccccctcggcgtcctctctcgcggccgctctgtccgggagccatccccacccgccgggtgtacatacgcgtctctgccactccccacccccagcctctgccggctcccctaggcaacccctttctccccaggagcgggtgcggmtgattcccaggcttcgctctctcccacgccccttctacgctccaggtggagaacagcccctctccccgcgcccccgccagggagagaaggggagtgcggagccccgtctccctacccctcgagcacctgggccagcggctgagctgtacataccgtgtgcaaagtgtatatgaagttatttattcgtgacccatgagcccgtgaccgtgtccgtggattagtgagtctgtggcctgtgccctccccactcccaggcggggcaggaaggggccragggggcttgcccacccaccccgaccccagcccccagcctcagccccggtccgggggcagccaggcctctcgggttctctcttttttaaatgtcgaaataaacttcttacaaatgaccaggcgcctgtccgcgctcgcgtcgctgggtccgcactcaacccctctcccatccctctcctggggactcggtttccttccatcctcaataacgaaacatttttgtcccccttctcttccccggtgctgtggacatgcgcgggggccccgacgggactcgctggggcccgggtctcccctccctggcctcagtcttcccatctctacagcgaggccagctcgttgttcccctcctcctcctctgtctccatctggttcctagcggctcccagacggtcccgagggccggggcgggggtccgtgccggaacaggcgggggtcagcgcggggcctcggtcggctgcgggccgggctgcggggccctcgccgagccgactcatctggccgcgacaagggccccggcagctggtgaccggcccgccgggcgcgggccgacagatgggctccgaggctgctccccccatcactcccaccctccgcccagcgtccggccgcgctcgggctcccgacgctcgcgggcgccaaggcggcccgggcctcccggcctcccgcaccaggcaggactccgcgcgccttcgctgcgaaccagacgccacatcgggtaaacccccactcccacatcttctcacctcccctttaccccgggaggaggttggaaatgagacccagaggggagccaaatcccagcgtctgccccatctcttctggctgccccagaccgcagctctagcatctcaggggagaggggtttaagtcccgagtcagactcgaggcttccagttcacgtccaaagggccacggtcacctgagactgctccctctctggggaggtgggcgcaggtgctcccttcccacacaccacctgcagctcgctaaccctcagcgctgggaagttttgggggccggcaagccgtggcccctctagtttgggggcagggtttctctgaagacgggggctgtgttcagactataacccctctcgaaaaccatacccacagccaggtccgctactgtttcctccctgccccgaaacaccctcgcacagcagctttctttcctgggatggcgagggtattattctaattttgcaaaatgcacagcagctaattaagtcaaggagcccctcggctttcgagttcttttgcatgtgaatgggggttggtaaatccccagctctggctctggtggggggtgaggagagactgtccccaactcagggttaatgaagtgggaaaggagtctctcatagcctcctgcaaacaaaaccccccatgcaacaaaccctgcccaaatcctacatggattgacttaaacccaggggataagtgctttaaattaatctcattgaataagaatgagaccaaacaaaactctttaaaatcatattaaaaatctatcaaaggacaacttgcactggtgtgcttttcattttgtgaaagtgaaggagatagaccgtagcaaccaccctcacatttacacagtggcagcgcaaaccacagacacattctcaactatgtaattgtccttgtacctcagaggcgatttcatatcctacattaatgaagaacaaggcttccctacaagtttataattagaatattttaaattgtcctgcacatcccatctgtaataataacttcacaacctttgcagtgaggtgggctcctgccttccatccacttagaaggctaaattggtttctgttcccaaccctgaggttgggcgagctctcgtgtaagaaaaaaagaatgaatgtgggaccccaacaggcctgacaataggagagggctgagaagccatcttcccccgctctgccactgacccatcccccctcataaacgccgactcaacagggagggggcaacaaagttgaaaagaagtttagagctccctgctggccctcggtcgcaagggaaattgaggactggggcaagttgagaacctgagctgattttcagggtgccccactccccccacagcgacaggcctggctctggattcttcctagtgtggagcagattaagagataatgtctaatgatcaagggggaggtttaacaagaccagttaagaagccttttcaagcagggcaacttctcccgtggaaaagcctccaacttgcgtctctacaaagcaacgcccggattttaatggcttccactgactgtggcctgaagggctaagcggggaggcccctggcagtttgggagatacctgctccgaaaggtctcatttactcccctcttccctaaagttctcctcccttcaccccagggggaaaagaaaaaaatcaaaataacccactgggcttcgttaaaaaaaaaaaaaaagtcctttactgagatttggttggttcgttgcttctctagagtgcaaggggctgtctgcacatcagcacggacttcatctctcagcaaggggtctctgcccttcagtgcgtgagaatgaggcccgtcaactgctaaggctgtggcaaacatgaggatgttttggtttccaaaaaaacattctacaagcccactcgggggaaacgcttttaggctgcaacattctattaaatgtccaaattctgtgtgactctaaatatgggaaccaggcttatgatatagagacatgagtaagtttgggaaattttaaaaagaggcatgattaaacatacacaaaaattagaatatgtacagtggaattaggctaaagctttgcctaattggtgcctgaaatgtataatctgtcaagagccataatagaagagaaagagatttattttaaggttatttaaatttaaacaatattaaccttaaatctgctaaatccatgtttctttattaactggggtaatatagtgattctacttagaaacagacccacatagcatctatggcaagaaaccctcaccataagagttagcagattaagtgtgtaagttttgatcttggaattatcgtcactcacacgttgcatgattctagcacttctctttccccccagggatgccgaactctgccaattcgccctttagtggaatgagtactgggggagaaaaagtaaggtttctctttgatcatccccaatcactggcattaatcctgtttttcacacagctgggttttgtctataaagtttgatccctccttttctcatccaaatcatgtgaaccattacacatcgaaataaaagaaaggtggcagacttgcccaacgccaggctgacatgtgctgcagggttgttgttttttaattattattgttagaaacgtcacccacagtccctgttaatttgtatgtgacagccaactctgagaaggtcctatttttccacctgcagaggatccagtctcactaggctcctccttgccctcacactggagtctccgccagtgtgggtgcccactgacattcacctgtgtctagaacggaggcaaggatgctgaccccccgtggtccctgcaggaaggcccaccttgccaactctcaccaccctctcgtggccactcagaccttccaaggatctgggggggatctactgaagtggtgcctcaacactggtcctggggagaccacagagggcggcacagtcactgcagaggagaaggaaactgagaaggcaagacacagtggagaggacaggagcggtgcccacaggtgtggaggcctccaaccctttctcttctggacccctctgcaagtgcccaaatcttacatttattgggaaatcaatatgctccagggggcctctttcaaacctcccagaaaacataatgcaggggcagggcggggtgggtcgggggcggggggcgggcagctgtggcctgggtcacaatacaaagacccccagacctttcttgaagacaagacaggattcgatagggaaaaaaagcttgggatactggtgccttttgacttcaaaggcaaataataaaaagccaacagtaaatcaattagccctgagagagtgagttttcagtggacatgaaagagggagcaatgcatgtaaatgcaacctcgtgtttccagaagaaaataagagggaccacgagcctgagaacacattcgtattttttgacccagaccaaaaacttttggtcctttttaacggtacattcctacattaagaaaataattagtgataaatatattctctttttgtacaaattcaattccagtttttaacaccctaattcacaaaattcatgccaatgtatgcgctgataggctgaagccaagctgtgaaacttcagaacacagttaagggcagcaatcaagcccgttccaggctgacgcgcagggcgttcttacatcacatcccggggtgccagctcaaccccggcacgtcagcacctgggtgaagggagtgccgggcactgatgggatcaatacaagacacagaccccttccgtcgggagctggctagtctctacagtgccccacaccactgatttctatcaggctccagggcctcccatggaggagaagggctgtggcccctctgattcttggggacgtggtattcaggcaaaggcgcagttatttttcacaaggctcctctgacaagaactggacatcaatccactgccacccggggcttccaggttccactcgaagacccagagagattttaaactttctgggaagtcttgctgtcccgctgtacacctttttgggtttttctccattttaatgttttcccacggccaaagcagggtgtcggctgcagactgtgctgcaggggccggccaccaggctctccaggtgcgttttgctttttgaccttggcgacgtcggcctccatgccgcttgagtattccgaacgtaggatttcagcgaggctgtgtttactctgggtcttcttatgaaggtcaggcctgaagaacagtaacagcagagagggaaaagaaactttattatttttctttcccatttggaaagaggctgatagcagctggttctgagactgtgaagctgacatttttgtattaacagaagtacaatcccttcaatagtacttgttttgatattcgatgcaccagaagattagatacggcgctgacagattttcataacagcggcaaaatatcatggcatttttaaaagtgaggctttgttctgtgttgttttcatggggaaaaaaagaactatacaccctcatgctctgatggcaaatgaggtgtatgatacagcggtttgccaaaggacagggaaaaacccaccgtcacactcaacaacatgaagcagtgaaagctcacggcagcttcccagtaacccctaagcagcttaaagcaactggcctcctcatgggctcctgagggcttcaggactcagccctgcgggagcagagtccagcaagttccacgcagccctccagggttccacagtgaaggctgggatgacagccagatagctctttatgaacggaaaaaactcttaaacatatttctgaccctacaaaacccaaacccagggcacagcctggtcaatgtctgcatctaggattagaccagcagctttctgcagcccacacaaacccgggtgttagagggaggtctctccctaccctaagtcactcagaaaatgccaaaggttgaaaatcaatttccgatgtcgaatcctgataactgttctgaaaagatggcaattttaccatttgatcggaagatcagaggaggaaatttgtagatgttcaatcatacataagaagaatgattatgaaaactgaagagtaaaacaatgtttcttaagacaggattttaaccaaagcaacaacaataaaacaattaccaataaatccacacttccttgctggcaactccttcaataccaaaacggcaatgtcttaggatactatagtgtcatggagttctcacaaagacatatgttacgttctgctactacatttagagcattttctttgctgtaatcagagaataaactgaactgaaactgtggtcaaaataaatgtaacaatgcctttaaaacccaagaattagaaataagactaatagtgtgttgttaacctgactgtg

SEQ ID NO: 97960 - DNA, 63635 bp, Homo sapiens
ctgccccgggtcacacagtgtgagagccagggctgggatgagacttaggctttcacaggggagggtctcagtgcccacggcccccctgctgccaggcccacacagctgctgacactcacaccctggttggcgcccatcgtctccgagggaaccttcaacccagagcttctgcagcacatctaccagccactgaacctgaccattggggtcacggtgtttgccgtggggaagtgagtagtgggctggggaaggggagggaggtctccctgagccacaggagtttatagttgggaagagaccagaccagacgtgcacacaggaccctgctgggcacccaggaggctcggaaccaggtgccaagcagatagaaagtacagtgtagggtgtgatagtgggatgggagcttcctggagtaggggatctggctctagcatagacaggatgcagagtccaggtgaggggacagcaggagcctttgtcaggaggcccccttgcccctccctgtttcatctagacccctcctctgcccttgtctctcccatgaccccacctggccttcctttaggagctgccgcttggcagccttcctctgggcctctgggactccttcctggaacttcctggggccctaaagcatgaccagatgatgaatggtccacctagggtcaggtgacccccttgtccaatgagttttggcctgggggcagggctgtgtcaaccacacccccctccatgcccccagcatctagctcaacttgccttcccttgattcgtccacttacctgcttcttcactactttcttctctgtgatcctcaatgttcctgcctgtaaaatgggcatgcttatgcagatcaaagatcataagaattcttagaacgtcgctgggcacttagaaattgctcagtaaaagttcacctggcctaggagcataagaatctctaccaggaacatgcttacaacagccgtaagaggctggtactagcattttgggaattggacaaatgaggacccagagggccagagcagagtgacatcttgagatggggagctggtaagtggaccccagcctggctgaccccagcacacagtggggaccctggcaggctgctggtgtagcagtgggtgaccgggtgatcatcactaggtacactcatttcatccagtccttcctggagtcagccgaggagttcttcatgcgtgggtaccgggtgcactactacatcttcactgacaaccctgcagccgttcccggggtcccgctgggtccccaccggcttctcagctccatccccatccagggtcactcccactgggaggagacatccatgcgccggatggagaccatcagccagcacattgctaagagggctcaccgggaggtggactacctcttctgccttgatgtggacatggtgtttcggaacccgtggggccctgagaccttgggagacctggtggctgccattcacccaagctactacgccgttccccgccagcagttcccctatgagcgcaggcgtgtttccactgcctttgtggcagacagcgaaggggacttctattatggtggggcagtcttcggggggcaggtggccagggtatatgagtttactaggggctgccacatggccatcctggcggacaaggccaatggcatcatggctgcctggcgggaggaaagccacctgaaccgtcacttcatctcaaacaagccgtccaaggtgctgtcccccgagtacctctgggacgacaggaagccccagccacccagcctgaagctgatccgcttttctacactggacaaggatatcagctgcctgaggagctgaccacggagctgggggttgccatggatggggacccaaagacctgcagccaccagtgcttcactagcgtgcagaccagccctgtcccgcctccctgtcagtcaggcgaattcaaccggaaaagggacgtggaaaggccactgtgaactgcagagggctgtgcacacagtagcacacaggatctcacagtaacgcggcatgggaacagtgagacagggggaggggaggcgcagttacaaaggcagggcccggcaggcttgccacgttctgcagccgtgcctttgcggggcaggctctgaagcctcagcccgactcagagtgcctgaaccctgccgcgccagtcccccgtttattgcatattgcccttaacgtagcatttctaataccctggtgtgaaggcgccctagaccccttttctctggtcacaggggtcctgggtcctttgatgtctcccaaccacatgtagccaattcctcactcaggcccccagagtgagcctttgaaatggaacaggtctaggctccctcggtttcctgcaccccaaagtgagccgcactctcaggggactagccacctccttcttaagagggtttggggcagtttataataaagggggcgtgtgctcaaccctagctagggtgattttttttgttttgtttttgttttttttgagaccgagtttcgctcttgtcacccaggctggagttcagtggcgtgatcttggctcactgcaacctctggctcccaggttcaagcgattctcctgcctcagactcccaagtagctgggattacaggtgcccgccacacccagttaatttttgtatttttagtagagacggggtttcaccgtgttggccaggcttgtctcaaactcctggcctcaagtgatccacctgcctcgacctcccaaagtgctgggattacaggtgtgagccactgtgcccggccactaaggtggtttttacctgcacatccagcctgcctgtgtccccagtgtctgttccatcaggcagtggggacacaggcagactggaagtcaaacacaatcgaatagggatatagttactccagaaaatctgagctaaagctagaggctacaacggacaggatttcattccagttctccagggagactgggtgaagtggagcatgctggcagagccaccacactcccaactgtgtagaggggtatggagcccagcagccggacaaccctgggagctcccgtatccagggtcactgcagccctgtgaggtcaccagtgggcgtgggactctgagccaatggtgcaggccaggattagagggcatgggaagatgacctctccagtctggatccagaaggacttcagaggcctacagtgtggttctgtctgcctggccacgcagagatggggtggggtatgggttcagggcttggcggcctggtgctcaccgccctggagacagcagcatctttttcatggaaggagaagacagaaaggagggtggggtagactctggtcatactggaacgggcaggcacccacccacttggtcacccgtggaaaagctggggccagccctgagttcattcttccttcacctgtggtttggctggcgagcagggacagacccgaagagcgtggacagatggagtgaccagttggaggagacagactgggctggagaggcctggagtcttgaaggggcactgagtgcctcctgggcagaggggcaggaatggaaccatggcctctgtgtccctcatagggagcacctgctccaggggaggggttctgtgctgaaggagtaggccctgcctccgaggagcttctgttgaaagcacagagagggccatggagcgctggactcagctgggtggatggctgggagatgggggacctgaggtgacagcagactctgaggcctgggcagctccacctagcaggggagaagtcccccatacccccctcaccccacttacacccagctttacccctggcacaccctcccgggtgggagtccctgactcattttcagtagaggaaactgagactctgagaggtcaccatgagcttgcctgtgatgtggctcagctgcaggtttgaacccaggtcatctgggttcaagactgtgctctgcacagggtgggaggagtgcagctctgaaggtgagtgcattgtggaggaggatacagggaggggcagtgctggcagggggctctgagaggggcaggggcttgatggggtccctgggtcaggatggccccaggaggctagagttggggtatagggaccaggtcacacagggttctgaatgccaggctaggaggcaggggtcaccgcaggcctgtcccagcagggggatcaatatatatggggcccaagcgctggactcaggggatacctggccagcgaggccccaacacaggatgaggcctctgatgaccagctcggggatgagtgacggggaagagccatgaagtgggggtcaccacgcacagcagggcctggccacttacagctgagtggcctgcagtgctggtgccttggctctggtataaaattgaatgaagccgggcacagtggctcacgcctgtaattgcggcactttgggaggccaaggcaggaggatctctggagcccaagagttccaaaccagcctgggcaacatagtgagacttcatctctacatagtttttttaaaaataaaaaaggccgggcacagtggctcacgcctgtaatcccagcactttgggaggccaaggtgggcagattacgaggtcagaagttccagaccagcctggccaacatagtgaaaccccgcctctactaaaaatacaaaaattagccgggtgtgatggcacatgcctgtagtcccagctactcgggaggctgagacgggagaatcacttgaacctgggaggtggaggttgcagtgagctgagactgtgccattgcactccagtctgggtgacagagtgagactctgtctcaaaaaaataaaataaataaataaatcaaaagggttggccaggcaaagtggctcacgcctgtaatcccaacactttgggaggccgaggagggcagatcacctgaggtcagaagttcgagaccagcctggccaatatggtgaaactctgtctctactaaaaacacaaaaattagtcgggcgtggtggtggcagcgtgcacctgtaatcccagctacttgggaggctgagacaggagaatcgcttgaacccaggaggcagaggttgcaataagccgtgatctagccactgcattccagcctggtcgacaagaaggagactgcggctggtgcagtggctcatgcctgtaatcccagcactttgggaggccaaggtgggaggatcacctgacgtctggagtttgagaccagcctggccaacatggtgaaaccccatctctactaaaaatacaaaattagccgggcgtggtggcaggtgcctgtaatcccagctactcaggaggctgaggcaggagaattgcttgaacctgggacgtggaggttgcagtgagccgagatcgcgccattgcactccagcctgggggacaagagtgagacttcgtctcaaaaaacaaacaaacgagactccatctcaaaaacaaaagtaaataaaaaataaaaagggacgaaatcagttagccctaataacactgactacccccaacagtcgctcaaccccagtgtgaggcctccttcccccaggctcccttgagccccatcttacaccagctgaagctgcagctggaccttgtggtcccgggtgctgtcagggaagacaaggagggaggtggggaagaggaggggaaggggagacctgactttctccctgcccaggctgagttcgctgtcacctcgggtcccccagctcccagccatccgccgagccgagtccagcaggtggcatcggggtgctgggcgccagggtgaacgtgtatatttggtgacgccggcgcgccgactcagcggcccccgcctggctggggcgaggttggccctaggtcctagcggggtggggagtactgagcaggcggctggggcggacggacacgtgagatcggccgcacatggcgctgggagcgtggcgcgtgcgcgcggcgaagcggagtgacgtgcacgcgctgtctgcggtcccgcgcaggccccgtgtgcgcgcccggccttggacaacaggcccggctgccccgcggggggaacacccgcgtcggcccgcgggagggaggcctgagcgcgcccccgagcgcgtccccgagctcacgcggcggggcgcgcccctcgcacctgcgggcgggctggggcggggccgcggctgtccccgcccacccgggcccgagcccggggagccggggcggaaccgagcggcgaggcccgagcggccggagcgcggcgcggcgcagacaatgggagcggcgctggcggctgccggggcggccccgagggccgcagagtcctgggcccggcggggaccggaggccgcgccatgagccccgcagccgggcgcacccctgcgccgcgcgcgggcccaggcgagcggcctctgcgagccccgggtcccgccctggggccggcgatgtgccaccgaggctgaggatgatggtagattgccaggtgagtgcgcgccgtccccagcctcgcgtcgcgggtggagggaggaccgtatgccccagcccacacccaccggggggagggagcccggcgccgcgtccacgctgagcgtgcgcttacgcagctccgcgtccaaccccgcccgggacagtagggaaactgaggacaggagaggggcagggactcgcccggggcacacgaagttggcggagtccagagatgaagggagggttccggcctcttaggccaggaagggctcggctcacccttcccgtggggtttgctttgggaatgacagcctctaagatcctggggacccctgcccatctcccatgtgggctcatttgcctgggcttctccgcgcacgtacaggcgcaggcctgcgcatacatgctcacacacacgcagacacacacaccacacacttcctggggctcagagtaggacgggacgctggggaagtgactgggggaaagaagaaagagggcgggggctactctgccacgggcaggggcatccagtacccagcaacatgcctggggccatggcacggggtggggggcaaggggaggacacgccagcttgatgggcggggattctccaaggttcccaggatctgtctgggctggggcagcctggagaggacagattgtggggttctgtgttcaccgctgtgatcacctggaagcaggaaaagaccccttcagtgtggacggggctgtaggaaaggaagcctcaaattcctgctctataaattggaatgtttggcctgggtgactccaagggtcccacaggctcgtagacgtgtctgtcggccttaggtctccactggggatgcccccactacccaccgaggtctgtggaaaatgccttcttcttggaggttcttctgagcaagagaagccgggggggctgaagggctgagggcctggggtggtgcagagcgtggccaagcactggacaactcttgtgggacaagactgtccttgttggagcctcagggttcttatttggaagtggggccagagccgttgccctggttggagtgaggaggcctcacgagtgaactggacaccccaggaccagcagagggaaagaggggagcaaatgaagcttctgaggckccttgaattacccctggagcctgcaggttctgctcctttgaccccctgggactcaggagagctgctaccttgacaacacccaaacaaaggtgtgtgttttgttttctgggttttctgcctgaggctgctgctgctgtgctagtgccggccaccagggggaggcagtgcccactgtactcattggagcaactggagtcagggagagcccggcagggtccctctgggggaccccggcctctacccaatgcacaccccccattactagcatccctctccacaatgttagctgctcagaggcgggagggggctccaagagcttcctctttcccttcagcaggtgtgcccaagcactcaccctgggttgtgggggggcagcgttgggcttgggygtggctctgaaagtgacccaggggggcctgccctccagagctggcagtctggagggggcgatggacagggcacaaaagcaaacaggcacagaaaggaaaaagcagtgctgcagcgaaaataatgccggggctgccatggagggctggggcctgctgggtggggatctgagaggtctcgctaaggggacatctgtgctgtgaccagaagacaaagcatgggccagccctgcacgagtctggacagtgtgatggagaaggctcagcaggcagggctgggaggcagaaatgagtttggccagagaggagtgagaaaggaggccagtgtggcccaagtgagctgggggtgggaggggcagcccaggggcctgtggacagctatgtgacaacactaccctaatgtacagcttccagcaacagacattgatcatcacacagtttctgtggacccagatccagggcagctcagctgggtgcctctgcccccaggtctcaagggaggctgggactggggtctcatccatggctggactgggcaggacccgcccccaggccattctcatgttattggcaggattcagttttgactgagggcatcagttcttctgtgactgttggtgggggccctcccttggttcactgccatgtgggtctctctgtagggcaggcagctcacggcatcagaactcacttccccagagtgaggggtgaaggtggggaggaaaacaagagcaaacaagcaagacagaagtcatagttttttgtaaatcttggaagtgacctcacatcacctgtgctgtgttctgttggtgagaagccagtcactaaatccaatcaccctcggaggaaggggatcactcagcaacttatgtaccaggaggcagggatctctggggccagtgtggaggctgcctgggacagtgtctgagaggaggcagtcaggcctgattctaaacataacggaggctgggcgcggtggctcacacctgtaatctcagcattttgggaggccgaggcgggtggatcacctgaggtcaggagttcaacaccagcctggccaacrtggtgaaaccccgtctctacaaaaaagaaatacaaaaattagctgggtgtctcggcaggtgcctataatcccagctactccggaggctgaggcaggaaaatcacttgaacctgggaggtgatgagtgcagtgagccaagatcatgccactgcactccagcctgggcgacggagccagaccctgtctcaataaacaaacgaacaaacaaacaaacaaacatcatgggagccattggaaggtgttcccattggaagatgctcccatatgccacagggggccgatatctgatttttgcttcattttcaacccgttcatggtgcaaatgaggaaaccagaccaagaagggagtgactttccccagatcacagcaccagtgcccagcctgtccgacttgtattccgggctgtgtctcgcccctgtgagaagtttctttcctcacagttgtaaaggccagaggtccaaaatccaggggtcagcaggaccctgcagtctctgaaggcccttttccttcctaatccttccatctctaagtctgtgaggcagctaacaggttttgtagtattgtctcacattagcgtggtgatgtccccaggaagtagacgttagaaccatccccattgtgcaggtcaggagactggggaggccctgaaaggcacaatggctagtttggggtcacagaactggcaagaggcaggagcttggtgacccagatggcttcccctctctgagcctcaggggctgggagcatgagaacacactggttggctgtcccagctcccagggtggctgtgagtacctggaagtgccccttgtctcccctcacacatctgccatcactctccccatttccttaacccccagcactgctgccacttgatttttacgaacatctgaatatgacgaacatacagatttttacgaacatctgaatatgacgaagtagcaaaggtggatattcactcattcatttcgtatctgtctcctgggcccaggccatgccggggcggggggtgggggtaacaagaatccggggagttgccaggggaaggggaagtgctcatctggggagtgcgtgggcacagagagrttccagaaggaggtgtcctgtggtcgtggttgattcgtggaggggaggtgtggtgatggcacagagggtgatgactgggaccagtgtctatcgggtcagcttcctgggctgctgtcacaaagtgctgggtggctcaacacaacagaaatgtattctctcacagttctaaaggccagaagtccaaaatccaggggtcagcaaggccatgctgtctctgaaggttctaggagaggatacttccttgcatcttccaacctctggtggctgccagtttccttggcattcgttcctggttttgtagacgtgtgactgcaaactgtgccttcatcagttcgtgtctgtccgcctgtgcgtgtctgtccaattttccctgttatcataaggatagcagtcattggattaaggcccaccctaatccagtatgacctcatccggattctatccgcacagaccctatttccaaataagatctcattcacgggtaccagagatctttttgttcagggacacagttcaacccgtaacaggagtattgggaatgatccccctcccaaaggccgggtacccgcgtgcctacggggactaggggagcagcggggagtcggaagacatcgcaggaacccagcccccagcyagggggtgtgggggcgtgagcggagcccrcctgctcctcagcttggcgcgctctggcggcagcaccagcaggtggcgctgtgccctcccgtgcggccgcccagcccggcgcggagctgccgcagacaaaggtctcgctttcgggtcgcgaggrgcytgcgcacagctgtaaacaggccaggggcacggccacctcatgggtgacacacacgggaggaaatcaaaccaggcggggccgaggcggggtgactgggtggcgactttgcgtcggaggccggcggggggcggaggaggaggtgacaggggtggcgaggaggaccatggtttgcagaccgtggtgtcagcggggcggaaaggaaggcagggaggagggataggggacctgcgaggctgcaggggccaggagtttgcctttcgtttggttcctcgcctgcaagctgagccggcctttctcaggcctctccagaggccgtgcggctgatgacactgcggtttgcagatagctctcctgttactgcaggcccaggtctgcgggtgctcggaaggcagccctgggcacgggtgggctgtctgtgcagayagagacttgaggggtccttccccccaaccccagccccagaccctgcctcaggggagctgggatgcctgaggtggtcctgctgctcctggtggggktcagcacagcccctcagaggcgcctttgatatacaaaggggcgaggcagtgtggggctgaggagcaggggtcaggtccccgccatggagctgctcacatggcatcagcgaaagggagcggagtgcacagcgggccgctggcccaggagtggaatgagtggaagccattcctttattttattattattattattattattattattrttgttgttgttgttrttrttrttattattattattattattattattattattattgagacagggtcttgctctgtggcccaggctgcagtgcaggggccagatcacggctcactgcgtcctcgacctcctgggctcagacctccagagtagctggggcggcaggtgcacgccaacactcccagctaatttttggattttttttgtagaaacagtttcaccatgttgcccaggctggtctcaaacacctgggctcaagggattccccccgcctcggcctcccaaactgctaggattaaaggcttgagacactgcatccagcaagaggccatttcttactgtcacctccctacccgcacaaggccctcccaccacctcctcgctcaccgagctaccaggcccgcccctgaggctgctggtccttgacagttggttcagygattgattcacacagcagatactggcctctgtacacctggctggcgctgggtgcctggcctgtgggaagcaccctggcttctgtggaaggctcaggggtatggggcagacagatcttgtggagaaggcatgggctgcgagcctggggacctggattcagtggccactctgccatcagtggcgtggtcagtcaccattgcacgctagccacaggactattctccacagagtccttccctctgtcccctgctgcagaggtgcctggtgatgacagccagcctgtaggccttgtgctaaagtgtcccttgtatctgctcagcactctgcaagataagtgccactgccatcctcacttccaggtggggaaactgaggcactggaaggggaaggaactcccacagctaggtagtggcagcttggcaatggcgcctccccgtgtgcacacaagcctgggaagggccaggcaccaggaccacattccttccaattacagtggccttccaacggtcagggctgggccyggctgctgggcagggcggggctgggaggccctaggccccaagtggtggttaatggcggcaaggagacrtaaacagagctaatgagcccctttcatcgtctccctgctctaatgaaggccttggactctgggctttgcattttgggggttcttgattctggagcctcaaagagtcttagggccaggggtatgtgggcccccccataggggtggggtgtgagcttatggactcccagtgtcccctcccagggcagccaagccagggtgaggaagtggagaggaaagggaacgggaagcattgtggcatccccctaaaaatgacaagccccagaaaaaagggagtgttcccgtggcaacccagagcagttgcttggcaactgctggcccccaaaatacttgcctgcaggaaggctccgggctggggctttccgatgggctttccgatggctcacttccaacccccaccagcgcacacccacccctggcccaaaaagaagactctgaggctgaaagagaaaatgcagagaccagggtccaggaccttcattagagcctggggaggaaggggcctgacctgctgagtttcctcagatacttctcatggccctccaccctgacacaggacccagtagactctgcccctggatccttcctgagggacaccccagtccactcccccctccccatctccccactctgccagccacccggcatcaagccagtcccctagcaacagaggccgcttcctggatacctgagtgagagttgacagtggcagaatgtcagaaaacgcaaggtcagaaagcacagcgatggctcggtgccagccagagtgtgtggggccatggggtaccacgtgtggtaccgtgtgctttgccgccctgcagccgtgggctccctggcctggggctggatggcatgccaggttgtggttgggctgggtacagcccttggaacaggggactgtggttctgggccaactttgataccgactgactatgtgaccttagtgtgtcccttctcgctgrcctcagtttccccattggtggcccatctacccctctgcctgtgtgtttaccgttcagtgcataaacattgccctgtgaattatgtcacctactggggccttggggcaggagagtgaggggaccaggaccaggccgccactgcccttcctcctcacatgtcggcatccacctcggccatcaggcccctggtcctcaggtgaggcaggtggctttggagcaggacacctgggtccaaattccagctcagcgyttattgctgggcatcctagaagcagcacaggtcccctctgagcctccctgtctgccctgaggtccccgcagttgctgtgagggtgtaagaaagccctgcccttgggctcycataggggctgccttagtttgtgggcacccaccctgcacccagacttgggcactgcgggagccgaggtgagaacatggatgaggggtgtccagcctggaaggagcgaggtggagccccagaccctgggagagggtggggcagtagaatggtgggaraaggcaggtggggccacactgcccagtgggttggactttggggatgggaaggctatgagacctggttgcctcagatgttctctctggggatggcagtgagggtaggactgttggtgacaactctgcaggaactcccggtgctctcatggagccaggatgccagtctgaccctggtcatttgctcactgtgtgaccctgggtcatgatttcacccctctgagcctcccttgccccatctgtcaaatgggcaaggggtgtgcccacctccggagttgggtactgggctcgtatgttcacttgggggtcgtcggctgggctcagggtgatcccatggggactctgcccagccacccccagctggagtgccacaggaggaggggcagggcagagggcagcacagacagtggcggggagctgccggcccacagcccaaggtgcgtgcagccccggcccacgttcttgccggatgccacgccaagaaggcgggcggatgaggcgagcccccagcccagcaccaaggaacaggctgcaggaagccagttggtgggagggaagattcaggcacacagccccacccaccctgcgtgggtgctgcactaaggaccttccccaccccctcccccacgttggcctcccctccctgcactgcatggtgggcacataattaactgaattgagctgcccagtccttctgggaaggataaggggggccgggacccactgcctgctggagggcaccccagtccttccctctttctaggttagggtccagaaagggctcccatgggaagggtgcaggacctctctgctggacaccacccgagaggtcaggtgtgcccatctgacctttgtgttccgagggaggaaggcagggaggggtgggcttgtccagtggagagaaagaagaaagcacccttggccaaccagaggccctgagtccaggaacttcccccacctctggcacccgcccctcttgggactttgtcctgatcccagatgtgtgtgtgggggggtgccctttgcctgtaatgtaagttcaaaactgggagggtgggaccgtggggagggtgggaccatggggagggtggcagaaggtatttaagtcctgggggctgccaccacctgacctgaatccattccaaagggattcccgctcccaccccaccccaccccacccctgctgggctatagctgcagcagcacttatctgtcccgatgatcaagtgatcagctgattaatcacctgactagtgctgtcatctgtcacgatgttcaccaggaacagcagccgcagggaagttcgggctgtctagaggtcaaggggagagaagcctgggaggtgggatgggagccctggcttgrcctcaggggacccagacaagtgggttccttaactcctctgtacccccattgcctcctctgtgggcctacggatgtgggggagtatgagatgttcctgaggcccctggcaccgcatgggcaggccctccgcagatggcagccaatgtctgctccgcttygcagaagggagatggccgatggcccaccagctcccgctgcccttggggagccagggtgtgggtggagggcagggacacttgcaggccctaagttgaatccacaggtttttttcaggtaggrgaactacggccccgaggaggcgagtaagttgcccaggccacgcatcccactctcccccgacccccttcttccctgaggccaagttccaggccctgctgcccagttgacaggactggagttcaagggtgaagcagtccacctggccccaggccctgggtggctggggaggtgacagctgggggtagtgggcaggtgggtagtgcccagtgtggaaggtctcagctggcggcaccgcctgcctggtccccctgccccctcgaaatagccgcttgccgttcttcaggactccatgaggtgtttccttcccagcttctggggtcggggagtccctgcatggagccctgcctcctcccctctccgcagccctgaggagattgctgtctggcagatatgcagggagcagggtgtgtatccagggcctctgggcctgcaggggcagcggctgtgtgctgtgggatgcggtggggcacatgtgcattctagcacgtgtgttgggggcaggkgcatctctctgcctttgggtgaccctgtatgtctgcagcatgcatgtgctcagatgtgacaagcttgacagtggctgagggagcacatatatgaaggggtatgtgtggctgcgtgtggggacacatggctggtgcctggggagggacagcacgttgccacagtgagtgtgggagggagtgggggtttgcattttgcctttttaaagcactagacctggacaggtgcggtggctcatgcctgtactcccagcaytttggaagtcgaggcaggtggatcacctgaggtcaggagtttgaggccagcctggcyaacacggtgaaaccccatctctactaaaaatacaaaaattagccgggcgtggtggtgcacacctgtaattccagctactcgggaggctgaggcaggagaattgcttgaacctgggaggcagaggttgcagcgagccgagatcactccagcctgggtgacagaacaaggctctgtctcagataaacaaacaaacaaagcaccaggcccaggccggagccgtgaccatgaggagggctgagtgtcagttttctcatgtgtcactgggttgacagccggacccagctcacagggttgtggtggctgggaactgctcagccactgcctggcacacccagctgcccaccatgatgctggcatggagacctgaacagctcttggagggtccctgggcaggggagggcagctggtaccttgctgtcctttgtcaggcatcccaggtgaggcagayaggagaggcccttgagcctcgccttccaggggagaagccaaggaaggagccaagcccagggattaacgggacagtgggtggcaggagggtgggacacagcagtgtccctcagacccagggccctagagtcccaaggrattgcgcttctctagccctggggaacttcttgcaggcaaaggactgtgagaaagagggcagcgggcaccagccctgccacctcctggcagccagccaaggccctgtgccctctccagaggccagggcagcttaggaggttccctttggaaacagtagccccacttcccaggccctcagccccttcaggcaggcagcaggctggtggcggcaccgggcacacagtgtccctggcacggcaggcagcctcccaaccacaagggcccgtttgtcctggytcccctggcccgagcgcactgggcgaccagggcctgctggacacaggggcctgactgtgggctcagcccccatcccccatcctcaccagccacggctgtgccttggggaggggtctcygcccacagcagagcaacttctacttacctgtgaacagagacccattccccaagaattgttcctgggccaggaatttaggaagggaaaaccccctaggttaaaccagggccaacctgaccacctaccaccgcctccaccgtcccagggcaggctggcttctgggaaactccagggccctgcttctaagaaaaagggctcttgcttcccagaaagcctggctgccttcctcctcgctcttcccccgcctggcttgcctctgcctctcttctcagcctggttcctggggggaaagcactttaatgggagggagccaggtgagcagaggcgccccgcccttccctggccctccggccccctgccctccctcaggctcctctccagcctcatcacctcttccaaggagctctcctggtgatcttcccacaagaacctccgaatattttagagtctggcccrtcgagctcacttgttcatctaggcatttatggagagccagctgtgtgctagatgctgttctaggcatcaggaccctggggaacagagtccctgctctcaagragcttacaaactccccgccatggggggcrtgaaaggaccccgtggtaggtgaattgtgttgttttgttttgagacggagtcttgctctgtcgcccaggctggagtgcagtggcacgatctcagctcactgcaacctttacctcccgggttcaagtggttctcccgcttcagcctcccgagtagctgggactacaggtgcaccaccacacccgtctattttttgtatttttagtagagatggggttttaccgtgttggccaggctggtctcaaactcctgagctcaagtgatccgcccgcctcggcctcccaaagtgctgggattacaggcgtaagccaccacgcccagccttgtttcgttttttgagacgaagtcttgctctgtcgcctaggctggagtatgcagtggtgctatctcagctcactgcaacctccacctcctggatttaagccagtctcctgcctcagcctcctgagtagctgggattacaggcacgcaccaccatgcccagctagtttttttgtttgtttttgagatggagtcttgctctgtcgcccaggctggagtgcagtggcacgatcttggtcactgcaacctctgcctcccaggttcaagcagttctctgcctcagcctcccgagtagctggggttacaggygccgccaccacgcctggctaatttttgtatttttagtagaaacagggtttcaccatgttagccaggctggtcttgaactcctgacctcatgatccacccgcctcggcctcccaaagtgctgggattacaggcgtgagccaccgcacccgagctagtttttttgtatttttagtagatgcagggtttcaccacattgaccaggctggtctcgaactcctgagctcaagtgattcacttgccttggcctcccaaagtgctgggattacaggcgtgagccaccgcgcccggccaaggtgaaatgttttaatgtccctccttccatccatacccgcgctgccccctcagccctcctggcctgtctgcagttgtagcacctgctcctgccccatgggccccatcagccttccctgttctgtttttgccttctggagcattcttattttcaaaaatgcattttacttattatgacctaggccaaaggtgatttttatgtgttgtgtttttccctggtctatcgctggcacttgaatagtgcccggcacctagtaggtgttcagtaaattcgcgtggtctggctgtgtgaatatagttgtgccccgggccctctctgtggtctgcagacagtgcaggctacaaactctgttactgatcctcatctccttcagtagagaaatggacattgtttagaaactctatggcagttgacattgctgcaacatttcacctgcattttacagaagtatcagctggccttgaattcaaaataagaactctggttcttccctgcagaggatgccaccttggggtgccatttttttgacacggagcatgtgccaggccctatcttgagtgcttcycatccagtgtttcatttcagcatgcagtctttttgaggcagagatgttccctgttgatgggctagaaccaaggctcagcaagggaaaggaacctgcctggctcacccagctccacccagccaggaagtgacaggatgagggtttggcccaagactcctgacactgtaggccccagctcccagccactgcttggatccttacagttagacgttgggttcctcctggagctggacctgggggcaggcagggttggggaggggagctgyggtgcccttggcagggctgggtcctgctgggctcaaagccaatgggagcggctggggcagggcctggattcttggatcctcagcttcttggcaacctgcgtgactcagtgggctggtaataggggccggcgggcaggcagccagtgcaggggagccctgcggtgggtgaatcagccagttgctgaattactgtcctgcctggggtggtgccaagccccaactgccaaaataagcacagcccctctttgcctttctctccccactccagggtggcccaccttccacatgccttggcaggtgtgtcctgtggctctgctgctcctgggagtccccgggtctccctagcctggagcaggggaaaggtcctccccactggggtgtgtagccttccacaagtcattctgcggctctgcctccccaccacacacaggrgccctcctgtgaactggaggtcattgagatacttgcaccctgaacttagaagggcaccgtgaggataaaatcacctttgactctttatgaaragtcataaagagtcttcctgctaggagtttgcaggaaggagtgactgggagcgcaaacctgagagtcagacaggattggaagccctgctctgctgtgtggctttggatgagctttgtgccatctctgagcttcatcctcaaactcacctgcaaaacctgcgtcacatatcatgatggtgaaatgatacccgcattggcatggcagtgcrtagtagaaattatcagagggttgttgactctggtttaggcgccaggttggaggcagcagtgatcagcagaaatggaagtcagagtccccagcctaggcctcctacaggggacagaccacccaccccagggacagggtcccagcagcgtcaagtctgtgtgctgcctggaacaaatctacttgtgatccttaatttggaacagagtagaggaaagcaagcagccttgggggccggacttacaccctgccttggcactgacacgctgtgtgacatcaggcaagttgttcgccctctctgggcctcagttttctcagttttacaacagagatgatgactgtggcctcatctttctggcagaggctgtctggaaaagtgctttgtccccattgaggtgtgctaaaggcggcgccagactaggctctagggtacgaaggggtgtcaggagttgatcctgcctsccaggcttctgaacgtggcaagaatttgcctctgggctgcacagtgacaggtgtcagtgatgcccccgtccctgggagtctcctagtcagagccaaagagggaggggatgccaggcataggtgcagcctccaggggcaggatctgtctcctgcacgaccacagcatcactacctagcagagccggctgggcctgaatgtgtgttgagcgacttgacggggcctcaggttcccagaagccagggggaggggagctggagtgtcccccsagctggacaccgagtctggccagcagctccctgagtcaagttagcagcaggaaagaggagcaaaagccaggcctcggcctctgctatctgcttcctggacaggatgtggtgccgagtaaacagcttcgcgaggagtcactgctctggctctgagtcacagctcctagcgacagctgcacagtgtttgtaaacaatgggcctcrcacccagccagsgcctgcccctacctagaaaggtgcctgtgggttgggttttgctagyctgggcttgtgtgtgtggccaggtgcattatcccaggccacccggcgtgctgggcagagcatcgtgggaccactggtaggtcgtgtgtcctgggagaagcctggggtcagggtcgtcgtaagcttcatgcacagtagctggaaatgtttgtgccatgtatggccctcactaggcccagctcctgaaggcagccagagttgcggtggggaggctgcaggtggagctcctccaactggcctcacccccaggccccagcgcctcggctgtccatggcagtcttcgttccaggcagtgacagtgatgtggcgcatcacgtggcggcctggccagcagggaacaaagaccctgctctcccccaggctggcggcagaggcagggccagggaccacgtgggtgggaggaggggtgcatggccctgctgctcccctcctgccagcaccacctcctcgggactcctgcatttctgcgtggcagctggtgctgctcctcctgcagcctgactgtgtcagcagtccctcgatggcctttccagcaagctcagtgcccactgccccgggtagccctgcccaccctggctccgaaaggaggagccccaggattaggccctgaggccaggctgacctgtgctggaggtgggggcaggggagatatgggggtaacaggcttgggaagctgggctggagtgggctattcaagaatagcacagaaagcttgtgtgagagatgcaaggccctgcagagggcctggtacccgggagctgcttgtccaagcaaaggcattagctcacaaacacaccagcagggtggcctggttccctgccacttccctactggtcccccacccccactatgaaagttgagcgcttctggccaggcacggtggctcacgcctgtaatcccagcattttgggaggccaaggcgggcggatctcgacgtcaggagtttgagaccatcctggccaacatgtaaaaccccatctctactaaaaatacaaaaattagctgggcgtggtgccgcatgcctgttatcccagctactcgggaggctgagacaggagactcgcttgaacccgggagtcggaggttgcagtgagccgagatggcgccactgcactccagcctgggtgacagagcgagactccgtctcaaacaaaaaaaaaagaaaaaaagaaagttgagcgcttctttccagggcctctttaarccccccacccaaccaaacatgcgcacactgtaggaaacaccttctcggccactgagcccttctacggggctrggctgcgaggtcacactttgcagacaaggaaaccgaggctcagggaaagccctccccaccccctcaaaccacgtggtaagctccctgttaaacctggagtggcagccgaaccacaccacacaatgcccacagtcacatggccaggcagtcagcaacaccggggtgagaggccgaggctggggacagcctcggatccctgctcggataccaacccctgccgcctgcctcacccagatcctgcctgtctgcacagggcgtctctcccgttaatagtgtgtacccagacagtgacctcttcgctggtcccctctcccgggaccgggcctgccttgcagtacccatctgtgtgtgcttctacatcagcaaacatttccaagctatctgctaggatccagttacaagccacactctgagcactgggcagaccccggactgccatctggaccttgctgccagggayggagtcaggctatggcactcctggcacaggggcagcatccaccaacattgatcaaatgtctgttatgtgcctggcaccggggcaggcatgtaaccctktggcacctgaactcctcaatccccactggaaatgatcattgcacatccgccaagcacggccatgagccgagcccatgctgagttcttgtggaatcctccagcgcccttgtgcccattttataaggagcaaactaaggcccagagatgctaaatcattggcccagggttccagagtccctggggatcagaatttcagtcctgggctgaccaattcacagcctggttggctctactgttcctcgaaggtcaaggttgagtcactgtgcgcaagagaggccagtggtgatgcctgactttcccaggggacagggccttggagcctggcacagaggaggaagtgtgccagatgaaaaagaacagggaatgggtggctggggcagggatggtgttgctgcattaagacaggggtgttggagaaggctgctctgactgggggccgagtcctgagaccaagggggaagaacatggttcccagcagaggacactggcagctggagttagtaggagggggctgtgggcaggtgaggacttgggattctcttctgggtgggacagaaatggtggagggattttagtggaggtgacttgttctggccacagggtgagtacagggaggtaggtttcagggcycccctgaaaccctctagctccatttctctgatgctcccccaccccagcccagcccacccccacatgcccacccacatcccctgagagtctccaccctgagggtggcagagctcccaggccctgaactgtctgctcagctgggtcccctaaggcccacaaagccaccggaagaggatgtgagatgctcagaggagcagggctgggagcgaggtgctgctggggcagtgtctgggcgggaagccgggccccagggcctgatgtgcctgtgggggcactccacagcccctgcccacaccctctcctccccgcctctgctgttctgctccctgccctgtgccctccacttgcagccagggactgggcatccacccggccaggttcccaggaaggtaaggaagtagctgagactcttggcctctgacttcgccctggcatctctgggctttggggttggggctctgagtgttctggcccccaggtcaggatggaaggagcgtctgcaagctttgcagagcagctggacagacacttttcctgtgagatcttgggcaagtccctgctctctctggggctcagtctttccacttgtcagacgggtgtgttggatgcgtcygatggcttccaatgtctggtttgcagcaaaatgagaaaaacagggacaaggtagtaagttgttgtattgttgtggtggtggtggtggttgtttacaactccagtagtcactctagtaaattattctaaaagccaaatgtactcatttcaagcctgcccttctttctgatggcagccctttcttgttacctttggtggtgttttttctgaatggtgggagtagtggtggtaatattattattttttaccaccctacttaatgaaacaaaccattggcatcccccacccctgcgcccagttaaaatgaaatcttgtggccgggtgcggtggctcacacctgtaatcttaccactttgggaggccaaggcaggtggatcacctgaggtcaggagttcgaaccagcctggccaacatggcaaaaccccatctctaataaaaatacaaaaaaattagccaagtggctgagtgtggtggctcaygcctgtaatcccagcactttgggaggctgaggcaggcatatcacgaggtcaggagtttgagaccagcctggccaaygtagtgaagccccatctctactaaaaatacaaaaattagctgggtgtggtggcatgcgcctgtagtcccagctacccaggaggctgaggcaggagaatcgcttgaacccgggaggcagaggtgcagtgagccgagaccatgccactgcactccagcctgggtgacagagtgagacgatgtctcmaaaaaaaattagccgagcatggtggcatgtgcctgtaatcccagatacctgggaggctgaggcaggagaatcacttgaaccgggaggtagaggttatagtgagccgaggtcgcaccactgcactccagcctgggcgacagagcgagattccatctcagggaaaaaaaaaaaaaaaaaagaagaaaggaaatctcgtgcctgggtgccagggatggaagagctcaggtctagggggcagggaagccttccagaacaagtgagtggggtctcctgcctgcctcccagtgcctctggctagactcacatccgcctggtggctctgctgaccgaaccctgttttgatttggttacttgtatctgtcacctttctggctctgtgtggtggtttccaggcccccgacacagggggaatgggagtggggacttggagaattaagggagaaagctaggctagcttggggcagcctctccactcrtcctcggctggcccatggcctggtacaagcgggaattcctggtcctgcctgtcacagcagcaggtatgacagccacgcgggtgacaccaggcccaggcactcgggtgctccactccactagggcacgcargcgacgagcacactggcagagggcctcccgcagggcccactccccacctggctctcgccccaccatggccygggaagcaggccaggtttgtgccaggcctgccgtgcccagggggaggaagggctctgtgttctttgcctgtgtctctgtggtgaccgccaggagaagggccgtcgcccgtcgtgccgctctccaaagcccgacaccttggctggcacctctgccagcaccggccaccaccgaggtgagtttccagggcaaccagtgcctctgccggggaggggctgggtgggtcaccgccgagccccaggcatgggagttgctttcccaggactccctttcttccctgccagaactggttggaggagtttggaactcacaggggagtcttcatctcccatctcgggtatgagagaggagactgggggtctgctctgctgctggtgcccgtgtgcacacgcttggcctccccagctgcccccagccccacgggtcagtccagggtggctgcgggctgtcctggcagctccgtccagagggtgcttcttggattaccaaggacttctgtgcactgcttcactgtctgctcccctgagaagcctgagagctggtgctatgacggttactgtccccattttactgatggagaaattgaggccccaggaggtraaactaaggctaggaagacacagagcaggcactggaacccgaatctgcactccagatcttaaaagagttccccaaacccacaggaaagaatggccccttggggctggctcatcccaaggccccctgtgctgtgacatttccagctggcactttgtggagcatttccaaggagtccgggrccaggatggcggctgaccaccctccaggaggggagatcatggatgccggggcccctcggggtgtgatgtgccccacctatcacagctgtgggatagacgttgctgccttgtgatcagggcccctgggcttggggacaggtactaggctgagactatgggaccctctgggcctttggtcccttcctcagccaggtgtgcccagcaccccccgcagcccctctgcgccctgtctcctcgcttccgtctgcctgctgcctccctctcccgctgtggtcctccggctcacttttgggtcttgggttcagtttccctctatgtcttcctctctcctctgcttccctccacttcggcctgtcacatgttgaattggtggcccctcgggggtggcagtgactcctcacagtgccaggcagcgagcactgcaggagtgggggacagctgtccgagcggcccccgatttgcagcccatggatgcatttatcacgtttgttcctctgcrtgcctccccctcaatatgccgggggtgtacccatttccaagggatgacagcagggccccacagcgagccccaggctgatccggagccctctgcatccccgtccagggccgtttgcactgctcccggcatcggcacaccttgttctggttgtgctgggacggcagcgccccgtgaggtcagagggttgctgtcacatctgccacccagtgtggtctcctggagatttcagtggttcggtgcttcgcttctcacctggccagctctgagttcagcctctcgcctgtggggacccctgcatcctggcggcagaaggaggaggaagaagccaccagaggttgccaggaacccagtggcaggggaggtggggctgagccaggcccgcccgctgtgccgggagttcccacgcgtggtccagctgcgtcacctcctgccaaggtgtgtgctcacccgcccacagagggccaccccaggacctaggcaggctaggaatggtgacgtcagtgttgggaaatgaccaaggagcgtgtccaggcctcacccttttcatgtcctccccaggctctaaatatagatcacaagagacagaaaggggtcagtgacctccacctgcccaacaggaggtgacaggttttccaccagggcctgacctgagtcagggtacctggctgccattcctcccggccttggccaagcccaggttggaaaaggtgatggccaaaggccacagtcacccagwcactgccctgtgcccagttcccgctctgaactgctgtgtgtccggcagcccccagaactgcaccccaggcccaaagcccactgtctggggccctgcgttaaggcaggcctgggtcccgacttgaaggtccacaggggcagcttttatgatctgcctctcaggtaccggccaaggatgtactggccaaggaatgggtggaaggagggacgcaccagccagacagaaggggcggcatgaagaaggagctgcagcagttctgctgagagggaacctggagtggggagctggggccacaccaagccagtggtcttctgcctgagggcagtggggggctttgcgggatcaagaccccactggccgcggtgtctgggtatgggagcagggagaagagggaccacagagattcagcctgaacacaccttttccctaaacgagacagctgctcaggggccrgagagtgacktaagatgcccaaggaatcgctcctcgcctccgtctgcctgctgcctccctctcccgctgtccctcgctgtggtcctcaggctcactcttggttcttgggctcagtttccatctgtgtgtccccctccrtctcttcctcctctgcttccctccacttcgggttgtcacatgttgaattggtggcccctccggggtggcagtgactccccagggtgtcgggcactgggcackgcgggagtgggggacagttgtcagagcrgtccccacacatgccctggctacagggggcagctgcagtcagcttccggcggcacttgggaacacagacccggtgtggtcaggtcacccagagttacaggagaagagggaaatgtgggtttttatgtgaagtcgcctgaccttttactgttggcttaaaattttaaaaacacttcgcaagccaaacaaaacacatgtgtgggygggatctggctgccagctgtcagttcacagcctgccttttaaagttcctctgcgagcagcgtcccgacttccgaaaggtctgtgcagccgtgctctccaggggcttgtggttgtagcccccaaggaaaggcaggtgcacgtcccggggggaggytgggaacctgggaaggctaggtgggggtgtgggggggcgtgagctggggcaggagggaggaagggatcaatgccgattcataagaaccccccacttccgggcagtgcttagtgatctcgagagtccttagttcctcccagcagaggctccaacygccaagcacagggttgtcattggccttgagtgtcaaacccacccaagttcacctggactgcccccagccatctctgatagccccatgtgggcatccggactcgggttctagctgcccacggcctcagtccccacagcagagcccccaaccccttttgtagtgaagatgccatcagtgacccctgtgcccacagagagtaatacaggaaacggtgagcctggcaggagtcactgcccggggtcagaagtttgtagccctctctggaggactgctgggagcctcagaggcatcagagggtgagtctcaagctgtgtcctttttcttctttttttgagacggagtcttgctttgtcgcccaggctggagtgcggtggtgcaatctcggctcactgcaacctccacctcccaggttcaagcgattctcctgcctcagcctcccaagtagctgggattacaggcacgcgtcaccatgccaggctaatttttttgtatttttagtagagaygaggttttaccacgttggccaggctggtcttgaactcctgacctcaagtgatccacccagctcaacctcccaaagtgctggaattacaggcgtgagccactgcgtctggccatttttcttcttataacttttattatggataattccaaatagacacaaaaatagagaaaatggcataaagacccccagctttcacgaccatcggtgcagggccactcttgttcacctctcactgccccactccctgcccgcccctggagatgtttacatgaatcccaggcatgtgatgccatccacagatagcccaagatgtaactctactagtgacggcaacaccattctcacacctaaaaagatgtctaatgtcatccaatatgtagcagtgttcagacaatccacatgtcttatagttgttttttttaaacagttgtcttgctgacatcatgatccaaaatccacacattgcatttgttagacgtctctgacccttcttttagtctagttycccctttctttttcctctgaaatgtatttgttgaagaaactgggttgtttgtcccatagaggttcccacagcctggatttgtggattgcacccttgtggtgtgttgaacatgtttctctgtcccctgtaatcccacaaatggcagttatatgcagaggcctgccttgatttaggtttgggttttgaggagaacactgtgagtggtgctgcgttcctccactggtgacacacgctgtcccaggatggccttgcccttggttagggtgtccccacagcttacaggaggcctcaggagagggtcttgcatgcaggaggcgtcccatgaatgccaaccccagttgctaacagtgtgaggcagagtcaggcccgcccgatctgagggcattgggcaacacatcctgtgcagggaactttatctgtgccttcattaggggggcatgtgtatctgtgtttctgtctctatgtgtgtgtatctgtgtctatgtctctatatctgtgtgtgtgtgtctgtgtctatctcaaacttgttttttccctttttgtggagaatggggtcttgctatgttgcccaggctggtctccaatttctgggctcaagaaatcctgcctctgcctccctaagctctgggttacaggcatgagccaccacacccagcctctgtgtctgtctctatgtctctgagtaggtatgtctctgtctgtgtgtctctatctctgcgtgtgtgtctctgttccaatgtctctgtgtgtgtgtctccgtctctaaatgtgtgtgcctgtgtctgtctctgtgcgtctgtgtctctgtgtctgtctctatgtgtgtgtgtgtgtgcctgtgtctctgtctctatgtgtctctgtgggtctgtgtgtgtgtctgtgtctctgtctctatgtatgtgtctctgtgtgtgtgtgtctgtgtctctgtctctatgtgtgtgtctgtgtgtgcatctctgtgtatctttgtgtctgtgtgtgtgtgtgtctgtgtctctgtctctctgtgtgtctctgtgtgtgcatctctgtgtatctttgtgtctctgtgtgtgtgtgtgtgtctgtgtctctgtctctatgtgtgtgtctctgtgtgtgcatctctgtgtatctttgtgtctctgtgtgtgtgtgtgtgtctgtgtctctgtctctatgtgtgtgtctctgtgtgcatctctgtgtatctttgtgtgtctgtgtgtgtgtgtgtgtgtctgtgtctctgtctctctgtgtgtgtctctgtgtgtgcatctctgtgtatctttgtgtctctgtgtgtgtgtgtgtctgtgtctctgtctctatgtgtgtgtctctgtgtgtgcatctctgtgtatctttgtgtctgtctgtgtgtgtgtgtctcatgtacagccagagcagtgatcaggcttcccagaagttgggaggtgagtcccaaaggtaggggaacaaggcaggaagaggaactttgtaaaaacagacaccggccagagggactggctaagtaacgccctcccccgccctggctcctgtagatgatatagtcagatgggagggagccaggccagccgcgttggggggtttagtgtgatgaattctttactcttcaccactccagcctccttggggccacccctcgccccagcacccaggaccttcaaggccagaatagtggtgattcctctatgtcctcatgagtcacttgtccttctgggctataaaacgggtgggcgcttgttcccaggcccatcactcagcgaaggagataaagagagcagaggagataaagtcagtggcaggcagcttctggactttcagtttcyggaggcattgggagcttggccccagaagaaagggatgggaggaggagcttagggccgagggcagtgtctcggtcacctctttgtggccctgtggggacctcctgcctcgaaatacgcctcacccacattaccctccctggccaaacggcttggaggcttcctaaacagcctctagggatctccatcccaaatcaaatctacccatcttgcttcttaaaaaaaaaacaaaaacaggctgggcgtagtgctcctgcctgtaatcccagctctttgggaggccgaggcgagcggttcacttgaggtcaggagttcaagatcagcctggccaacatggtgaaaccctgtctctacgaaaaatacagaactagctgggcatggtggcaggtgcctataatcccagctcctcgagaggctgaggcaggaaaatcacttgaccccaagaggcggaggccttagtgagccgagatcacaccactgcactccagcctgggtgacagtgagactgtctcaaaaacagcatttatcacatagagctgattattaaaatactgattttagaaattagaaattcagagaagtaaaatgaaaaccagtagagcttccacccagctgcaacttaccaccataatttttgtgaagtaggcccttctagtcgtgtgcacatgggggtcttgttctgaacggatgaactgccgcctcactccagtcacagtggaagtgtttcrtgggtgtctgaggattggcacttgggaagggggcaagatgtgctcgtggaatgtgctgtctggtcccgccctctcagtttacagatggagaaactgaggcccaatrgtacggaccagacctggggaggttggcatggccagggctgctggcagcaattgctggcctccatgaagactgaaggctgaggccagggcaggcccagtgatgrgtgaggcatgaggaagggtcccattcatycatccattctcctggccctgctgttaagccccaggctgtcttccttcctcactggcttccagaaagagtagttgaggatgtccctgtccctgcttccccttcagccccagcagccccacttccaccctgagaccagggatgtccaagccacaagcagccccagctgacaggccacgcagccatgtgctctgcccagcgttgtcactcttgatgccttcctccttgtcagatgcctctcagccccaaccttggtgccttccgctctcccccacctccctggcttcccctcctctgagggtgtctgtaaggggatagtgtggggctttgccccaaaaatggtagggccccactctctgaccctttcccccactgcacacacagccccacactcaggatttccarttgcactgacagggtcactgaacacatggtcagcctctccaaactccgcctgagcctgtagtcaggtgcaggtgctcagtgctgagtgcttcatgtccattacgtaatgtcatcctccccgcaactgtttgaggaagtcattttcactacccagattttccagatgaagaaacagtgaggctcagaggggttaagcaacttgtggaaggccacagagttggggagaggctttgctggaattcggggtagctgactccagggcggcttccccacacatgatcagcacgtacacatttcagccctacgcaacacacgcactgcagcagcgtgacacgcaaacggtgcctaaccggggtacccaaggccccacgacacacgtgacagccggtcctccgggagacccagccaacgcgcacccctcgacctccccggccccgccctctttgttcagaccccgcccctccaggctcccggtcccgccccgggtctgacctcggcgagggcggggccgcgggcgcgcgcacgcacgcgtccctcggactctccggttccgcccctccccggccccaccctcttcccctccggccccgccccccagcctgacatcagcagggccgggccgcgggctcacagcggtggcaaagcccagcmgcgcgggccgcgccgccgcccccgccgcgcgccgggccggccccgcgcccgcgctgcgagccttccatggtgcagcgcatgtgggccgaggcggccgggcctgctggcggcgccgagccgctgtttccgggctcccggcggagccgcagcgtgtgggacgccgtgcgcctggaggtgggcgtccccgacagctgcccggtggtgctgcacagcttcacgcagctagaccccgacctgccgcgcccggaggtgggtgagctggggcggtcgggcggggggtgcgtcggagcctccccacccgcggcagagctgggcaggtcggggcgagccccggacggggccgggcgatcccagcgggccgcctccctcctctctcctccataggtgggggtcggggccttctgcagaaatcagccagcagggtgggcagtgggggctgccgccgcgccccgtccaacagtagggaccacggctggggttttgcgcccctcaataccgttccagggcctgctgtcaccaaggccgctgcagcccaggtggacctttttctgcggcactgtccctgtttacatcggtggcctgtgccttatttcactcagttcccacccagggcccgcagcgcgtcgttagcctttacgatgcaggtgtggaacaagtggtcgggaaggccaaatcctagaatcctcagaggtgatgagaccataggggccttccagacagaccctacttggggcagatgtggatctggtgaccagggacatcggggctgctcagagcggggtggggggggggtcgggggatggggtggagcagcaggcctccaacacgtgggaccagatgtcctggtggtgaggggaggagggtggcccaggcccagggcgggcaagacttgtttctgcttaactggaaagagtgccaacaccctgaatcggtaaggactgggtaggattcagagaagggagtggtgtacctgtgatggatggaggggagggtgactaggtgagggcgggggcttgtttctcgtgtgccctgggtctctgggtggtgccatctgcctcccacctgactgctgctgactacacagcagagggagtggaatccagagatgcccccctcgccctgctctgcctgggcacagggcctgcacagaggccattcctggatcgggggctcagggcccatcagagctttggctgggctgcagccttcacagtgaacctcctgagtccccgtgcggcatcgtgttgccttgctgcgtctccagtcgcttcatggctttagactgtggcgcgttgtgattgctggcgattgttagcctgagtctcgtgcctcttggtgtcccggtacctagacagggcctggatgcgacttgtttctccgcccagtgttgggcagagctcttggtgggggaacaccacacgcctgagagaccctttcctcctgagcttggcagatggccggaccagacgtgttccctcaaccctcatctatccagggctctggtcctcattggcggctggagagggacccctgggagggtgggggtgggaggctgacaccagcccagcgctcatctggctttcattacctctggcagcagctcgggctttgtgtgctgggagggtccggcggagcgctcacagtggcygtgcaggttccctctctccgtccctgaggaactgagggagaggcagagctgagccccacccctgcctgggggtcttgtcttccctctctctggccctggcgctccttgcccagcctcagcactgagatccagacctcgactgctatttagaaatcaaaggggaagcttctggctgggtcaggaaaaccaggatcctggcaggagaggaggccactgccggaaactgaacacaatgaccatttaccaagggcccaagggagggggcggggaagtccctgtccctcctgccaacaccccccgtcctggggctggtttcctggtgtctatgtggcctgccagagctgacgctgcgcacttggtccctgtcctctctggaaaccaccagacagtttctgccttcccccgcatccctgtttccctacctagcttccacccggtgcttccctctgggctgccagatctcctcacatctgggcttccgcttatcttcccgattctaagccaagccaccaatgacccagcttggcctgcacagttcttgctttctggaggtgacctggtccgtgcccccatctctggacaggctgttgctttggccagacaaaaagtgcaggttgtgggccaccccctcacttcatctgccttagaccaaccctacagagtaggtgccaacaccaccttctaggaagctagggggtcagagaagggaagtctctgacctaaacacccgtgcagccagcaagggccgcagccaggatttaagcatgggctgtgttctctgtggcacctactgtgtgcaggagccaccaggagtcagaggaagcccaggcagcccagaagccctgaggtcaggtgagcagtagggaagcttatggctcagaggaaggcaaaagtgctttgggccacaggacgctggggagagctacctggaggaagcaagcccagaactggaccccacaggtttaagataacagctaataagagccagcaggttttggggaggtccttggctaagtaatttgcatcatctccttttggggtcaagactgttaagagctcacttgacagataaagtcactgaggcaacagaggtgaattagattgcacagagtgaccaagctggtcagtggcagggccaggattctgacccaaggcctgagggcagttgcaggtgggctggagtgaagagggcttctctgtattcacagggagcatctcccttcagcctcccgcgtcttcccactgtttgatctcttgatcacactgtgtgcaggtcttcggtttaatccccagggctcatgagcactttgacactgaagaccccaaggcaaagggcctgtccctgtgtgggtgtgtgtccctgcatgcatgtgtacagactgtggtcttccaggagagcttcctgggtgactctgaaggggcagcccccaggaccctcaggttcccctcttgctctactcgggagggtcccccagaagagggggaccaggctggctggtcctgggtctttgttccttctccaggcgggggatgctcaggcatgctggcctgtttcccgggaggctcaggaatggccctgggagatatcaagctgctcgttgccagagctggggtctgattcttaacctggaaattgggcatttccaggacctgtctgcgttgccaatgagaaaagagtggggagatttatcactggccctctgcaggcaggctctgaacgagccagtggagcggtttcaggaagctgcacccaggcagtcaaggactggttcccaagagctgctggttggccgcccagatggctcccatggcgtggtgccaccatgctgtggccacccagtcccagggttggacttccagccttgcaggcccagaatcactgtgttcccagatatacagcaacagcagagcagtgytccccatttgattgttaaggggcagacactgatgcmtgcagcctcatgcaggacaagctgagctttgagcagacccaattctcccagttccgcacaccttggctgcccacgggcgggggaggcagtgggatggcagcccaacagtggcttggcgggcggggcaggacacctgcgttggagggttttggcgttttcctccatggggaagcttgcatgctttggcagcctcccctgtagtcattcctggagacttttgtccatctcaaccgaggggcagggagcctgggctctggagagaagagagctatgctgggatgccagctcagccccctagcagatgtagacgtgctcctgagcctcagtttcctcatctgtaaaatggacatgatgccagctctcctgttagggttctggtgaggaccctcgagttagacaagagacctgaggagcagcctgcacagcacttggcacagtggacaggtagcagctgccacaatgaggttttctgattaggtgccaggggagcggcctgacccttccaagtgccctgggctcctcgggtgcgtcacctggcaccttcagcatggcacttccctggcctggtgtcttgtaggccttttgcccagggcacgtccacaaacctctcggagatgcaggtgctagaaagctggccctgccaccctcccctgcgaatttgctgtgtgacctgaggaaatccttcctgtctctggcccctcctccacatctgtgccacaaggggctggactctgctccaagcctgagaccatggcagaggcagcgccaggcctgggtgggtcccaacaggccagggttcaaatccctgttctggctgccacgtcctggctcctgacctgggcgagttcctctcaggctgtttccttgtccatcaggcagggcgttaggaggattaaacgtgatgggtgtccaaagggccttgcacccaggaagtgcccgcatgtgctgggcactgtagctggttaaagttggggctgccctgcacccccttgggaccagcccaccttcctcctcagctgccaccagccacgcccctcccgggcctggccctgtgttcacctgactgtcaggggctgggcgtggacagggaccctggatgcccaaggcttgcggctgacctggaggtctggttctccctcctcctgcttgaggcacgattttcccatcagtgagtagcagggcacaggccggcagggagggtttctggagagatgggccggcctttgcggggctcagcactggttggttcccagcctccactttctgaggccagggagcatcctggtgggcaggcaccgcgtgtcgtcccggtctgaggccgcctctgtgggctgccatgcccaggatcaggagtgtggcccacccacaccccgggctggcctcctgtcatcttgatgctttgtctgtgcgctggggatcagggttgggtccacccacctggagctggagggcaggcccgagggcaggagggtcacggacacgaggcccttgcgttccacctcccttgatggggctcatggtccgagctcatgacttgagaagtcctgggctctcacctctggctcagccagcacacgccccaccggctcctgtcctcgggcatgggtccccacctctgtaggacggagaagggcacagcagcgtgggccccgcactgtcgcaggagcctgggctctgtagagagcgagcagccttctgtgatgcgttttacgtttggcttctgtattggagcggaaagctgaagtcagaaagctgctcccacccactgggtttcagggtgactcagcctctctttacagtgtccctcggctaggtccctgagccttaggcaggcctcagacaagtttccctcaggtttttacagcccagcatccgtcgccggccccagggggatatgatgtcaggtgttgtccggtaccacgccatcaggtcccagtgccggtcaccgagctgtgtgcattctctcttgacccccactgttgcctgtgrcaggtagtgctgccctccccagatgacacaccaaggccgagggccaggggctgggcagagccagcgagagacagggagctgctgtctggtgggccagaactgtgaggtgctggcaggggggtggcaagcaccccggggtgacctctggtgactgggacctgagcagcagctcagaggggcttgggaggtcccccaggacaatctcacgcacacggaggctctgccgtgagcctttccacacacaggcccggggaggaccaggggcggagcaggccgaggtgcaggctagagccctctcctcactccgcttcagccctcagccaggtctccttgggaggggccggtgagttcctggagccatccatggggcagggggccactagctacggtttccaaggaaaggcgtctgagtccggagctgcaccagaaggctgatgctgggaggaggtgccgttggcctgagcggggagatggcagggctggggcaggccccgtagggttcctcaagaccctcactattctacccagagggagtctgggtttggcctgtggcttcctccttctgtcagccagggacacggcatcctgctggcctgtcactctgagaaggctgatcaggtgacacactcaccagacaccaccaggccctgtttcccatcctcatcttcagggctctgggctgtgtccctggagacattggggtgtgggggcccctgctcaccggggaccccatgccaccctcactgcactgacccaaatgttagaaggccagacagtgtgtttacaggcacagctgccgactgggtcccagagcccagggacatcagcatgcctgctaggggtgggacaggagtgtcccttgaggacacagccaagcacgtggtgttcttttctcctcctagcagtcagctcatagcggctgcctgggcacctgccctcaggggaaagcgttttctctgcatcagctgttcactaggccgttcctgctcctcccgctctgagctcccagcccggccagagtgccctggggcccaggcgctgcccagatgggctgtctgctaacagagtgacctagggtggcctgtgggtgctggaaccctgcctttcttgctgcagagggttctggggcagctgccagggctgttggctgctttctttctctgtcctgtgagggggcaagggatagaggccttactctgccactttgttcccagaccccagggcagctctctctggagcctgcacctccaccatctgagcagatggtttaaacagcccctgtactccacgtagctctatggtctggttccatgcctgctgctgctgtgacgggaagcgaccagagaagacaggccagctccacgcgggctagagcgtctccccgactgtgtgacagggtggcaactcccttaccccaagcatgcatggctctcagtgttgggcctgcatccttccccaccacccggctggcagaagagggccccccgggggtgggggaagggtgcagggatcacatgacaccaagcagggctgggccagctgctggcctgccagctcacggaggagccgctctctagacctgctcagggacagccgaggccacctggcttcagcccctcctggggattggcctgcctggggacacctctgtccagcaggcactgatggtgctcagccaggacctgggtgctgtgctgggctcccccagggttaatgtttagtcccctgtggcgggcttgtcctgcacgagatctcagagccactgccggtgacttggacactcaggatactgtctgcctcccagctggtccagatgtggctaaaatccctgggagagagagagactcccagctgagccaacggccttcacaggaggcagtctgggacccctgaggaggcccgggtggttgggggccctggtcgctgtaacctctaatgcttttcttttcaaaggaacaactttctaggcaggggagagatgtgtgagtcaggaaaaggggggtgagcgtatgtctcttttcctgtcagtggaagggccagacctcccctggcggggctgtttgtggggtgtgggtgtgagtgtgcctgtgggttccctgctaacttccaagaaatggggctggctctctgtccagaggcggtggcggtcaggagcccggcacaatgcccgcagctttcctgttgtacaaagcccagcgtgggaggcgacctcaggtcggaggaagtggacttccaggatggctcctgggcctctgagggtgcgcaggaggcaggaggccagggtcccgtccacagcatgctggacagtctacctggctcctgctggggttgagggaagggcctgagtcagcactgtctgccaggccttctctgagctccacgcctacctgggctggggcactgactgggcggttaatgaccctgggccaggccagtacctcttagctccttcctaacctctgaggttgatgtccttaaccccccggctcctctacccgctgcaagctcattccgtccctggacagagcaggtggcatagggggctgtgaggccgggggtaattgtggctaagtgacctaggccagcctgccaggtgggggaagtctgtctcctaagacaacggcctttccttactgcctggggccagatgcccccttcctgttccagtctaggcctgtggtttagggctctgtggaaccccagcatctgcctggataccagcaccgtcacctctcacacccgtcccctcacgtgatgatggtcagggaactgggaactcccattgcccaagcaggcacgagggcatgaatgagcagaggggaaggaagtggctgggatgtggctgtctggggtgccccacacctgcccagacctgggctgccaacgcaccagggctgggcccagaggagctgtgcgttcctgctaggtcagccagggccccccaggctgggtagaggaggggtgagtgtgaggatgcccatgggcctctggccctggggaggtagggggaccttctcttggggcatagccgcctggatgcagtcagccgtgtcagagccctggggtccctgcctcaccacttacccgaggcagcatgaccttggaccagttgttcctctctcagcctccatttacccatctgtgcaatggctgaataacagtcccctgtgtggaaggggatggcttgagggtgggtctgtcctgggcaggagcagaagccagttactaggggattggaagcctggtggactcatcataatcacgtcccaggtcgtggctrgccgggttggggaagtggagtgccrggacagtggcyctcgagctgtgatctcattccaccccaggctgtaggtctgtgcagccgccagtctgtgccctatctgggaaacaggttacacaggtgcatcccctgcacggtggccaggcaggcccttgacgtccccgcgcccggctgccgggcgttgtcttcacagagctccacgcaggagatcggtgaggagctgatcaacggagtcatctactccatctccctgcgcaaggtkcagctgcaccacggaggcaacaaggggcagcgctggctcggggtgagtgygctcggggtctccactgggagacgcagctggggatccctcccaggactttttcacttgagggcccccagttctgatcccaaaggaaacggccttcactcccttcccgacccccactgtccagcccaggcttaatcgggttttcatgtttgacctcccttccccgggtgtgcagccatcagcctcaccatcctccatgccttctcccagatgtgcacaccatctggagtagtggggctgtcttcacccaaggacaaaagggcttcaggctgttaggtctctgcaagttgccatctcccagaacacatccctggggttcctccaggttgagagccggggcctgactcagctgcataatattccagaagggaggctggagccactgccccagttcagctcctcatgrctgtggggccactgtgagtcctctgaggacacttcaacagtgctgcaggagccaggcgcagtggctcatgcctgtaatcccagcattttgggaggccaaggcaggaggattgcctaaggtcaggagtttgagaccagcctggccmacatggtgaaaccccatctctactaaaaatacaaaaattagccaagyatggtggtgtgtgcctgtaatcccaactacttgggaggctgagacatgagaattgcttcagcccaggasgctgaggttgcagtgagccgagatcacaccactgcactctagcctgggtgactgtctcaaaacaaaacaaaacagtgccacggggaagatgctgtgcgtcctaacgggccagtccctcccagcccctggataagcctctgtttcctcatctctagaatggggatattttgttagagctctcagatgacgctcttcccacagggcagctaccattactcagctaacaacggacctgaaggtgtcagtatttaaatcattcccgcacctcaaattctactttaaaaattttttcactcttttagagacagggtctcactctgtcacccaggctgccatgcagaggtatgatcatagctcacagcagccttgacctcctgggctcaagcgatcttctcacctcagttccccaggtagctgggaccaccacacctggctaattttgtattttttgtagagatggggttttgccatgttgcccaggctggtctcaaactcctgggctcaagcaatttgcccacctcagcctcccaaaatgctgggatgacaggcgtaagctactatgcctggccctggctaatttttaagttttgtaaacaatttttttgtagagctgggggatttcactttgttgcccaggctggtctcaaactcttggcttcaagtgatgctcccaccttggcctcccaaagtgccgggatgactgatgtgagccaccacacctggcctgaaattctacttttaaagctgataacctttttctgctagagatactcagtcctgcctcttgccacaagctgctgagggctcggggttccatctgagctccaggagattcgtgtgctgccactgactgtctgtccctcctctgtcccaccccagtatgagaatgagtcggccctgaacctttatgagacttgcaaggtgcggaccgtgaaggctggcacgctggagaagctggtrgagcacctggtgccagccttccagggcagcgacctctcctacgtcaccatcttcctgtgtacctatagagccttcaccaccacccaacaggtcctggacctgctgttcaaaaggtgagcatgagccctccactgcacagggtgcacaggggccctcgcccccacccccacctggctgcgggtcttggcaatgctgattcacctctctgagcctcgctttgctcatatgaaagagaaactggagtgctaagaggacctcatggggttktcaccakgcctgggcgggatgaggcgtggaaagtgctccctcaacgcctggccctgtagggaatgggctgcggggctgtggtgctcgtttttatgattttcctgtcccccatggggaagctctctgccccaagcctctcttgtatgtggccttgggcgaagcagttttcccacttgtcaaggagattccggattctatctgggggctgttggagggacccaaggggcgctcagatagctgggaaggagctggttgggacttattcattgaacaaatatatatgaagcacctactgtgtgctggcccttttctaggcatttaatataatttgatgaaaaaaagcaaaaaaaaaaatccctgccytcctgggcctccgtyctagtcggagagtcagacagtaacactagacgtcataagcaggtacggtagatgtgacgccctcacggcctcctctagatacggctgcatcctcccctattccgacgaggatggtggaccccaggaccaacttaaaaagtgagtgagctttgagccaagaggaagggaccctgtccccaccgaacagtgggagagtacatggggctggggccggagccggggctggctgggcagaaccctggctcccacacctcttgtggttcctgctagagggctggggtctgggggcttcgcctgcaggaagaaagacgaccgagagctgtggaggggtcctggggtggctggggctcggggcagcccccggcgggaactcatcccaccatagcctcatcccagctggccttggctcagtgggccctgatctaggggcccctggcaagaggtggggtgagcctctgctctcacattgcctcacccctcaatagtgagtgctcagygggcaggctgcaccccaccctctgggagaacaggattagtgggaagatgagacccacacacagctctgagagagtaaggcagctcaccagcactgagctacaagttgaggagccgccagggacctgcagatgcccggcaggaggaccgatccctcatggagtttacattccagcgaggagggggtgctgggagacatgcagagctgtgggcggggcttccttggaggaggggagaggtgttcgccactgaccaggggcctccttggttcttttagctggacagccaagggggcttgggccggggcaggtggccttcagatggacaggggccggctcaggagcccagcctggctcaggggagcccaggcctctgactctgctgccacccacctgtccccagtgccatctcctccatcctgggcacctggctggaccagtactcggaggatttctgtcaacctccggactttccctgcctcaagcagctggtggcctacgtgcagctcaacatgccaggctcagacctggagcgccgtgcccaccttctcctggcccagctggagcactcrgaacccattgaggcagagcctgagggtgaggaggactggggtgggtgccagagggtgaatgaggaggggtcggtgctgggccacacgaagaggaggctccagggtctggtgctgggtcaggggcccagrtkagcctcagaccacacaggcagggaccacaggcaggagagtggcctggtacaygttttgtgggttcggggagagaggcttctctggaagccggggctgttctgtgtctttggaaaggcacaggaaaggctggcatgttgttgaacttttctcctcttgcagctctgtcaccagtgccagctctaaaaccaactccagagctcgagctagctctaacaccagctcgagcacccagcccagtgccggctccagccccggagccagagccagctccaacaccagctccaggttcagagctagaagtagctccagcaccagctccggagctccagcaggctccagagccagctgtgggactagaatcggctccagcgccagctctggaactagagccagctccagaacaggatccagctccctcacaaactctagagctggagccagctccagcrccagttccatcattacagccttcctggccttcacctgtggttgcagagaaygggctgagtgaggagaagcctcacctcttggtgttccctccagatctggtggcagagcagtttacactgatggatgcggtgagcagctcagcttggcagggcaggggtgggcctgccttctggcagcatctgctgtcccagacctaccatttgctgatccagagctgaygttctggtcaaatcccagctctgctgctacacaccaagtaaccaggtcgttccttaaccccaagtcctcagtttacctctggacagtagagatgaggtcacccctatcctccagagtgactgygcagattctagatggaacagacaggaagctcagcaggcctggcctgtgggagcggagggtgctcaccaaggtgcatccatgggtcacccccatctgttcaggaggctcaccagcctcagcactcattaggcacttggtgtgtcctggagcctatggcagacactggacaaagcccttagttgtagcgcccacagcagatgtgcgtctggatggggagcagactgaggcrgggggayggggggtgggcaggcgtgagccgcctgttggagctggggcttggtgaggctgcgcgaggcggtgctcctcttcttcccaccagcgttctgtcccgggtcrcttgtgtgctgggcaccctgcatggacacgggataaaacccagagatccccacaaggctcaagctgcatcctcagcttccccagcaccagcccagactgctggggcaggaccaggtgacatttagcctcctccccaggaactgttcaagaaggtggtgccctaccactgcctgggctccatctggtcccagcgggacaagaagggcaaggagcacctggcgcccaccatccgcgccactgtcacccagttcaacagtgtggccaactgtgtcatcaccacctgcctcgggaaccgaagcacgaaagccccagacagggccagggtggtggagcactggatcgaggtggccagggtatgccagaggaggggcctgggcccccactttggcttcatctgttctcaggttgtggtctgcagtccaaggccctgtacrggccccagtctacccttcccaggggcatgctggccttgactctcccagcccactgcctggatgctcacgtcttccttacactctttccttgggttgagctaaaatcctcctgtcacccccgggtcgcaggcgtgccctctggggactccctgggtgtctgtctcattaggaggggaggcttggycaagggggactgaggccaggcaagctgggagctccagccccacctcatgcctcctgctcttcccgccccaggagtgccggatcctcaagaacttctcgtcactgtatgccatcctctckgccctgcagagcaactccatccaccgtctgaagaagaygtgggaagacgtttccaggtgggcatgcctctgtaggagctcctggtgcaccagggacctcccacagggctggcatcacccccttagtgagcccatgggaggccacaaaccctgagggcagggacccttcactgacctgagttggcagcagctctgcctcagagctcggcttcctaagctgtcagatggtgggttgagccacatcagagattttcaggtattcgtgttgtagccacagaaccctcatccaattgaaatcaaaacctttgtgccaggcgcaatggctaacgcctgtaatcccagctacttgggaggctgaggcaggagaatttcttggacccaggaggtagaggttgcaatgagtcgacatctggccactgcactccagcctgggtgactgaaactgtctccaaaaaaagaaaaaaacccctttggaaatagctgctcagtggaaacgggaatggggtcctgttgcaccaacatgaaggccccctccccagacctgcagagcgttagtgctctggggtaccctgtgtgctgcgttcaggcagtctggggtctttcagctctaaaataaaacggatttgcactcacacccctccctaccattcccagctttctctttccttctttgcccttctgacagggacagtttccggatctttcagaagctgtcagagatcttctcagatgagaacaactactcattgagccgggagctgctcatcaaggtggagtggcggcaggctggggcgggggctggggcgggggctggggcggggctggggctggggcgggggctggggcgggggctggggcggcgggcggtggcattcgcttcttgctgggaaagttcctttcccgtgtgcgtgaagggggaagagggatctgtttggcccctgggtgtttgagggacagggccccagttaattggacacagtaagggtagcagtggaggttccaggaggagtagatgggcatcaggaccagcaggcctctggcttcctcgccggtccctcctgctgggtgggaaggggatgcggctcctgcccccacaccggcccagtctgtccccgggaggccaggctcctgacgctacctctgtctgctctacacacccaaggagagggcagcctgcctaccccagggacaggagctgcaggggatgccaggggccaggtggccagacctgggaggcagatttggaggccccatgtggcttccctaccctgccccgagaagagacactgaccagagaaccctgtagaattcttcccatggcaccccattagctgtggcggataccccagatgactgaggagaactttcagtgactaatggattcacgaggcctcagagggagtcaagtgtcactgcctggtgcccctggcatacccggtcagtgaaatggcatctagggcccccctcctgcgtggacacacacagagttccctacaggggagcatcgcagggggctcctgggacacctgtccctctccctccrtggcacagctccactgggggccctggcatgcacgagaagcccagaggacggtaccctgatcagtgaccaaacgggtaaaggcagatggggcagagcctctggctaggacagaagagcctgttctgagtccctggggggcccagggcaagtcactgcccatctcagggccatagtttcctcatctagaaaatggaggaatgccagccctggggtgctgaccttatggaaggttcaagggagaaaggagtgtgcagccataacaggactgtagcgcagagtctctgaggccctgcgaggcaggtggagtttttttatttgtttagagaaggagtctcgctctgtctcccaggctggagtgcaatggcgtgatctcggctcactgcaatccccacctcctgggttcaagggattctcctgcctcagcttcccaagtagctgggattataggtgtgcaccaccaacccaggtaatttttgtattttttagtagagatggggtttcactgtgttggccaggctggtcttaaactcctgacctcaagtgatccacctgccttggccttccaaartgctgggattacaggcgtgagccaccgcaccatgcagcaggcggagttctcatccgcactttccagagggggaggcaggctcaggaaggccaggccaccggcccaggaccccacactagtgagtattgatacagggtcagccctggaacccgaccacactggcagcaccccaggtcagggtgcctgagggctgaggggatasggccttgctgaccctgtcctctaccctggcaggagggcacctccaagtttgccaccctggagatgaaccccaagagagcccagaaacggccgaaggagacggtgagagtgcccaaggccgcggaggggcagggggctggcctgggggtagggaggagggccctttcctctctagccacggtgcctatgggccccattagaggtagcctcctctggaccctagcagagccacacctggatcagctggtatctgggaagaccagctgcagccacgaaaggacaggcctggcagagccggctcaggcgggtgtggggctggggagggccaggggccacacgacttgggaacctggcatttcccagatgccagccagggagatggctagagggagtctggggtccagggagacagtgggccccaggaggcccccagaggtcccccagctgttccaagtgagaccagttggggctgggggctgagaaagccttcaggggaggggccttgctcatcytcctaccccaatgtcacagggcatcatccagggcaccgttccctacctgggcacgttcctcaccgacctggtgatgctggacactgccatgaaggactatctgtatgtgagtgtgccgggcggggctggagtagggcccgggaggagagaccttccctgagccctgggggctgggctgccacacctgtcccagcaatgagtaaacagctcagtgccctgctggtgacaccccagggctgcccaaacacagagctgcagcagggtttggctgagtgggacacagcccatccctcaggcagtgaccctgagcacagagggaagccaggccctcagcggtcaggcggcacgtggtggctgagcagggccttctcacccaaggcctcagtccattgtcctccgagagtgctggacaagaagtccccaagcctctgcccgcatgtccccttgccctggtgcccagcaccggcttcaatccaggggtgtgcgtgccctgccccctggtgggcactcttgatagtgcagcatgaggtggggagactgtaatggtcaaggggtcactttctgacggccattgggtgtccaccttccagggcagactcatcaactttgagaagaggaggaaggtaagcagctgcaggcagccctgacttggggaggggtggaaaacagacccaccagggtaggacatttcaactcctaccctctccttagattcatgggacatgggacatttggacacagagagaagggggtcccctcccactggagrgtgagggtaggaggttataatccaggaccacctcctggggagtggctgagcccaactttgagaacaggaaggcctggatgggagtagaggggrggaagggaccccaagaacaaagacccagagactggcccctgtgctgcccgggrggccttgtcaccgccctgtgcttccctctggccccaggagttcgaggtgatcgcccagatcaagctgctgcagtcggcctgcaacaactacagcatcgcgccagatgagcaatttggggcctggttccgggccgtggagcggctcagcgagactgagaggtgaggccggggsagcaaatggggacagtgggggcaggctgtcctagggggccagctccagagggccagcagctatgacccatggtcagcctcagcccctgttgcctgaggatggccggggcaccccgactccagcttctgggcaggtgctgggggaaggccggagcatggcccctggttgtcacaccactgcccctctgctcatagctacaacctgtcgtgcgagctggagcccccatcygagtcagccagcaacaccctcaggaccaagaagaacacagccattgtcaagcgctggagcgagtaagggcctggccaagggtggtaggggcagctgccttggggctcagaagcttcagggctgagcctgggctcagggagtcagggaggctggccctggaatcctaccctgctgctgactggccctgagactgggatgagtcccctcacctttttgggcctcagtttcctcctctgtgaaatggggtgatactaaatgctctcccagatggctgtggtgaatggagtactggcaactgtcccagcactttgcacagtccttgggcgcagggtgcagggrctrtggggttgggatgtgtccttggggagcccccttaactaagccaactcttcacccagccgccaggcccccagyactgagctcagtaccagtggcagctcccactccaagtcctgtgaccagctcaggtgtggcccctacctcagcagcggggacatcgctgacgcgctcagcgtgcactcggcyggctcctctagctccgacgtggaggagatcaacmtcagcttcgtcccggagtctcctgatggccaggaaaagaaggtgactgcctgcccttctccccaatatcctttcccatctccccactccaaatccatgcatggggccaggaagccctggatcctgaacacagcttctagaaggttccccatctggcagctggcctggggtgcccccacagggcagtgggatctgctgatcttaccgtctccctcagttctgggaatcagcctcacagtcatccccggagacctccggcatcagctcagcctccagcagcacctcgtcctcctcagcctccaccacgcccgtggctgccacacgcacccacaagcgctctgtctcagggctctgcaactccagctccgcgctgccgctctacaaccagcaggtgggcgactgctgtatcatccgcgtcagcctggacgtggacaatggcaacatgtacaagagcatcctggtaagccggcgggggtggcctgggtgcctccctccactggcggcaaatgcaccctgaacacagtgcaccatccctgccctyccggggtctaccttgtagttggcggggaaggacagatgtcagccaggtacagaaatgaagaaggtagtgatcagggacaaggctggcctgagggcagagggggaggaaaggagcagccgtgcaaagcycccaggagctgaaggggckgtgctgtaggggagrtgaggtcagggaagtatccagggcctggccacataggccctgagccctgccaggacctcgactttctcggggaggaagacaggagcaatgatggctggcttctctgtctggygtgggctggtaccagagccgcaggggtgttggttaggaggccgctgtggcaaccaggctgggagccctggaaggggccagcagggtcagagtctagacaggatttggagacagcagatgggaattgctcacagaatgggtttgcctgggggctctttcttcatcctccaggtgtcctgcgacagatgaaccatttgtaacccccaccctctgtaccccagccctgggtcaggtgccccattattcacacacgctcctgacccctcattgccaggagctagcatggttgtcattaagcagtcacctgtggccctatgtccgagttccgcctgtgctctggccctcagggtcaaggtagcaggggcctggcctatgctgaccacactgagcatcctggccggcccctcctttcttacctccagggcttggactagggactgtctgttccccaggctcagtgatgctgttatcctggaggggcaagtgcttctcaaggaagtgtgggaggagggaacagtctcttacaggagaagcagggtaggcactgctgggacagacccctcctcattccatggaggcctcacatggggaacagaaggayggaggcctcacttggggagtaggagaatgtgacaaggccctctccggacccagcacctggccagaggctgtgagtgcctgtgcttggtgctgaggggactccagagggtccttggccactgcactctgggggagccgctccagggtcttttcyctgatggtccatcccccgccgcgatgcaggtgaccagccaagataaggctccggctgtaatccgcaaggccatggacaaacacaacctggaggaggaggarccggaggactatgagctgctgcagattctctcagatgaccggagtaagtcagaagaccagagggcgatggcagagggggcaggtccacaccactccccagccccaggttggaagcctttggccccagaaaattcaccagcagagtgtgggtagacactgtggacagggcagccctggctgcccccattgtctgcttgctgtccccagcaaccactggacctccccagtgtgtgcccttccctaggcgtgaacaggcagttcaaagctcacatcagtgaggagcaaagagaaaaggcatttttcactgggacaggttagccacgtggcccactggaagggackctttctggctaagacaagaaaacatgtgctctacaaagaatggtgacagctgtggaccaaagtgtcaagtgttaaaatccatgagtgtgtgattctaaaagcagaacaggctactaggaggccaactcagtattctagaaactgggaaagtgtcaagaaccagtgcaggctcagagtggggtatcctgggcctggagacgctgggcaagctccttaagccctctgtgcttgtcttctcatcccccaaatggaaatgaaagtagccagtgtgttcatcatatatgtaaaaatctatatgtatgtatatatgtgtatatatatgcatgtatatgtgtgtgtatatatatgcatgtatatgtgtgtgtatatatatgcatgtatatataaagcatctatgtgcaccataaaagttaactataaatactatcatcgctgttttctttccagtgagctgaacaccacctcccaccattagcccagacagtaagcaatgactcctgtgatccctagaagttacagtctaaatcctctggcagcttcttgcaccatttcggttaggtgggcagggtaggcgggacccccatcttacagaaaaggaagactgaggcctagagaggttaaagatgacgaaaagccacacgatgtcggcaggagcacaaatcgagcccagctctggtttatagcaggctgtgggccagaggagatggtgggaaatggagccaaaaggaagtgcttgccgggtgccagggttcaaggagtacaggcctccctggaacgggcgccagagccctggggcaggcctgtcctttcctggtccttggatcccttgtcctgagtagggcaggattctgggaggtgacctggattctagaaagcctgttccaggtgggcagccagcactgcagtatgggcaggacggggtgaccctctgccagctcaggccaagccggggggttctggagtcagtccctgtttaaacaagagtcatcaggttttgtgaggacctcagcagagtctgtcctcaggcaggagtcattgagaggggtccttggagttctggagctgtattggaggggatctgaggtctgtggctcaagacagtccttgtatgggctctcaagcggtaggggtatcctgcagggcccccaggagcatccctgatcacccctctgcccctccccaccagagctgaagatccctgaaaacgccaacgtcttctatgccatgaactctacygccaactatgactttgtcctsaagaagcggaccttcaccaagggagtgaaggtcaagcacggagccagctccaccctccctcgcatgaagcagaaaggactcaagattgccaagggcatcttctgagggcatcctcccagggtctggctggctggtagccaagcacttatggaccagagtggcccaggccagctgggcgccttcctcccacctgccagcccagggtaccccagactccagtttcatcctgaacctctcccgctgctgggattgacgcctgccattggtcaggctgacctggcctcccgtggaccactcgctgccttaggtgccttctgctctctggaaccagaggactagctgacttttgccaaggagcagtgccaacgggcatggcatggtgccctgcctgcccccgggcrccacctctgtacacttccctgacaccttcccaggtgtgggtcactgccacctgtgcccatgggcaccccagagcacccactgtgaccactgcagttctctcatgcccacaggcactggcctgtgaccttcgcaggggtcccggcccctcccaccactctagcctttctcaggctgcaccaaagattccatcatcagggccaactgagagtgagggagtctcacccaccgcttaccccagccctcccctgggagcagagagagaaaccctcttcatggaccagactctgcacccggtgagtgaggacagtcccagctgagtcccatcgatgttgaatctcatgccactgcaagtgccattcaccactgcgtcctgggctttacgagaccatgcaagacgggggttagtgaggaaggaggatttggggtgggggtggggtgattgaatatttgtataaaaagcaaaaagaaaaaaaaaatgtttgtttactgattggggaggggcaatatttatttgttgtaaatagcaaatgctagacttgaatattatattaaaatcctgtttctactataccctggtcattacagttttgttctttcattacctgtcttaattaaaatgagatagagactctcacattccgtgtttaagtaaggacccttgcagggttatccagttattttatgcacaggaaaagccagccactcttctcagcacactgaaggaaacacaaaagtttacctttcatacagcagatgttccttttggcaccattaaactgggaaatgtgctgagacagccctcagaactcctgggactagagtttggaggtactttcacaaggcatagcaagaatttctgaaatttagctgtctttaaaagtaacatttgtggccaggcgtggtggctcatgcctgtaatcccagcactttgggaggccaaggcaggtggatcatgaggtcaggagatcgagaccatcctggctaacatggtgaaaccccatctctactaaaaataaaaaaaattagccaggcatggtgccaggcacctttaatcccagctattcgggaggctgacgcaagagaatcgcttgaacctgggaggcggaggttgcagggagccgagatcacgccactgtcctccagcccgggcaacagtgtgagactctgtctcaaaaaataataataataaagtaacatttgtgacaaaagatggcagagtaggaggccccagggttcagtttttgcacagaaacaacgattaagctggaaaaaaagaaaactatcagaataaactgttttgggactctggaacctggtcggacatagtcaccaggggaacacttggtgaagggagatgctgctgaactccaacagttaacaggatctccatcaagtcacaggctgaccaagagacaacagaacagaaacttcgtgactatacacaacaaggaatacaaatataagcctggcaaaaatacgaatataagcctggaaaagtcactatggacacagaagactgcatccttcaataagcaaaaaagcaattcctgaggagggagacaatctgatttccagagtcactgcattataatactcaatgttcagttctcaaaaaattacaaagaaacaaaaatatggctcattcacaggggaaaagaggatttaacagaagctatccttgaggaagctcagacattaaaattactagtcagagacattaaatcacttgtcctaaatatgcttgatgagctaaaggaaaccatggaaaataatgtatgagcaaatgggtgattagcaataaagggatagaaattataaaaaccaaccagaagctccggagctgaaaagtataactgagaagaaaaatgtactagagagattcaacagcagatttaagcaggcagaagaaagaatcagtgtactggaagataaggcaatagagattattctgtctagggaacagaaagaaaaaggaagaaaaatgaacagaactagaggttcttgtaggacaccattaaatgtaccaacatacatttaatgagagttcagaaaaggcagagattatttgaataatggtccagaacgtcccaaatttgatgaaagacataaatctccatatccaagaagctcaatgagtttcaaacaggataaactcagatccatacccaaatttattagtcaaattgtcaaaagacagaaaatcttgaaagcagcaagaagagattcatcatatacaagagatcctcaggattaacagctgatttctcatcagaaaccatggagtctagaaggtaataggatgacatatttaaagtgctgaaagaaggctgagcatggtggctcacacctgtaatcccagcactttgggaggccgtggtggacagatcatctgaagtcaggagttcgagaccaaactggccaacatggtgaaaccttgtctctactaaaaatacaaaaattagccaggcatggtggcacatacctatagtcccaactatttggaggctgagccaggagaatcgcttgaacccgggagacggaggttgcagtgagccaagatcgcaccactgccctccagcctgagcgacagagcaagactccgtctcaaaaaatattctcaaaataaagtgctgaaagaagaagcaaaacatcctttaaggatgaaggagaaattaagacattctcagataaaagttaagggagttttattagtagacctgccctacaataaatggtaaagggagtccttccagctaaaataaacactagacagtaacttgaagccatatgaaaaactaaagaacactggtagagataactaacaggtagttagcaaagccagtgttatttcactttggatttgtgtaactcatccttttttcttatgatttaaaggtaaaattcataaagctataaatccacattaatggaaacaatgtataaagatataatctgtgactgacagagggaagatgtgtaatagcagtgtatactacttaaattcaattggtattattgaaactagattgttatatgtttaagatgttacttgtaataccaaaagtaaccagtaagaaaataactaaaaagtatataggaaagcaaagaaaggatcaaaattgtacaaaagtaaatccgtaaaaagcagtagtggaggaattgaggaatgaaaatcataagacatacagaaaacaaacagctaaatggcagaagtaaaggttttctcattaattactataaatacaaatgggttaagttctccaattaaaaagcagagattgggccagatgcagtggcttacacctgtaatcccagcactttgggaggctgaggttggagatggcttgagccccggagtttgagaccagcatgggcaacacggtgagattctatctctacagaaaaattttaaaattagccaggcatggtgatgtgcatctgtggtcccagctctcaagaggctgatgtgggaagatcgcttaagcccgggaggtcaaggctgtagtgagctgtgatcctgccaatgcactccagcctggacaacagagcaagagcaagaccctgtctcaggaaaaaaaaaaaaaaaaaaaaaaagatgggcagaatggatttttttagaactttgtctatctatatgctgtatagactttttttttttgagatggtgtttcactcttcacccacgctggagtgaagtggcacgatcttggctcactgccacttgccccctgggcaagtctcccaagtagctgggattataggcacccactatcacacccagctaattttgtatttttagtagagacagggttttgccacgttggccaggctggtctcaaactcctgacctcaggtgacctgtccgccttggcctcccaaagtgctaggattacaggtgtgagccactatgcccagcctgtagagacaaattttattttattttgaggtggaatctcactctgtcgcttaggctggagtgcagtgatgcaatctcagctcactgcaaactccacctcccaggttcaagcaattgtcctgcctcagcctcctgagtagctgggattacaggtgtctaccaccacacctggctaatttttttttgtgtgtttttggtagagacagggttttaccatgttggccaggctggttttgaactcctgacctcaagtgacccacccactttggcctcccaaagtgctaggattacaggcgtgagctactgcacccggctgagacaaattttgaatacaaagctacaaaaaagttgaaagtaaaatgttggaaaaagttattccatgaaaatagtatattttaacaatggctatagtattatcagacaaaatagattttaagtcaaaaccgtaacaagacaaggtcagtatacactgacaaaagctgcaacttctcaagatacaacaattgtatccatacacacacttaaaacacccaaaatgtatgaagcaaaaattgatataattaaatgagaaatacacaattggagatttcaatacctcatttccaataatggataagaacaaccaaacagaagatctataaggaaagaggatttgagcaactctataaaccaattagactgagcagacatatacacaacacacaaaccagcaacaacagactacacattattgtcaagtgtacatggaacattttccaggatagaccatatgttaggccataaagtaagtcttaatttttttttttaagacggagttttgctcttgttgcccaggctggagtgcaatggtgcagtcttggctcactgcaacttccacctcccaggttcaagtgcttctcctgcctcagcctcccgagtaggtgggattacagcacccgccaccacacccggctaatttttgtatttttagtagagatggagttttaccatgttaagcaggttggtcttgaactcctgacctcaggtgatctccctgcctcggcttcccaaagtgctgggattacaggcatgagccactgcacccagcaataaatttttaaaacgaaattatacaaagtatcattccaattacaataggataaaattataaatccatagcagaagaaaaactggaacactcatgaatatgtggaagttaatgcactctcttctttttcacgtcagatgggtaacgtgccgacgtaacagggtttgagggtgacacatctcacgcatgtgcatgaacacccaatcatcattgttcatcaactacaaaaggatcttaacactcttcccctccccgactccagacggagtcttgctccatcgcccaggctggggtgccgtggcacaatctcagctcactgcaacctccacctccaaggttcaagcaattctcctgtctcagcctcctgagtagctaggattacaggtgtgcaccaccacagctggttaatttttatatattttttaatagagatggggtttcaccattttggccagcctggtcttgaactcctgacctcatgatccacctgcctcagcctcccaaagtgctgggattacaggcgtgagccaccgtgcccaggcttaacacactcttaaacaaccaatgggtctaaaaggaagtcacgagggaaattagaagacaccttgagacaaaacaaaaacacaacataccaaaacttacagcatgcggtgaaatcgaaagcagtgcttgggggaaatttatagctgtaaacgactacattaaaaaagcagaaagatctcaaatcaataatttatccgcacacatttaggaattagaaaaagagcgaactaaacccaaagctagcagaatgaaggaaataataaagattacagcagagataaacaaaatagagaatagaaaaatagagaaaatcagcaaaaccaaaaactggttatttctaaagaacaaaattgacaatactttagatgaacaaagaagagacaagactcaaattactaaaatttggaatgaaagtgggaacattcctaccaactttacacaaataaaaaggatgagaagataatgctttataagagaatgcaccattgcatgccagcaacatacagtggaatattattcagtcataaaaaggccaggtgcaatggctcatgcctgtaatcccagcactttgggaggccaaggtgggtggatcacttgaggtcagaagttcaagaccagtctgaccaacatggtaaaaccccatctctactaaaaatacaaaattagccgggtatggtgatgagcacctgtaatcccagctacttgggaggccgaggcaggagtattgcttaaacccgggaggcagaggttgcattgagccgggattgtgccactacactccagcctgggcaacaagagggaaactccgcttcttaaaaaaaaaaaaaaaaaaaaggtatggtatgcccacacatgctacaacatggatgaactttgaaaacattacaattccacttatgagaaatatctccaaaaggcaaattcatggagacagaaaggatagaggctaccaggggttagagggaggggaaatgaggagttagctaatggatatagagcttctatttggggtgatgaaaaa

SEQ ID NO: 97961 - DNA, 12945 bp, Homo sapiens
  misc_feature (1)...(12945): n = A,T,C or G
cacggctcactgcagcctcaacctcctgagttccagtgatcctcctgtctcagcctcctgagtagctgggactataggcatgcaccaccatgacctgctaatttttatttttatttttgtagaaatggggtctcactatgttgcctagcctggtctcgaactcctgaactcaagcgatcctcccaccttggcctaccaaagtgctggaattacaggtgtgagctaccacgcccagcacattttaagattatttaattgttcctatttttgcttcttctggtctctaagtaatatatgtgtactgctttttcttatcattgatttctttaacacatgagagtacagcccagaagataaagaaagtttatcttcctttcttgctattatggttatatcaccattttcagcttctctcctagttatctttgtacctttaaaataatatccttatatctttatttattagttccatcaattagcatattaccctatgtcgcctcttttttctcgttttgtttttttgagatggagtctcaaacttcatgtctatagcattatccttttaaatttttattttttaaaagtaacactctgagtgtggggtgactaggtcaaaggatatgagtataagactcttaaaatagtgtatactcacattttcatcaagtatccatacttgcttatgtcatttacccaaaaattttttttttttttttgatacggagtttcgctcttgttgcccaggctggagtgcaatggcacaatctcggctcactgcaacctccacctcccaggttccagcgattctcctgcctcagcctcccgagtagctgggattacaggcatgcaccaccacgcctggctaattttttgtatttttagtagaaacgggttttctccatgttggtcaggctggtctcaaactcctgacctcaggtgatccgcccgcctcggcctaagtgctgggattacaggcgtgagccactgcgcctggtcatcatttacccaattttctatgtagatcttgatattctgatcagtgatattagctcattataatacagatattaagctttcatctgtctatcccatttactacaattttctaacttttcattttaatattgatgattttcattgatactagtttgattatcatatagcaaaatcctcatctttaccttagctaattaatgtttcagaaaagaaatgaacaaatataccaaaatgctatacttctaaaccattatttttccataataatttgtgctttaatcatacttttcagagcaatcagaaatgttgcttctcatacttaaccggacacattcaacacgggaagctgctcttttccctgtggaatccactagattcaatggtgaccagcttttccttcaccaagacctctaatgttttcatacattcatccaacaaactcttattaagaaagtactctgtgtcaggtcctatgcttggtactagacttataaacctattccagagagtgagaaatgtgtataaatcagttatattaatacaccacaaaaagtagtattttcactagtaaagacacggaatcaacctaaatgacaatcaatggtagactggataaagaaaatgtggcatatatacaccatggaatactatgcagccataaaaaagaaacaagatcatgtcctttgcagcaacatggatggagctggaggccattatcctaagcaaactaatgcaggaacagaaaaccaaatactgcacattctcacttataagtgggagctaaatgatgagaacacatggacacaaagaggggaacagacatcagggcctacttgagggtggtaggtaggaggaggcagaggatcaaagaatgacctatcaggtactatgcttattacctgggtgacaaaataatctgtataccaaacccctgtgacacacagttaacctacacaacaatcttgcacatgtacccatgaacctaaaagttaagaaaaaaaaaaaaaaaagaaaagtaatgtttaaaagatttctacaacataagtgatagaaaacaaaatgtgactaacttggctgacaagtgggtcaaagaagactctgcagataaggtaactgaggtgtgtcttcatttccaggtgaataaaggcagagggtgcagagaccaggaggtatgaacagtgctgtttcattcatggaattgtatatagctccaacttaaggccaggaagtcacatctaagaagggagaattgaaagatgaggctggaaaaatataggggccaagtcatggaaggtatcctgaccacatcagtgttttagatactacacttgatcttagccaaaagactgagaagcgatcacatcagtgttttagagaaatcactctgggagagggactagaaaagccaactctacaggaaacgaagagaccagtactacaagagagcaggtgacactttaaaagactatttaacagttgctaagtaatattgcctttctcatctgtaaccatcagacataaaacactggttttcaccagcactatacatcagcaagagacagctgtgtctgcgtatcaagccaatgtcattccagtcataaacagtgcaggatgatcaatcagccagtgtagacaaatcctggatcaaatttcaaacttcattaagcttttgaagtacagaaaaaatcactgtggctgttctcccatcccctcttcaccactcagcccagttactacctttgggaatcccagaatccactccaattatcaaggtcctcactaccacttgattaatttctacagtgacccatttccaaaacatcagcggaactcttacgttgatggaatccctataaagaacagaaacaaaactcttaaaatgggtcttaagttgatttgacagcatacaaaaataaactcaccactgcccctctcaggaatcagtagggaagaggaggtcgctgccctatatttttatggttcatcctcgaggtcaaagtgttaaccatgtttggttgagttttacccacaccaaagcaaataccttttaaaatgcaaatgtcatgagctttgccatgccttgaagattcatatgaagacaaccgcctgggggccttcaccactgagcacaggcttatgcagcctgctgggagattatccccaggagtccatgtcagtgaaatatattgcccatcaccacctaatgtgttcttgaaatggattacagaggagacatattccgctttttgagtctttgatgaaggaaggaggcaggtagagctatatacaggggatatctaccatccaatttcctttacttgatgcaagcaaatattttgaagatcatttaacaaatcagctaatggaatgtctacaaagtctcataagaaagagcccactggctgggtgcggtggcttacacctgtaatcccagcactttgggaggccaaggcgggtggatcacttgaggtcaggagtttgagaccagcctggccaacatggcgaaactccgtctctactaaaaatacaaaaattagccacgtgcattggtgtgcgcttgtaatcccagctactcgggaggctgaggcaagagaatcacttgaaccagggaggtggaagttgcctgggtgacagagcaaggctctgtctcaaaaaaaaaaaaaaaaaaaaaaaaaaaaaatatatatatatatatatatatatatatatatatataatctccactannnnnnnnnnnnnnnnnnnnnnnnnnnnnnnnnnnnnnnnnnnnnnnnnnnnnnnnnnnnnnnnnnnnnnnnnnnnnnnnnnnnnnnnnnnnnnnnnnnnnnnnnnnnnnnnnnnnnnnnnnnnnnnnnnnnnnnnnnnnnnnnnnnnnnnnnnnnnnnnnnnnnnnnnnnnnnnnnnnnnnnnnnnnnnnnnnnnnnnnnnnnnnnnnnnnnnnnnnnnnnnnnnnnnnnnnnnnnnnnnnnnnnnnnnnnnnnnnnnnnnnnnnnnnnnnnnnnnnnnnnnnnnnnnnnnnnnnnnnnnnnnnnnnnnnnnnnnnnnnnnnnnnnnnnnnnnnnnnnntagctgggactacaggcatacgccatcatgcccacctaattttttaatttttagtagagatggagtatcaccatgttggccaggctggtctcgaactcctgacctcaggtgatccacccacctcggcctcccaaagtgctgggattacacacgtgagccactgagcctggcaatttctaaagactctgtctcctttgtgggttctcttactctgcccagttgttaaagcttgggatcccctgggtttgtcttttgcttggcccattgccctcctcagtcagctccccatgtgcagtctcaacctctccctggacttcggcttccatttgcactgatcgccccagaatctgcgccaacctttccgacttctccctggagtgtcttactattaagtgttggtgcttatggagaaatctgtctacctggatgttcctggaaatattgagctgaataagcccagaattgaacttgcttcccctgtccctgccagggcctcctctgcaatcctctatctcaggtgccgatcccagtacccacctagttatctaactaaggttttaacctggaaaaatcaacaactcctcattctttctcacatctgtgttcagtcaatcaccaaatcctatcaattttacctcctgaacacttttctttcctaatttaaatttttaaattttcttgtggagacagtctcactatgttgcccaagctggccttgatttcctggcctcaagtgaacctcccaccttggcctcccaaagtgctggggttacaggcaagagccactgtgcccagccctaaatgtttttcaaattgatttcttcctctccactccctgatgcccctgccgtcatctcattcctaggctaccatggcagctgcatccagaagtgccccaagggaggaatcccaccagcatgttcatagtgtcatatgtttttgtaaaacttgcaaaagtaatataatttgaccataacaagctaagatccttgtctctttctgttccagcttccctgtgtcaaatgtcctcttcctttgggaggttttacaggttgctataggcattttggggacccaagtaaaaatcagttaaagtagggatttactttacatgggtacagtaggatatactgatatgattcctggttacttccgtgagtaggtaagttatgaataatggatcatcccttcacccaatgtgctgactcacttagcatcatagtgcaatacaattatgcctaaaggcacccagccccggaagtacatgggttgtggagaagcaaggtttgaaatgtatggggccagaacctgtctgtgaaaatttcttccaaaaattacagctcatatatgaacaaactggagagatagttccccaattttgattacaatcttaaacatttatataatattatcagtaataaaatgtgaagcttttgtttttctaaactatcaatactaaacaaatttcaatcagccaggctaaaaagaaagatttctattctctctagaggaaaagattacaaacattgtggccatctgaagaggcaaacattgttgctaaaaaaggtgataagaggctaggcggggtggctcacgcctgtaatcccaacactttgggaggcccaggcaggtggatcacttgaggtcaagagttcgagaccagcctggtcaacatggtgaaaccccgtctctactaaaatacaaaattagctaggtgtggtggcgtgcacctgtaatcccagtcactcaggaggctgaggcaggagaatcgcttgaacctgggaggcagaggttgcagtgagccaatatcgtgccactgcactccagcctgggtgacagagcgagactgtctcaaaaaaaaaaaaaaaaaaaggtggtaaggaatggggaggcaccaccaggagctgccacgtccctagagcagtcacgctggtatcatggtgtcagtaattaacactgtggatacctsccataaggatatgattcatgatgcccagatggactactatggcacccgcctggcaacctgctcatcagaaaaatccgtcaaaatcttcaaagtgcacaacagagggcagatcctcattgccaacctcagaagtcatgagagtcctatgtggcaagtggcctgggctcaccccacatatggcaatatcctggcattgtgctcctatgattggaaagtcattatctggaaagaggaaaacggcacctgggagaagacccacgacccctcaggatatgactcctccgtgaactctgtatgctaggtcccccrtgactacggcctgatcctggcctgtaggagctcagatggggccatcttcctgctgacttatacaggggaaggccaatgggaagtgaaaaagatcaacaacgcttacaccattggctgcaatgccatcagctaggcccctgctgttgtacctggaagcctcatagaccagctgttcaggcagaaacccaattacatcaagaagtttccatcaggtggctgtgacaacctcttcaaggatggccagtggaaggagagcagaagctggaagcacagtgactgggtttgagatgtggcctgggccccctccatcagcctgcccaccagcaccattgccagctgctcctgggatggtcgtgtgttcatctggacctgtgatgatgccttgggaaatatatggtctcccaaattgctgcacaagttcaatgatgtcatgtagcatgcgggcaggtccatcacagccaacatattggccatctctggtggagacaataaggtgaccctgaggaagcagttggttgatgggcagtgggtgtgtatcagtgatgtcaacaagggccagggctctgtgtcagcttcagtcatagagggccagcataacaagcagtgacaagacaggcagagcctcccacctgccagctccaggactgactgatcatctaatctgccttaacatgatcagagatggtttgtaatctactgtccagctgaaagcattcatgttatgaggcagaaactacaaatgatgttcaaatctattattttaaaatatttttagccatttttaggtaactttgggttcaggcattatttgggaggttttgtttccaaagtcactaaataaagtcatattgcttattaaaaaaataaacaaaaggtaaggaatgaagaatggtagaagtttcaagcagttaataaaaccaaatgatgtttttaaaaaaatgttgtaggctgggcgcagttgcccatgcctgtaatgccagcactctgggaggccaaggtgggaggattgcttgaggtcaggagttcgagagcagcccgggcaacatagggagactccatcgctacaaaaaaattaaaaattagacaggtgtggtggcgcacacctgtagttctaactgctcaggaggctgaggcaggaggaccgcttgagtccaggggtttgaagctgcagtgagctatgattgcaccactgcactccaccctgggcaacagaacaagacactgtctcaaaaaaaaaaggtgatatttgtgattaatcatttaatctttttgttatggactgaacatttgtgtcctcccaaaactcatatgttgaaattctaattcttaaggtgatggtattatgtggtaaggactttgagatggggttagtgccttaaatgagatcccagagagctctttagccccctttttgtaattaaggatacaattagaagtcagtgctctgcaatgtggaagaggaccctcgccagaacctaaccatgccggcattttcaccctcagaaccataagtaccacccagtctatggtactttgttattgtagctcaaactgactaagacacttggaatttgtaatgatttcttgattcattctaactacacattcctttttgttgcctcatccaatagccattttgaaatgcatagccgattatatcattttcttctttaaactacttcaaaggcaccattacctataattcaagctccttaacttggtgtattcaatagcatttattttcttggtgaagtaggagacagtgtcacctgtacattaggataaagtgtaagggtgatggtttataccatacagtgagaagaaggaatgacaaagggcaaaaagagaactagagatcatgaaagatccaaatcagattggaagtaagatcccttcctggccagtcaatactgaagtttaaaattcttctgcctggctctggttccagagtgtgacagtcagaatggtcccagcagtggttcatagagcagggcctcttaaacagctgcatacagaaggattgagggtgatggtgtaagattatcccagccatcgatcagaagagcaagggaaggtcaagaaaagtgtgtggagtttcagggataggggatggcaggaagaagtagctagaagtatgagagaataaaaatgtgctgttataatgaggccaaaagtaaagtgatattttatgcaataaagcttatgtaaatatgtgttttaaaacttgatttgattttttccacattaggaaagttcactatttcagaaagaaaataattctaaaaataagcctaccagcaactccacttctaggtatgtccctagaggaatgacaagcagagacttatccatattgatatttgtactctgatgttcaatgcagcattattcaaatagccaaaagatggaaacaactgaaatggtcatcaccagatgaacaaaatgaataggtaattaaaatatcatatacgcatgcaatggaatattaagccataaaaagaaatgaaattctgacacgttacaacacaaaccttgaaaacattgtgctaagtgaaataagccagatacaaaaggaccaatattttatgatgccacttatatgaaatatctagaataggcaaattcacagagacagaaagtagactaggagctactagaagctgaggagagggtgactggggagctattgcttcatggttacagagtttctgtctggaaggaagaaaaagttttgaaaatagataatggtgatggctgtataacattgtgaatataactaatggcactgaatttacatttaaatatggttaaaatggcaaattttgttttatatatattttaccacaattaattttttttttttttgagacagagtcttgctctgtcacccacgctggagtgcagtggtgtgatctcaggtcactgcaacctctgactcccatattcaagcgattctcctgccccagtctcccgagtagctggaattacaggtgtgcgccaccatgccagcctaatttttgtatttttagtggagatgggatttcaccattttggccaggctggtctcgaactcctgaccttagatgatctgcctgcctcggcctcccaaagtgctgggattacaggtatgagccaccacacctggcctaaaaaattaataatataacaaaaaacattgaatggtgtactttgaatgggagaaatgtatgtgaattatacctcaacaaatctgtttagaaaataaataaacctgaagtggattgtgaaatgaagcaatagtctataaaagaaacaagtccacaggcattataatcaaatcaagtaaatcagtagtcctggctgatagaagacacccaaactaaacatggaacagtaactcttacctagaaaaaactacagtgctcatgtcacactctctgtaacaggataccctttgggtctggacaccacataaaaactaatagaatggcagaataatacttcctccttgattttcttgggagcaattgagcaatggtgattactgcagctactaaagggcactgtcaacagaggctttgagcataagtgggcacaagtttccaggggaatatttaactctagtttgaaattttacaatgacataagtgaagaaaaacagtaataaaaataactgctatgtattattctctgagaagacatgctaaccgtattgcacagatgtggaaggagggtaccttgcccactgagtactggagtcaacactcaagttttgttctgtctctctccaaagcttctccaatctgtgactctacctctcacacaatactgggcgactcttcaaaaaaaaaaaaaaaaaaaaaaaaggctcagattggtgagagaggtaacaaattgcatatctgccatatctttaaaacttgcttaaagatgatttcattctatttggagaaactctggagtaagagggatgcttaaagagaaaaattcaaatttatctcttctgtgagcccctccaacacaggaccatggtagacttatcactcacctctagcatttaacacggaaattgtaagactggtgttgaatgtttgtataatgattaagtggatgatcgacagatctcagaaaaataatttgtgaaaggtttgccctgtgctctgaaggttaacacctttgtgtatagcaaattctggagaatctcttagggagtaagtaaatctctgaaactaggtttttgttgacaaatcttgctgtggaaaacatctagaacaattgtacaagatgttttaaaatatctttttgaaagcatcagaaagctaccaaagcagaaaggaattaagtggttacaattccaaaaaaatggaaaatgtcatgatgcaagtctgatatttgttactagttttcccatcaaggtatttgtcaattcacaagggccaactgagaggctagaagccgaacacaacttctgggagtcttctagggctgagaagataaaaattggacttcagagatcagaatggagaaagaaccctggtaaatacttcaagctctcagttgagacccctaagaaagtgaaccagaagcggaccaaccctcaagaagacagaagcccactttcaaattagcttaatccctgattgcatgaagatgatctctgtctactctaactgcctggtagaagtaaaagtaaatctcttttggaagaaaaaacatatataacccaaattatctctttcttttttgttttattgacctctagatgagaaaaaacccaacatataggagacaacactatctgatcaaaaacgaatagaaaaaaaagccagggccgggcgtagtggctcatacctctaagcccagcactttgggaggccgaagtgggcagatcatgaggtcaggagttcaagaccagcctgaccaacatggtgaatccccatctctactaaaaatatgaaaattagccaggtgtggtggtgcacagctgtaatcccagctactcaggaggctgaggcaggagaatcacttaaacccaggaggtggaggttgtggtgagctgagatcacaccactgcactccagcctgggcaacagagcaagactctgtctcaaaaaaaaaaaaaaaaaaggaaaaaaaagccattgaaacagacccataagacatcatggtattggaataatctgaagaaagcttaaaattatgccaataaacatacaacaaaacaagatgaggaatttcagcagagaactggaaacaatttttaaaatctaatggaagctctagaactgacaaatgcaatcattgaaattgagtctataatatgggtttcactcagacagttgaaaagaggattaataaactagaagataggtcagaataaaatctaaactaaaatatgttcgggggaaaggatagaaacaatggaagcgcttaggagatacacagaacacaggaaaaaacgtctaacacacatatcactggtgttctgaaaggcaaggtgggagaacgaagtaaacataacattggatgagataacagccaagaatgttctaaaatccacaaaagaaataatgccatagatttaggaagttcaaacaccctcaaacaagatgtatataaagaaaactatgcataggcataccataggaaaattcctaaaaatcaaagatgaaaaggaaatcttaaaagcactagagaaaaaaagacctataccatcaaaggaaaaccagtgacaggtgatttttcaaaagaaatgatggaggtcatacatacaaatatggaatggtattttgaaaatgctgatttttaagactgcataaactgatagaaataaaaaaatagccctaggagtagcttagacataacatctatctaagctgttcctagatcctttaccctcagaaactgtgatataataaatatttgttatgttgagctactaggtttaggggtactttgttacatggcaataggtagggagaaaataaatctcctttgaaaattcatatgcacagtcagccctctgatatattttgtagctaaaattcacactgcttctgtagtacaaaaaaaatccctcaatttaagattttaatttaaggcgtaatgttccctggtacctgccagaagcaaatgctaattctctctggaagaacccacattcaccccaaatctcaaataattcctaaagataaaagttccatgagtgagcccaggagttcaataccagcctaggcaacatagtgagaccctggctctacaaaaaaaaaataaaaaataaattagctaggcatggtggcacatgcctgtagtcccagctcctcaggaggctgtggcaggagaatcacttgagcccgggaggttgaggctgcagtgagccaggactgcaccactgcactcagcctgggcgacagagtgaaaccctgtctctaagaacaatgacaacaacaacaacaacaaaaagttccaagaaattcagctcagtcaaaatcacaacacacacgcagaaacaagacatcatgaacaagaggtcacagaaacaacagaaggcagaatgagacaaagaaagactctgcatactgaaatgatcaaataaagatatataacagaagtatctctagtatgtt

SEQ ID NO: 97962 - DNA, 104964 bp, Homo sapiens
  misc_feature (1)...(104964): n = A,T,C or G
gccaggcacaggggctcacacctgtaatcccagcacttcaggaggccgaggcaggcggatcacgaagtcaggagatcgagaccattctggctaacacagtgaaaccctgtctctactaaaaaaaaaacaaaaaaaacttagccaggtgtggtggcgggcgcctgtagtcccagctactcgggaggctgaggcaggaaaatggtgagaacccaggaggcggagcttgcagtgagccgagattgcgccactgcactccagcctgggtgacagagcgagactccatctcaaaaaaaaaaaaaaaacaaccaaaaaaagaaaacagaaaaaaaaaagcttcctattgttttaattatatactatagatgatttctttcttaagtttcatacaaatataaaatatagcaatattaaagtaacatataaataatatattataatgtaacgacagtttttaaaattacaagccctaagggaagccaaatatatattctgtatatgaactatcatgaattctgaatgagtgaagtacgaattaatgagatctcatgtattctgggacttctttaagtcctgaaggtgttataaaaggtaatatgatcaagttcctaccatgtactagttgctttagatatactttctcttatttttatcacatccctgctgagtattactgttgtcatttcacaaggtaacatacaaggtagagataggttacaaattttgctcagtgtctcagagtttctacataccagtgccaggaatgaaactcaggtcaatttcactctaaaaaataaactcttttctctaggcacatccctgctagtcacaataaaattaataagtattaaagatgacaaactattaagagtaaaatgcaccctttaattcaaatcggaattactgaatcaaatctgaatgctcacctctcttaagactgatttaaaatgtgatctccctgttttctgagaccacgattttccagaagacccataccgagtctgattcctcttgcttatgacatcagctttcagctttggtggttccccttccataacaaataccagttttacatccatttgtgttaaatatgagatacgaaaaaataagttcctgaaatatataaattagtaatacattaatcatcaaacactgatagtaaaagtcaaaatagtataacacaaaggcaagaacattagactagtatcaaaaacgttaatgtaataacattttacttaagctttaattagagtggaaaaccactgaattttctttttctttgacagagtctcactctgtcacccaggctggagtgcagtggcatgatcttgtctcagtgcagcctcaatctcctggctcaagtgatcttcctgcctcagtccccaagcagctgggactacaggtgtgtgccaccatgcccggctaattttctgtattttttgtagagatggggtttcaccatgttgcccaggctggtcttgaactcctgagctcaaataatccgcccatctcagcctcgcaaagtgctaggaatacaagtgtgagccactgtgcccggccaaaaccactgattttttttttttttttgaggtggagtctcactctgttgcccaggctggagtgcagtggtgtgatctcggctcactgcaacctccacctcccaggttcaagtgattttcctgcctcagcatcccaagtagctgggattacaggcatctgccaccacacccagctaatttttttttatttttagtagagatggggtttctccatcttggccaggctggtctcaaactcctgactttgtgatccacctgcctcggcctcccaaagtgctgggattacaggcgtgagccaccgcacgcggccaaaccactgaatatttttaagcaagaaagatttatgattattctaattgctatgtggaaaatagtctggggtaggggaggccaagagcaagaaactagtgaagatggcacttcaggagtatagatgagagatgaggttggcatagactgaggtggtgcctctggacactgagataagtttgtgaacacaaagtatattttggaggtagaactggcaagacttactgacggattagatgtggagagaagtaaaatagggagaaaatgtctcccaaatctccggcttttagtatctgaagcatcctagtggatacgttaagtaggagatagctatgtgagtctggagctcaaagggtaagaggtacgaatgtgagtccttaatataaagatggtgaatctagacatgttaaatagatcttaaaacctcaaaatgtaaaagaataacaacaacaaaagaaaaaaaaaggtgaaacaaaatcaagatcccaagactgtttatacatcatacatttatactgtaagagcttttactatacctgaggtggggcttcatgacgctgcccatcatttttttgactgtctgtgcctcacacacccagagactcagatcaactgcaatggttttcccaccaagattacgcaaggggatgtgttgcttaacaggctccaaaatttgccacaagtcattcactcccattctggtgattatctgctgttatgtgaaacacactttacaaaatattgttaaagaaacagaagctcataacaggaattcaaacaatatattataagccagttcaggataattcatagaggatattccttatttttttcatcagtcagcgtttcaaaatgaattaagaacacctgaaacgttaaaatggcggtaattggctttttcccagctaaaaacaagagctaacaaaagcagagatcggtagcgaatgcaaggatgctgtaaatcatttttgtctacttgaaaattcactccttgatttacatacttagagaatgggactaattctctatcatacccaggaaaaaaaaaaagaaaagcaaggaagcatgcaaacaaactaaagaaaaatggggttaataaaggaaaacttagaaaagtgagggaagaagaaacgagagaaaatgaagttagaggaatactgatggacataactttcttaaaagggcgttggctttttaaattgcaaggtcacataatgttcattgtagaaaaagaaaaaaacttttaatcacttataacttttaaccaccacccaaagaaaactaaagttaaacctttttccacgtacatgacattttaaaaacaaaattggcttaaactttgctactattatctggtttggtattttctataggccagcttttccttattatacatctatatttggttttctttccctttgttattatttggtaaagacattaagtagcatgtgcaatgaaaattcaatctgacgacacaaatacaacccagattatcctctaaataatgaccttcattcattccagaaacacaaggcaggagacaataatatattaagtcaaaagactatcacctttatgcagaaaccttctgaataaaaagtactgtattgtctgtacctttaacagagttcgttctaaaggtaaattttctcaaattgcccatgggtgcaaagaaaataaatgctggaagcgttgctgtctgtgacttaccctgtttttctgaacctgaattttatagtgtggccagtgctgccataagtattattccttttttttttttttttgagacagggtctcgctctgtcacgctggctggagcgcagtggcgagatctcagctcagtgcaacctctgcctcccaggttcaagtgatctgcctgcctcagcctcccaaagtgctgggattacaggcatgagccaccacacccagccctgccatgagtattattctgtgtactcatttctatgaagtgtacagtgacatctatggatgtcactttacagataaaaatatacagacttaaaggtaaagaaagtatttggtagtaacagtggcccagaatattgtctatttcacatcctgaagccccactggttgaatgtaccattgtggcattaattcagttactgtgaaaagttgtggttaattctggaaaaagagtgcagtacaaatattctcaaagtcattattatgaagagaaatgagacaaattattaacccatcagaacacattaaaccaaaagtctgagaagaaagttattgacagttttgctttcctttgtgactcacggtgcacactggaatagattgctatcgaagacaattatgcaattcctttgttctaatttaatttaaatgtgaccctgaccctagcagtcaaaattttaaatgcaggttatcttctggtttagcaatatctcttccaggaacttaagatatgttacgtggtgtgtatggatttatacaacaatattcactgtagcattgtttataatagtagacactgagaagagctaggtctccatacaggactaattaagtaaattatggaatattcaaactaaattagatgatatagcaaataaatcagtaggatagaaatacatgtactaataaaaaaactgacccaacttttaaaatgaaaacaggtatgaatatgttagggatgattacagttcagggatggcaagaaccacttttcaaaacatatccctttgtgttgtttcatttttaaaataccatatgcctgtattacttttcaaattagaaaaaagttaaaaaatatgtgaccctatttattaggagttggagaaataaaccagaaatctttttagatggtttgcttcttggctaaatattaagtgacaaatttaaatagaattcatgggtcaaattaaaaagtactgttctgcaaatttacaagtacttgaatattaaatactacttcagtatagctttttgagggaagagaaattcacattttctggtttccttcagattgcctagaactagtcctgtggagttggccagggcacatattttctctggcaacttccggttctaaggttcaacattcctaccctgtttctaatgattcctttcgtaggttgactacacatacacaaatgaatagtagtgaagattgccacctagtgcagtgatgtttatgatggcacacataaacacacatttatatataggactgtgatgttaactgtattccttctgagggttatggtaaaaaaaaaaataaaacagcaataaggtagactcttgattttataaactgcagtcctctaagtatttcaagtatattaagatcattgtgtaaagctgttaattaaatatattattaacagggggcagccatgcctaaaaaaaaaaaaaaaaagtccagcactgactcgattattggaaacccctaagcaagataaagagggcttttaaccccataaataatatctttaatatcacatgattactacagttagaatttagtttttattatttcatttcttttgtcggaaacaaacctggtttaaagaatgattaaccatggttagttctgaaagaggaaaattatgtgaaatgtacattttattagaaagaacatcataatattttaagaacgcaattaactccaaatctctgtttccatcatcaattgttttccattccttatcacatgttctttgcaccagctgttccgcggaagtgatattaagaagcaatggttaagactgtaaaagcataaaacattccaaaaaaggacagaatgcaatagcttctaagatattaaagtacaactacactgaaagatagaacagatggttcttgcatgaggtcataatcaatgtgatgaggttatttgaaaatggctcagcattaagtaaaatttaaaaatactacactagccgggcatggtagctcatgcctataatcctggctctttgggaggtcgaggcaggcggatcacctgaggccaggagtttgagaacagcctggcaaaatggtgagaccccatttctataaaaataaataataaaaattaaaaatactacaccaagaactatgtataatttcatcttgctttttagttttttttactatggtaaaattttaaatttttttggtgtgggatttggtgagttcccactcaaatcttttataatgaataagtatattgatgtcaatctgttcatacaatcaacatatatatatcaaaagaagtctaacatcttcataattttttaagaattagctgtcacacaagtctacttacatgaatcaatgatgtaagaacaacacatagcaaataactttataaacctattaatggcttaaattgatttagcttacttatttgaatcaacaaagtcagaacacatagcaaaccacttcataagcaatggacttcagataggaagcctaggatttgggttttgaatataccactgattaggtgtatgaccttgggaagacatttaaccgttctacaaaatgacaggtattaaaccagatgcattacaagattctaatatctgtaatctagtatttaatatttgaattgcatgaccaactggtagcatggaataaaaaaaaatcactctatttcagaaagyattgcttggtataatagaaagaacataaatttccatcttaaaggacttaagaatccacttccagttaaaacaaaaacaagtcctttgatgtaaccatatggtgcccataaatcaatttaagttcctaaaacttccttaaaagctaataagcttttattggttaattataaaactgaatgaggtgagaaaaacacagaaccttgttaatttcactaatgaatcaaatttaaagaacataaagaggtcaggggcttaactgatgcaaaaatacacactttattaaagcaagttttgcaatttagttcagctttaagaaaaacattagaaaatttacttcggaaaagcagaaaatgcttaaatttcccaatttccatttagatgagtatatattcatataaagactggtaaatggtgaaaactatttcaatgcaagattatattttrrgggatttaccacataatctcagtaactaatgctgttctttaaaattattttttcaattttattttcatatgaatttagcctaaacgttgaggcatacttcacgtttatcaataaatacttattaaatgtctactatttaacaggaaagctttataggtgctggagatacaataatggaagatcaagccctgcatttaaagaccttagtagggtaagtgagactgcagataaaaagggcttaagaggtaagaaagcaagctatagttgtatttaggaaaaaaggtcccccacttaggaatcaaggaacggttcctgaagcaagtgacatgtaagtagggacctcccaaccgtgtttcccattggttacaacaaggccagatgttttggtctattttgactatgtcatatttttcgttgatccatggcaagggccacagtaggaatataatatatatgtgattacttttagaaataaaaagtgactttgatgtaaagaattccattaccggaggccagaatttcaacatcaatttatttggaggtggagtgaggtggcagtcaatgcattattttccccacacagaagagaagattttggagtatgaaaagtaggttacttgttaggtcagcatattcatgggaagggttgtgtaaagactgaagcgggagtgtggggttgagaagggcgctgaaacctaagccaaggaagttaagacttcattacttctgacgtttatttagggggtttacactctaggttaccgtgggggaaagactgattgtaaataactacaataccttaaagtaattactataacagaactatatccgaaatacaaggttaacacggaaaagggaacacccaactgtgcctatggggaccagggagggctctcccgggatggctttgagcgaggcgtgggaattatccccatcgcatgcccgggggaagcacagcgggacccagcagcttcggccaagcgcaagcggccggagaacgcgcagctttcccgaggcggggtgacgcagggccctcgcgagtggaaaacaggggccargtcgcggcctggcggctcggttcggacttcctactttattcaaagggagtcattgaaggcgttttcggaggagcagcgaacaaagagctcgtccgtaagccagatggtcaaaggaatcagtgggaggacccgggcggcgccgtctctccacgtcccgcgggacttacccggacaacccttcctccttggctctggaagaagccccttcgtcatttaccagtttggcctgaatcctaactactgtgcctccaaatttctgaattttctcaaaaggaaaaaaaaaaaggaaagtcctctttctttacccaagcaaagactagctccccgggctcaaccgccaggcccaggagcaccaggaagcgtttcgaatccagcgccgggcccgcgcggccccgcctcttccgggaagtgactgacccctttcccccaatggggcccgctcggctttcccttgccggctcccagccggcctagcggacgcatgcgtagaccagctgccgggggcgctcaattatctttcccttttacttaggcaaatcactcacctcccccgagtccggtcactgcggagccgcccgtgcctaccagcttcccccacccgctaaggggcacttccggcctctcagactccggcggcgcgaaaccccgcaactgcgcaggcgcgggcggagcccgaagggagggagggcggggcgcaggcgcggttagtaccgcggtgggcgccggggctcccgggaatctrccttctcctgcggccggcacgcggttcccagggggccagcggcggtcagccgaggtcgagacgcccgcagggtggccttagcggccggtcgtaccacggcagccccgccgatcaggttcctttgggagacttcgacttgttggcggtagggtgaaggcgcgcgctgtcgctttcccttgctccggggttcatcctccgcccgctgcccccttggctggcgacccccagccacccgggagaggcagggtcagctgagctgcggcggtgttcatggtcgtccttgcgggcccgggcgggagatgtccgttcctcgggcgggtcgggcggccggcggcaccttcgcgcgctctccgaggcggcaccggtctcctgagccgcgggaaacctggcgtctgctccgggccgtcccctcccaggcggccgtcccctcccaggcggccgtccccagactctcccgggctgtggcgaataactgtaaagcggggagaggtctggggaaagctggggtagggagtggctcttagcatgagtctgatgatatctcgcaggcggcaactggtgtgtttaaagggtgtatgcaaagatcactgaaatcggatttgtcattaaagcccagttttacgaaaatgcaaattgtattacctagaaaaattaacatgtgttcaaaggtttactgatggcatttctctgccctcatttcttacagaaatgaaccggagaagaatcccaattgggaattgcggaaaacaggactctagggtagagaaaggttgtagaaccaatagggtttgaggtaatactgtgaaaattcttagagcaatcatttggtgtttgagccctcaagacagaagttttgtgagcgcttattactctgcatatgtcacgagtagtagattaaaagccagtgttttaaaggcaaacttctcagtaatatatattcaaaggaaaaaagaaaaacccaaatctcctgacttttatatggttgcagtgtgatcttttaacatgtacaatagtatatacagtggcatgcagtttgttccatgggtgtgtgggtagagagggaacatattagaacttctatttagatttatttcatttgatttctacgtgaaacatagggtattaattttatgttggaacatgtatttcaaatttcttttgcttaatgggtgcaagtacaaaacgtttggaggccactagtatattgcctaaaagcgtgtatttatatcacaaaaagccagaattgtgtgactctgagcaggttggtaccacctctttaagtttcagttcttcttatgcaagttggaagaaataatacagttatcagtgcatcctctgtatccgtggactcaatcaagggactgaaaatatttcagaggaaaaaaagtggatggttgcacagacttttttttgttcttgtcattattccctaaacagtacagtataacaactattcacatagcatttgcattgtgttaggttatataagtaatctagagataacttttaagtatgtggggaggttatatgcaaatatgacaccatttcatataagggacttgagcatctgtggattttggtatctgagtgagagagaggggctgtcattttggaaccaattcttagggattgactgtacctagctgacaggattcttaaatatgtggacacagagaggaagagaaagttatgtagttatatatcgacatctgtctgcaatccgtataaaccagttagtattgagcctggcaaaaagtacacaagtcatgttaaaggtattacagtgaaaaacaagttttattccccaaaggtttattttactgagtgtattttactgaatctgtagaattttatgtaaaacctacctaaatcttgactgtcatttttagaccaaagttaggaaaaataattaaagctgtacttggcttacttttaggaattagtaagtaactcaaaattttaccgtgatagcttgcattatatttaagacacaattaaatgccatagttctttatacacaacgataagtccagctgactgagggtcaagcgtagttgcttaggttaatgttagcatttttgattcactatttaaacaagttaacatcttttctctctgagcatgcttttcttggtcaccaaattcaaactacttccagtagcttycttagctccacccacaaatctttctccattgcagagtatmctttactactgactggcctctatctcaaaataccttaggagcacttgaaactcagtgttttctttctttcttttttttcctcttttttttttttttttgkttgagacagagttttactcttgtcgccgaggttggagtgcagtggtgcaatcctgcctcccgggttcaagcgattctcctgcctcagcctccggagtagctgggattacaggcatgcaccaccacacttggctaattttgtatttttagtagagatggggtttcaccacgttgggctggctggtcttgagcgccttacctcaagtgatccatccatctcggcctcccaaagtgctgggatgacaaggcgtgagctactgagcccagcccaaactcagtgttttcaaataaaataaatttcattctccctacttgccaaacctgttccatgaacttataatggcatttagtattaagtgtgaagatgaaacacaaaatgaagttttataaagcacacccaaagttttgattgactttaatagtaacattagagaatcttttttttttttttttttttttttgagacagctgttcactcttgttgtccaggctggagggcagtgacatgatttcggctcactgcaacctctgcctctcaggttcaagtgattctcctgcctcaacctcctgagtagctgggattacaggcatgcgccaccaagcccagctaatttttttttgtatttttagtagagatggggtttcaccatgttggccaggctggtctcgaactcctgacctcaggtgatccgcctgccttggccttccaaagtactgagattgcaggcatgagccacccgcccagccaataatagaatcttttttttaagtttaatgaaggatagacgagatgaaggacagattaatagccaatttcactctctatgaataattaactgtcaaacttcagtttatgccagtaggaacctgggcgttaaagaggtttaactgggttttgacaaacctggatttggatctgagctctgctatgttagagctatagaagcctttgtatgttagaactaagttgtagctacataaattcaagtcatttacttgtgcctcagtctctccttttgtaaaaataagggcaatatttatctcataaagatgttggggatcaaaggaaatagaaagtgttcatctcaaaagctaagtatgtagttattcagcagatgttaattctactcacccatttgtactcaccaattctactaattcagtcttttaaatctcttgttttatctcttccctttgtccctgatattaccactgcttttgtttagcaactcatctcttctgctactattcttactttctgtttcatctatcttctatattgagccacaggatgttttcagtacagaaatctaagtgttcagattttattaactgaaatgctgtgctttatacttcccggttttgctgatcctgaaattttagatgggtggacttaatgaataagtctcatataatttcgtgatatattccaagcagtgtacttaattaagcacattcaaaatgaagttgtttaccatagaataaatgtctgttgtgataggcagagtagaattgaggatgtggtaaacacaggccagggcagattcagaagtagtagtaatttgcctttttaaaaaaatgataacacttttttattaaattctaattctgttatgtgtgtcactactcttagttcctaatttggtattaataggaaatatgaattattatatacttaataaaatttagaattctgttaaaatgcatgatctctatcaaatttcctatgcatctacatgcaataatgaactcttggttattaattttttttttctttttgagacggagtatcgctctgtcacccaggctggagtgcagtggcacagtctcggctcactgcaacctccgcctcctgggttyaagccattcttctgcctcagcctcctgagtagctgggactataggcgcgcgccaccacgcctgactaatttttgtatttttagtagagacggggtttcaccatattggccagtctggtctcaaactcctgacctcgtgatccgcctgccttggcctcccaaagtgctgggattacaggcgtgaaccaccgcgcccggccattaatttttcttcttgaacttattattttattgataatcttcattgttcctgcttgtatcctgtaagggagaaatgaggtgttctttaattctgttttttttaaattataartaagtaaagaaatattaaaaactatgacgagctttatggataaattgaaaatcccagaggaggsttttttctcctttttttattccagcataattaaaatatttttctttgcatctgtaaatatgtttctttagccttttggaaacaattttactattttaatctgtatctgatgctctagacattcgaatctgtgtttgaaaatccatcatcattaaattacaaagtgattcctattttaaaaggtaggatccttcagtgtctgttagatgcaagttacygtggcaacctaatagcaaactgcaaatcccaggtcatgctcagcaaataaaaaacattctcagcaaataaaaaacatcgtcatcaygtagtgtttgsgtgtactgtcttctrtatagaatctcacattccttgtgagaagcgtatcacattttccctagtgcgttatccattagcttatgtctgagtgcttgctaactgcatgatcatgtgttaggcattaataaaaacagtttctaaaagggcattaaatgttggggacaccaaaaagtaatgctttctgtttgctcttctataataaataaattactgctcagtaactgagaagggaatagagggtggttagcagagaagaaagtgttggaaaaataatggcctggtagtatctcagggaatttaaattaataataaactgaaaccgatctatgttgattcttattaaatattttgaaaaatatttttgattttaataacagtttcaaaacattaaataatttgtaaaaatgaagctgaatattatgtagctgtaactgtaatggtaatattgtcttaaaaggcatttgtttaggttaaatatccttctttggatggtaagtaatgtaccctttaaatggtattcgacttcataatatataaggttcttcattgacttcaggataggataaagtcccagttattttccatggtttacataacaattcaactctaatgtgcatgtgaatcaccttaagtcttgttaaagtgaagattctgattcacttgctctagggtggggcctgagattctggatatctgataggtggatatcttcccaggagatgtagatcttgcttgccagtccttggaccacactttaaatatgaggagtctacaagtccttttgtggtctgtttcttccctaatgctctaactttattgcttcctagctgtgccttataatttatgacactgtatcatggacttgcttttagtatccccctgtagctgcactttgcaaaatgtggtgcaggaatccatgagactcttgcaagggatctacaaggccaaaactgttttaatgataatagtaagatgttatttgcccttttcactctcattcacttatgagtgtacagtggagttttccagaggttacatggcttgtgagatgtcattgctgtgactgatggaatatatactgtgtgtcccttgttttaaaagttgctcagttttggccagccgtgatgactcacacctataatcccagcactttgggaggccgaggtgggcagatcacttgaggtcagaagttcgagatcagcctggccaacatggcaaaaccccatgtctactaaaaataaaaaattagctgggcatggtggcacgcaccttaatcccagctacgtgggaggctgaggcaagagaatcgcttgaacccaggaggtggaggttgcagtgagctgagattgtgccactgcactctagcctgggagacagagcaagactccatctcaaaaaaaaaaaaaaagaaagaaaaagaaaaaaagttgtttagttttaatttctaatataataaatattgatagacataagcaaaagctctttgaagtcctttgtaaaagagattacaacctttgagaactgcttccctccatattggactgcggacaaagagactcagatctggaacttggagctatttccttagccacagcaactgctaggctagggtggcagtttcagtttcccatatggtctccagtgacactgcagtgggagtggtcttctcacctctgggcaatgggaaaagtcccgactttccactaggcctcctttgatactagccaactaggagaaggagtaagtaacaccgtattacttcctgtatgggtggaaatctaggctctctaggtggtctccgctgacaccattatcatggctccctacttgtctacatagcctttgactctaccccagttagggtgttgagatgccaccttgtagcctcactagggtggaagtccagactacccacttggattttgcttgcatgggtaggggagccaggtatatacatggtatggagagggttgctrtggtctaatatttgggggatttcagtacattgagcctagaactgttcctcatattcttatatcttagaaatttttgattatgttagagatttttgtctccttttagcaaacaattaaaktagatacctatcattttaggtcttaaatgtactctaaaggaaaaaatgaaagcagcagtcaaagaggtcataaagtttaattttaatcataaactatcagctttgactggagatccagtattcatatgtttagcaaaatcatgtgtaatttaaaagatgttaattttctaggtttaaattttgtagtatattggcaaaaaatagacaatcaacctggactttttttttagggaagagttaaaggaaaccactggtgctaagcaatgtgcttcaaaatatgattctttgggaaaacaacttaaaaattaaaagttttatctgattactttataacttgtgaaaattgtgcattgctttggaataatttcaggagtcaccatgccatctctatgaatagatttagaaaactagaaaccacaatttcacaaaatcttttaccttttgtgagtttagtagtcacaacatttaggtaggcttatactgataaaatcttggctatgaatacctctgaagtaaaatcaactagtatagaatatgcagatgttaaagcaatacaaacttactatcttacgcttctgtggattagaagtccaacacagatctcactgggctaaaatccagatgtcagtagggctatgttctgttttagggcctctaggggaaaatctatttccttgccttttccagcattttttgactcatgtccctcttccttagtgcaagatgcaagactaatttactttaatttttaaggtaaaaatggatggacatagtacctaaagtttaattagccttgttagatttattttgttragtttaatrtatatggaacttgatttacctcattgttactataaatatttgttcagacctgatggccaaaagaaaggaagaaaatttttcctctcctaaaaatgccaaaaggccaagacaagaagaattggaggattttgataaagatggtgacgaagacgaatgtaaaggtactactttggtaagcgaaaaattacaaaattatgctttttgatatgtttttcttgtaacattcatcatatcacattctgtgataacttaaaatcaagaaaaagtaatatgattttttaaaagttgaggtaaaatctgttctgggtaattttgaagcttatgttaattattagaaaaattaatagagaaaataaagaactgaatgtatagaaatgtgaataaaattgacaaacttttagtaagaccaagaaatgcaaaaagagaaaagacacaaattaccaatatcgggaataaaataagggctatccacagaccctgcagacatccaaagggtaaggaaatacagttagcaactctacacacataaatttgacaacttaggtgaagtggaccaatcctcaaaaaggaaaaattaccacaagtcacccagtacgaaatagatcatctgaatagccctataactactaaggagatttaattcatatttttaaattcctataaaagaaatctacaggcccagttggtttcactggagaattataccaaacatttaaagaagaattaacatgaatctacacagtcttttccaaaaatcataagagaacacttttcaatgtattatcttgatgccaaaaccagacaatgagggacccccaaaaaagcaaactgtaaaaccagtatacctaatagatatggttgcagaaatgctgaacaaaatatttgcaaggagaattcagcaatgtagttgttacttggtattcaagcaggattggttcacaggactccgcttcagaccaaaatccactgatgctgaagtcccttataatctgccctgagtattcacatctgcagaacccgcagataggaaaagccaactatatgtaaaaagaattatacgtcataattaatgggtttattttaggtatacaagcctgatttggtatccaaaaatcaatcattgtgattcaccatgttacaggctaaagaagaaaaatcacatgattatatcactcagtgcagcaaaagtgtttgataaaattcaacacctgttcatgactaaaactctcagaaaaataagaatagactggaacttcctcaacctgttaaagagcactcacaaaaaaactgacagctaacattatacttaatggtaaaacattggatacttttccccaaagatcaggaagaagacaaaggtgtttgcttctgtcacttattcaacatagtgctagaaaatctagcattgcaaataaatcaaggaaacagaaggtatagagtttggaaaggaaaaacacacacaaaaactgtctctgtttgcagattatgtagataatccatttgttcattatctacataaaaaatctcaaggaatctacaaaaaactcttaaaatgaataaatacattcagcaaagttataggataaggtatttttaaaatgctttacttttatatactggcgttgaacacatggacgttaaaattcaaaataccattttcaatcactcaaaaaaaatgaaccactttgggacgatgcaaattaaaacaacattgagataccaacacacctgataaaatggcaatagttcaaaccactgagagcaccaaatgctgacaagaatgtggagcaacaggaactctcattcattactggtgagaatgtccagccactttggaacacactttggcagtttcttacaaaaccaaacatcctcttaccatacagtccagcagttgaattccttagtatttacccaaaggagttgaaaacttacgtccacatgaaaacctgtgcattcatgtttataacagctttattcataattaccaaaacttggaggcaaccaaaatgtccttcagtagataaatggataaataaactctggtatatccagacgatgcactattagtattaagctattaagccatgaaaagacatagaggaaccttaaacgtatattactaagtgacagaagccagtcagaaaaggctacatgctgtatgattccaactatatgacgttctgaaaaaggcataactatggagagttaaaaatcagtggttggttgctaggggttgaggaaagggagggatgaataggttgagcaccggatttttagcgcagtaaaaataactgtactatactaaaatggtggaaacatgtcattataaatttgttcaaatctgtagaatgtacaataatatcgagtgaaccctagtacagactgtggacttgggttgataatgatatgttagtgtgggttcatcatctgtaacacatgtaccacgctgatagtggatgttgataatgagggagactatgcatgtgtgggggtagggggtatataggatatttttgtatcttcctctcaattttgctgtgaacctaaaactactcttaaaaaattaagtattaaaaaatgaaatagttaggtctaaagctagcaaaatatgtacaggactaatatggtgaaaattatactgtgctgatgaagggaatcaaagaatacctgaataaatggagacacatacttactcacggattagacagctcaatatagaaattatgtcagttctcccccaaaatgatatgtaaatttaaatgcagttctattaaaacctcagcaagatattttgtaggtatatattttattctaaaatttaggtgaaaaggcaaaggaactagtaaatataccttggtacatccataccataaaatatagcttaacaataaaaaggagcgaactaccgatataggcaacaacagagaattaggctgagtggaaaaagccagtcccaagaggctacattttgtctgtttccatttatttaacattttagaaagtgcaaagttaatagaaatgaacagattgtgggtcagggttaaggtgggatgtggatgtgactataaaagggcaacatgtgggatcctggtgatgatggaaatattctgtattttgactatgtcaatgtcagtatcttggttgtgatattgtactttagctctgcaagatgttacaatgggcggaaactgagtaaagggtacacaggatctcattaaggattgcacgtgaatctgttattatttaaaaataaaaatattttaaaaattcgtcaaccatgatttccagtgttctactcatacaaggatgtaaatgttttctactgtttagtaagacgtatgtccagaagaagagagccggggagtttttaaagaaatctttaaaatacctggagacttgaaaatggtcttcaaaaaaattagaagacctgataaaataaggctgatttgttctggtacttagataactacaaagtgcaagtgactaccatttgccaaactcttggttaaaccatttgtaaaccttatctaacttaatgctgatataatatttatagtataggaaatattattcctgttttacggacttggaaactgtatatgctttatacattgccaaaagtcacacagttgccataataagtgacaaagtcacaagaagagcaggctttactttttaagaacatgtactctgctctctgaattgaaatagtgaatgtcagatagtgaattcagtgttgaatgcatggctggatcgtcatctttcagaggtattctaaataaagtatataggaagttttactatgccaattggatagcagttctcaacaaaggggattcttctctctcccttttgcgccccccagggacatttagcaatgtctggacatatttttggttgtcacaacttaggggcaggtrtgtgttgccggcatctagtgggtagaggctggggatgccactaaacattctgcaatgcacaagacaaaccccctccactaacaaaaaattatcagacccaaagtgtcattgccaatattaagaaacctggtgatatacttttaaatcctttaaagattttagaatgagtactgactcatagaaggttcccatttaatttcatcttattcattgaagttaccattattcactttctgtaaattttttcattggtgatggtgctagtctttctgatgccaacaatgcttgaatggttataatgagtgaattagattgaccattttctcccattgttttttattaatagactgcagcagaagttggaataattgagagtattcacctaaaaaacttcatgtgtcattcaatgcttggaccttttaagtttggttctaatgtcaactttgttgttggcaacaatggaagtaagtgttttttsccttctcgtttgactttgagcagtactttgagattagagtacgttaactttttgaaataggtgactattagtgctaataagtattttttctatagatgtataacttgtggttatgaatattcttggtatttgctgccagtgtacacttaaagaaaatactgagttaactctaggtacattacttaagcaatagggataaacatttcctgcttatgtttttaatctatttatcttggaatctgtaccatagaagggtagacaagcgatcctcattgcaattgaggcagccttgtgtcttgccttactaaacattgtaagagcacaaatgaagtgacttggcaatccaaacataaaagtagttctcaccaggtggccaataaatgctttaagaggaggtggtatttgtgccagttcttgaatgaaaattatcgattatttaggtcttattggcaagaagaagctgagatgttccaggcaaagattgctcattagctaaggtttggaggagtagaggtagatgtgtataggaactggtgaataaccttatatggtttattgtatggtggacagtggagagaggcagaagctgactgtggagagtcatgctctaggcaatattgttgaggatcttgaatgtcatgttaaagagtttgaagttttattttgaagacagtggggaaccaattagagttttgtttgttgtttggtggtttggggttttttttgtttttttgttttttgtttttttgagacagagtctccctctatcgcccaggttggagtgcagtggtgcgatctcggctcaatgcaacctctgcctcccaggttcaagcgattctcctgtttcagccttgtgagtaactgggattagcgtgccttcaagcctggctaatttttgtatttttagtagagacggggtttcaccatgttggccaggctgatctcaaactcctgagctcaagtgatccgcccacctcggcttcgcagagtgctgggattaacaggtgtgagccactgcgcccggccacaattaaagtttttgagtaaaggaatggcatggccacaattcttgaaacaaactgaccacattgtggacaatggattagaaggggaaaaatacagaaggcagaaagtttctgggcagttctgtggtaggcctgccaagaatgaggtgttggctgctgggctgagaaggtacacagggagaggaggcttgccagagtctaccaactggtgacaatgctagaataggaagctaggttatgtgtagctctgcagtcccttttgttgtttttcttactttatcattcagtcaggaagaaagtgtctctaggagaaacagatggacaaggggatcactgttttagaggggtcacatgggacaagaaataaatactgatgggttctgaagttaggtcttttaacttttgaaacaatgatttttattaataaaacctaatagaagaggaaataatgcaaatagtggaggcagtgcatttggtaatgaagaaaagagagttagaataggaactttacaggcattccaggaaataaattgggttaatcagtggtgtgcgttagttactttgtgttactttgcggaagataatgggctaataatagttgattggattggttgaatggagttcagaaaatggttaccatattctgtgtgtgtgtgtgtgtgtgtgtgtgtgtgtgtgtgtgtgtgtgtgtgtgtttaccatattctctgtgtgtgtgtgtgtgtgtgtctgtgtgtgtgtgtgtgtgtgtgtttaaagagaaaggatctctctctccgggtcacccaggctggactacactggtgtgatcatagctcattgcagccttgaactcctgggctcaagctatcctctcgcctcagctttgaaggtagctaggaccacaggcacatgccactatgccttcctaatttatttatttatttttttgagacagagtcttgctttattgcccaggctggagtgcagtggtgctatcttggctcactataacctctacctcccaggttcaagtaatcctcccaccttagcctcccaaatagctgggattacaagtgtgcaccaccactcccagctactttttgtatttttagtagaaatggggtttcactatgttggccagactggtctcgaacccctggcctcaagtgatccacctgccttggccttccgaagtgctgtgattacaggcgtgaaccactgtgcccggccagcctgcttaattttattttttgtagtgaccaggtgtttctctgttgctcaggctggtctctctggtctcagatgagcctcccayctcagcctcccaaaacgctgggattacaggtatgagccaccatacctagccctcagcttgtaatattttagatctgttagggtataaagaagtacacttctcaaagagctagaaaatgaataatattcaagttacaaataataattgtcaaaatattatataaaaacatgtatatgactttgctgatttttttctacttaagttcattcattcaacaaataatgcaagtacttattatgtgctaatattagggatacagtattgaatgaaagagacaatattcctgtccacatggagcttacttttgagggatgttaacagtggtttctggctgggcccagtggctcacatctataatcacagcgctttgagaggctaaggcaggaggatcgcttgagaaccaggaatttgagaccaccctgggcaacataccaacactgtgtctctacaaaaaaaaattagccgggcatagtgatgtgtgcctgtaatcccggctactgaggaggctgaggcaggaggatagcttgagcccaggagtccgaggttacagtgagcaatgattgtgccaatagaatgtcataaaaattagatgaattaataatatatgtgtaaatagagggatgattcatttattaggttgataggccaaggtggtacaatgaaaaggttggaaaggtgtcacaacaatttttaccattttctttttagtggcaacaatttgattcctgaaatgtactattttttttgctaataatggcagttcaatttttccttacatatataactttttttttaagttgttgctttgcacgggaagaaaattagagttgaattttaacattttattttaaagtgagtctcattcataaatctttttgcattacatggtaggagtcagctttttcctttttcttttaatgaatgtgatttcttcaacatctgtttctttaggtgggaagagtgcagtactcacagctctcatagtcggtcttggtggaagagcagttgctactaatagaggatcctctttaaaaggttttgtgaaagatggacagaagtaagtgtttgctttctaccatctattttcaattctttagtaagaaaacagttactttagattcccagttcacatagacatgactggaaatgaagtgccttcccagaacaggagcagaggtgtcctattttttcattcctttcttttaccccttgttgctggcatggctcactgttgcctgttaccctctcaagacagatagcttgtgtaacctattgccctgtgcctggccatcttgcttctgttacttgctgaaagaaatggctgtgataaatctatgtaccctgtttaacaagtgtttataaaccttgctaattcctgactattgacccaaacccagcatcagtgagtccacattgatacgatagtagggagagcaaaatcagtgaccagccaaagtgtccctgcacaaaacttctgtctttagctctctaagaagtcccaaaataagaattctactttttgactctgattttataccctttaaccaagtaggttgccagtgagtttaatttgaggaccacaatgacagatctgtttttagtctatcccagacccttggtgaatagtcatatcactactctctttggctttacatttatatttctttttgtcataggttgccatcacatagctatatgtgaattgtccagtttgcatcatcatggactcactgctttttgtccactagctgttctgtcttcaggcttatctcttcattcttttccatactgccccagatacctctgaagggatctttgtttttcataacagcaaaatgccccaaatgctgtcatacatcttctagcatgaggctactcccattccttcttctcatgcccagtgcggagaacttttgaaactttcataattaacactaatatcttttttctcattcagtagacttttccttctgctcagtgttatatccatttaccttctattttattactaaagaatagaacaaagacaggatgtgaatcaggcctgcaaatttcttatgtattcctcagaaaccttaggaatcttaaccttaagccaagattccaaattgactcaaaaaaaaggagaaaagatacacagaagattatttcccatgccctatggccttgggaaaaaactatttgataacaatttccagcatagtttctgtctccacttcatggggccccagtccagcaaagtcttcctctcaccaccaaccaaaatgatgtctgtagcaaaaaattagttattttaacacctttaagttaatagtatcaactctatttcagttcattatatttaaaaattttttttaattattattatttactagtcaatagaatccatgagaaattcttttttttgagacagagtctcactctgtcacccaggctgaagtgcagtagtacagtcttggctcactacaacctctacctcccgggttcaagtgattctcatgcctcaccctcccaagtagctgggactacagccatgccacaacgcctggctaatttttttttttttttttagtagcgaaggggcctggcctcgaactcctgggctcaactcctgggctcaagtgatctacctgctttggcctcccaaagtgctggaattacaggtgtgagccaccacactcagccacagttcattatacttaactatccatttcttagctgtccaaacaatcacccagtctacttggccagatagcacgttgaattttcagatacagtctttaagaagaaattattttttatacactgttaaatgttttctcagttaaatacttttttttcccccatttgagaagtacttagaccagggtagaagcttctctctgagacctgtcctctgaatactatttaataaaaaaagactagcttaaacaaatcaccgacttctaaggacatggctgcctgtagagtgaaatagttatattttattttttcttttccagtacaaaattgggggaaatatattttaaaacacagttagtgacagctagaaactctaaccttagctcagtcttctgtctaaaaaactaacgaaaagcagagtttttccacatctttattgttcttatctatccccttcctcattgaaaacatttggcatttataaaatttcccttgtttttatagtctctgattctgtcatcacttttttgcagaatcagcttgttgaggtttttagttctgctcttactctattgcacatctaaagtctatgaaggagtctcactttgcctgaagaatggttgtcagtgtggtccagcacaagtttgaggtagttctaaggactctatccctcccttcccccatctctaacattatactcgccatttgtgactcttgggctgtgggcctcctttcttgggatatttcaactctccttggagatgcttgcctaatactgttagaagaagccagagaactgaaccttgagacattgcctgggactcatccttctaattatccaccaagcctttgcagtgacacagggactgaatgaatcctcctaatatatctcttcacatgaaaacctttctcagtgacccaaggcctcatgccctttgctatttagattctctttaaacatatacagtttactgttccctcccttggccttcctaataccaaccctggtagccttggggtctttgcagtagtctaatttttgacatcagctgtggcacaagggttatagagggacaaaaactcattctcctgttttatgttcctgatttatttagtcagggatacagaacttattacagatgagctggtgacccagagaaggagcagttgtatcatctttttatatgacttttcttattccttgttctcattgatgtgcactgctgccagttacttccgtgtagatagattgttcctgagttgagaaagaagccaaattcttactgtggcactgcttgtttgtgttgtcattctgaaaaaaatctcatagatagtctctcttttcactcattgggctctatggctgttgacccaaattgagcatcagcacagaccatatcagtgtaaaggggaagactgcagagctagtacccagctcagttgtctctgtcttcctgcagaagtggttttttttttgtttstttagcagtaattatgaggcttttttataaatgttattttttagaagtattttgctttcttgtatttattagattcatatagcaggccaggcactgtggctcacacttgtaatcctggcactttcgagcccgagttgggcggatcacttgaggtcaggagttcaagactagcctggccaacatggcgaaaccccgtctctactaaaaatacaaaaattagctggatgtggtggtgggtgcctgtaatctcagctattggggaggctgaggcaggagaatcatttgaacctgggaggcggagattgcagtgagccgagatcatgccactgcactccagcctgggcgacagagtgagactctgtctcaaaaagaaaaaaagaaaagaaaatttatatagcagtaggatatcagtgcttctgaagttctcactgtactaaagatagtttaaatacaaggagtagctaggaatgaagataataaagtaggtgtttggtaatcaagagaggtgtttgataattcagagagcaaatatatgtagtcatttaagaaatgttttcatgaggtactgtaacttaatgccaagtaatcatactagctaatgaaataaaatattcattagctacattatcagaggccagccgcccttcccctcatacttcagtggttctcaaccttaaccgttcattagaatcaacttggggagcttttaaaaaatcccattaattgatttttctgaggcataatctgtcttaattaggtaatattgtttttatagaaaaaccacaccaatttattcaaggtagctctaggaaaggatatttaccataaagatgcagggatatatattcatgaaactgcagagaggaaatactgcggggtctcttgagggaccagactgagaccctgtaagaactgagtcacttctctctctggggctttcttttaattgcatctctggctgtctctgtgtgtcttgtctctggacctctgtcttcctctccctcccattggtttgttctgcaactctcctctgtgcacctccctcacaatcctaacttaattggctgtacttctgtgtgtgtgcactatgctctcctgtctctccttgtgaaaagtgtacaggtaagtgagtgtgtttctctccatcactgtctcaagtatgtgtacttccttattttttgctaatctttgttgctgtgtgtctttgcatgtgcaggcatttataagtcttactgtcctagtctgtaggtgtatgtgtataaggaagtgatcttatgttttctgtccctctggttcactgccagtatctgtgagtatgttatgtctttttattagcctgcctaagtggtttccaaagagcttatctgttctattcagacttttctattttcttatcagactataatgccccaaattggtttctctaggtctagaggctccataactttgtagctcccaggattcaccatctctcgacttcatcatgtcttaatttgattttttaaaacctttttattttgaaataattgtagatttacagaaatgttgcaaagatagtacaattttctgtatatccttcacccaattttccttaatgtagatatcttacgtaactaagatgcatttatcaaagctatacaattaccattggtacaatatcaactaaactacagaattctgaaatttttttaaccacattttcttagtttgattttttaaagaagaaaatctgattgcttagttggtaaaaaatttctatatttagctcaatcccaagaggatgggatggaaaattatatcgttgctaagccctttctgctagggcacttgtacagaaaaggatggtggagcaacagagcaaacacttcactgtgtctactgtcttagcagtaattcacaatgaagctcatctggagtatttcttcctgcatttcccacaaatgggaacagttttagagtatgattacaaattcacaaaagcaagtttgttctgttaaaggtttcatttaattaccaattaaaacacttttatattaagggactttagcattttgacagatgctcatatgaaccaggtaaaatatctgcttttatgtgtaagaaaattatatctttattaatgtccttcatcagcatctttgtttttctaccaagtcttattttaacacaagttggagtacacaaataaagatttttttttttactcctatagatcttaaaatatgcgtggctgtaagtccctaaaacatctttaaaactttaaaaactataacagagcctattggttaggcagatttatactcatcattttatatgtgtgtttagctgcattgtactattttaaaatatgtctttttaatgccagtaaagctttaagaaattttgggctttagtttcttttttcttttttttttttgagaccgagtctctctctgtcgcccaggctggagtgcaatggcacgatctcagctcactgcaacctctgcctcctgggttcaagcgattctcctggctcagcctcccgagtagctgggattacaggcatgcactaccatgcccggctaatttttgtattttttgtagagatggggtttcaccgtgttggccaggctggtgtcgaactcctgacctcaagtgatccatccaccttggcctcgcagagtgctgggattacaggtgtgagccactgtaccctgcctagttacacttcttgatatcaaatggttttattttttattgccaagtaattgaaaaattaaaattaccttttttaattctaatcccctttgaaaatgttaactactttaccataattcttacttcatcattctttaaaggcctactgtcaagcatgatgctttatataacttacagtagtcaggcagtataattttgattacatgatttttataggaaaatgtataacttatctacatgtcttgaaacaaccgaaacttaatggtttttgtgcagatgtgctatttctatgatggatagaatagtcagtcaattatttttttgaagcttcacttattctcaactttatttttttgttaggcacagtatcgttaacgttatgctgtagtgaacaatcagtgtcagctgttgatgtaaakctaatttgcaaatgaattggccaaattatttggtggttttgaaaaatttgaaaactgtggcaacctagtattgtaattacactgtatcttcatgtaacttagctcaacctcattctttcagctctgcagatatctcaataacattgaggaacagaggagatgatgcctttaaagccagtgtgtatggtaactctatacttatacagcaacacatcagcatagatggaagtcgatcttataaacttaaaagtgcaacaggtttgttttgattctcttttcatttcttataaaatattaggaaatactcaaaaagaattagatgactgctggtattgattgaactatcttccttgtaacatgattggttgtgtgcatatatatayacacacacacacacacacgtgcatatgttacacatggttgttttaccccaggatattatagcaccaaaagcatgattagcagaattggggattatttgaaacaagttgtgctattttgttttcacctacagacttcctatcacaccagggtttttatagcatgtggaaataaatggttagcaaaaggtgcaaaatgacataaaagaagaggtgagcatttagtttttaaaaagagatagataaggagcaaaatatgtttagctgtgggaacaagataagcaccattattgcatgtgggtactttttcttcctctgtacttgtgccatgttcattcatatttgtacgtattcaatggtacctttcttgatgatgcaatgaaagctaactaatatttatattttgtaagtaactatacattttttctgtgttatgccctagaaacagtttggttatttcatatgtttcttataactaggctccgtggtttccacgaggaaagaagagctgattgcaattcttgatcattttaacatccaggtaattggtgaatttgtgtttcagattaattcatacaccttgtcatttttttagtgcgatttcacttgtgtagaaaaaatttaaatggcctcatatgagtaaactgaccacaggaagcatatgtgtaactattatcaatgaagttgtttaaaatttactaattcggccgggtatggtggctcacacctgtaatcccaccactttgggagaccaaggcgggtggatcacctgaggtcaggagttcaaggccagcctggccaacatggtgaaaccccatctctactaaaaatacaaaaaaaaaaaaaaaattagctgggtgtggtggcgggcgcctgtaatcctagctacttgggaggctgaggcaggagaatcacttgaacccaggaggcagaggttgcggtgagccaagattgtgccactgcactccagcctgggcaacaagagtgaaactccatctcaaaaaaaaaaaaaaaagaatttattaattcaacacaggaytgtcaatacataatataacacctttaatttgatagaccagtcaagagcatttagtctatactgctctaggctaaaatttatcttaataaggatgtcaggtttctttgctttttgctgtcctagtcaaaatagcatcattgttccctaaactcagttgctaaactcctttttttttttttttctggatgagtgtttagtttctaaagttgctaaattcttaaagaaaatttattctagaaagataaagcatttctctattttggagctattgatcacacttgtaggggccaaggcttagtcctttctgctgagatactttggctgaattaattgataatagggtacatgtagttctataaacatttacacaagaattacctttagaagacacctaatccaggctgtttgttttgtagatgagaaactgggagccacaaaaaataaatttatacttaaggctgtctagacgtggttactggtagaacctggatttgggatccaggcatcctgtttcattctactgttctatccattgtgcaatactgcctcgttacagaattaagaacaccaagacttgccatcaaataaaaagaacaattaggggtctgggtctcttttccagtttggtttagaacagagggtacagaactttctgtgatggtggaagtgtcctgtatctatgctrttcagtggggtaaccactagccacatgtggttcttgactaacttgaaattgtgactaagaaattgaatttttaatggtttttttgtaagtagaaaaagccacacgtagcaaatgtgcctgctgcatatcagacagtacaagtttaggaaaaataattcttaaaatctagagaaaagcaggtacagcaaataaatttcagactagaatgcaggacaatttattagaatcaggaaaaccaaaagttagagttgaggaatcatgggtgttgggagaatcttgaggggcattcagtatactgtataagtactctgtatttaccctgtgtagaatctccaccaggttttcttgtgcaagtgcttgaaaggataatggtggggtaatcacctctgtccaaggcttcttccttcttctgtggacagctgtatttattagaaagttttcattatgaggaaaattgaaaaaagcctatttctgtaagctctcacttccttggggaatgtaaaacatgttattctctgttgaaatatttaaagattcctagtccttttcttgcatggtttacttaatgcataacaaaagattcaggttcattgtttaaaatgcagaaagtctasagctgtgtggagcacttgaagagtgggtagctcaaattgagatatgcagtaatgtgaaatacccagcagattttgaaaacttaatataaaggaataacttagttttttatattgattacatgttacaatgataatattttggttatatttgattaaaaatatgttattaaatttcacctatttctctatatttttartgtggctactagtacatttaaaattgtttgtgtgggctgggtgcagtggctcacatctgttatccccacactttgggaggctgagacgggtggatcacatgaggtcaggagttcaagaccaggctggccaacatggtgaaaccctgtctctacaaaaaaacacaaaaattaggcaggcatggtggcacatgcctttagccccagctactcaggaggctgatgtgagagaattgtttgaacccaggaggcagaggttgcagtgagctgagatcacgccactgcactccagcctgggtgacacagcgagaccctgtttcaaaaaaaaaaaaattgtgtgtgacttggcgtatatttttcttggacattgttggtctagcataaccaggagggaaggggatatttaatatctttaagtgtctgatcatatttgtcttctgtgcctccgtttcttatcctcttgctgaagtttaccagtttttgctttttgcttttcttaggattctgacagataaagctacaacattctttttttttttggtttgattttagagactgggttttgccatgttgcccaggctagtcttgaactcctggcctcaagtgatcctcacacctcggccttggcctcccaaagtgctggcatgagccttgggacagggtctcactctgtcgcccaggctggaatgcagcagcatgatcacgactccctgcaacctccacctctcaggctcaagtgatcctccacctcagcctcctgagagctggtactacaggcgggtaccattacacccggctaatttttgtactttttgtagagacggggtttcaccatgttgcctaggctggtcttgaactcctggactcaagcagtccacctgcctcagcctcccaaagtgctgagattataggtatgaaccactgtgcctggccaagattcttaaataatcccaagaggagtataacaagtaggaactccatttcaaaaacaatgaaaaaggtatagagaaatgaatataaacttcggtgaagcttttaattgaaagttgatgttaagatgtttgttattagagctactactgcattaggtctattaagaagtcagatgcagtatgaaatgaagagctgggggggctttgtgaaaaaatatatggcagatggagtctggtctatataataagaaacatgtcacatgtaaagttttgtttataactacataaatgttttttattatcttgaagagaggcccaacatcgtacttgagagaaatgttttaaccattggtataccaacaaattacacaatatttattttgtagacagtgaacatgaagggtttaaagtgtttttcatttatacaataaccttatgaagattatttttaacatgtaaactgatttgttagtaattgagtaatgaccctgaatctttttgaaaaaagttgtattttttctatacttttccaattgtactttgatatcttaacttgttaggtgtattagtcagggttctctagaggaacagaattaataggagattttacatatatgtgtgtgtgtgtatatatatatatatatatataaagaggagttttaaatattaactcacatgatcacaaggtcccacaataggctgtctgtaagctgaggagcaaggagagccagtccaagtcccaaaacttgaagaacttggagtctaatgtttgagagcaggaagcatacagttttggagaaagatgtaggttgggaggctaggccagtctagtcttttcacgttttttccgcctgctttatattccaaccacactggcagccaattagatggtgcccatccagattaaggatggatctgcctttcccagcccactgactgaaatgttagtctcctttggcaataccctcgggaacacacccagaatcaatactttgcatccttcaatccaatcaggtttacactcagtaataaccatcacgttaggcaaaggtagtttcattcaagcaatgactagtttccaaaagatagaaatgacttcattattttcatttgttttacaatatcctcatgaaggaataatatgaagaacttctgtaagaaaaatagacaatacttgttgtcatgattctcattagaaataactgagttggactgtgtttagttggagtaactgacttatccaaggctacataggaagttagcaacagagctcaaacaagaacccgaggtgrctgactccttaccatgctaggactcttcccattctgctgtcccatgattaaccagtggcatgagggtgatattctatacagcaggtaagaagtgaaaaactttataataaaaacactttttcacagggttcttatgcttgtgccctcatgtactggtagaatattgaatgttaactataccatatatgttggtataatgaaattttaaattatttttcctgcattatacatttctaacttttttttagtatttttatcctaacgttataacctttggctattgcttggccttcctgatggcaccataggtcacttgtaatgtatgtttcagtttttacctatctttaaagcattaaagtaaaatattcaaaaatgactttttgtttgtttgaggtggataatccagtttctgttttaacacaagaaatgagcaagcagttcttacagtctaaaaatgaaggagacaaatacaaagtaagtggcaccaaagtaaatataaacycatttaaaaagaatacctttaggcatattgtaaacaatattattgctcacataatggaggctgagttttttttttccttaaagccatctatttaaagtaattcaatttcctagattaggaaattgttaagtaagatgggagtataatttttttaaatctttgtttttactttttggcttttaattcttaatctttaaggaaatacagggtaacagttgctcctacatacataataacttgtaaatctttttttttttttttttttttttttttaagacagagccttgctctgtcttccaggatagagtgcagtggtgcaatctcggctcactgcagcctccacccctcaggtttaagtgattttcgtgcctcagcctcccaaggagctggggttacaagcatgtgacagcatgtctagctaatttttgtatttttagtagagatggggtttcaccagtttggccaggctggtctcaaaatcctggcctcaagtgatccacctgctttggcctaccaaagtgctgggattaccggtgtgagccactgtgctgtaaatcttaaactattaaaaattttaaaaactaacaaaatacttgactatactgctaaatattctgkgtagccttttgagtgagttttggtatttcttactctaaaaatttaagatgtactaagaccaacgatgccagtcttttcagctgtttttgcttaaagaatggaattagtgaaaatgagcttattaccacaccctgaagtgttttctttcatggggttttaagagcttttgcaaatgaacatgtggatgtgagcatagtaggttcagtcaatttgaatctgaaatatgatgtattcttttgtgtttgtgtgattgcttacgtttttaatgtctttttacatcattgatctaaaagttttcagaaactaaatttttctttttctttttaacagttctatggaagtttacaaactcctaattgcgtttttttttgttattgataatagttcttcatgaaagcaacgcaacttgaacagatgaaggaagattattcatacattatggaaacgaaagaaagaacaaaggagcagatacatcaaggagaagaggtttgtaaacagttaatgtaaatctttttgagatcagccaaattcttatagtacttacagtaaatgatattgtaaaactatgtgtctgtatatttatataaaactagtaatatttttatagcactctgaagtatatgcaatgtagtgtttatattccgggtattaattagctattacttttttattttgtaataatgactgtgtacatgtcttactttctctattagattataagatagagaacagggcagtatcttacatacttatcctctgatagtatgactaatgggttccacaataaggtatggtagtttaagtagtttaaaacctataastagtttaaaaactgcaatatttcttctgctgggataataagcacaagcttcaagctgtttttaaacatagtatgcatttataattatataccgtaatctacaaatcatagtaattataactctagtaaaatgttaacattccttaagcaactggtaggttagtagcagctatgacatccttactcaccaggcttggcagcttgcaaatttgcttgcgctttaaatcactcatgccagccatgacttacttcaatttgtttttaaatctgttatattttgttcttatactttcttcagattcctgaagatccaactttctgtgtgataatcagagacctcaaaattttaaggcttacattatagctgtttatccagcatattaagtcccaccaactttatgtaattccatatcttgttcatttgttagttttatataaccaattgagttttcatcaactttgtagcttgtccttttgaggcaggattatactaatgattaaagtcaaattcattatgttatactgacctttttacttcacatttttgaggaatacatattttaagttaggtctatagttaggtggttcattaaatgaaaactcaaaaatcaaggatgagtatatttatttttatttcccacattatcctttcaaacctgggttatgtggtggtgtttaaggagttactataaaccacaaaaatactaaagcacactttcttggaatgtcagtgttgttattggggaagggaaatatttgtatattcaaacaaactgtacctactatatattacatttattatttttaatataattaatcaggacttgaaataaatttgtttgtttcagacacttgggattaaacacttattttctccatggtatacaaagtataccagtaacaattaaagatattgtaattatgaagtataaggagcacttccctaaattatgtaggagaattcctgatgcataatatgcactcaataagaacttttctcttaattggtgaaataccctgtattctcaaaataaactctgggtttgaataattaaatctttaagaaatagcatgtaaaggctagaaactagaataatcattcagtcaatattaagttcttatcatgtgccttgtagcattgtgctttggccatggtcatatagtgacagataaataggattcttgggatcatagacctaattattcagcagaaaacatagatggtaaataatttgagtatcgtgaggactactaaaagagatgtagactagacaacagcacttaatagggtactggcagtgtcagggacagtcatgatgggggagttattaaggaagtgatgcctaagaagaaaactgaaggataccaggcaaaggatggtgaaagcaaggaaggatgttctaagagatagcatggttaaagcctcaggggcaagaaagcatgtgtgcttttaaaaaactggaagaattccagattggctagagtgtaaaacacaggtgtgagagatgagaggccaggttgtggaggaccttataaaatttagggggcagtagaagacatgaaaatggatgacttcattaattgtgtattttcggtagattactctgctgtacaagagaatgaactgctataaggagagaagagatgtggaaagattgattaagaaggcattatcattgtccaaagagatgatgatggcttaagttaaggatattggtagtagtaagagagagaactttgaaatgatctaggcagatgttgtagtggacatggagaagtaaagttaagacagaggcatcaaaggtgactgaatgacctccagattaattactttagtagtacagtaagtttaktgagataggaagtttgggaagaaaagccagtttttctttttttttcytttcttttcttttttttttttttaagaaagctgaattatattttgaacacattaattttgaggtgcttataataaaagcatccaagtggaaatgtgaagtgggaagttggatatgtaaattaagaatacagaagtaagtctggtctcaataaaaatttgggagttgtcagtgtgctattagtatataagccaaaataataatttagattgctgagataggggaaaagtgggcccaggcctgaaccgtgagaaattctcatagaagccatgagaagccaagggcagagagattttgagaaggaaccagtcatgactgtgagatataccatgtggtccgacactacatgaattgacaaaactcactgtatttaatgacataatcttcatagatgactatggcaaggtgggtttcagtagcagtgaaaacagccagatatgtggaactggaaaatgtgaggagatggaggagatagagacaattttcatgaaacctggatagaaagggaagaagaattttagaggaggaggtggtgccaagggatgggtattggtggttttgtttgttaagttggaaagatgagcaagtagggatgaacatgagtcatgaagagggtaaagtggaaacaaagatgaaaagatgtgatggaaaatcagtggatttagacctttgagaagatagaaaaggggtagaatccaagatataggtagaggatggtatgggtcttaaatatgaggccacctctcttgttgcaaaaggaagggatggctgctttagatttgtagattgttgagggagtttctgtctgatggcttctaattgtctaagctggagagagggaatgaatgagggaatatggtggcagggtgtatgaggtgtatgaggtttgaagagaatgataatagattgaaagaattttgaaaatgggaaagtgcattagatagggaaacaaagtaaggtctacagtgttcaggcccaagttgaatttggtaagcatggatgaagggtagaggctgtctacccaggtggacagaatatgaagtccataagctacagaaattgtttgaatatcacagtatttgatatttttaattaattattaaacgtgaactcagttcctggctaacatgatgaaaccccgtctctaccaaaaatacaaaaattagctgggtgtggtggtgcatgcctgtagtcccagctacttgggaggctgaggcaggagaatcgcttgaacctgggaggtggaggttgcagtgagccgagattgtgccactgcactccagcctggtaacagagtgagactctgtctcaaaaaaaaaaaaaaagtgaacttagttaagaaaattataacttgtttgattttcagaaataaatttcttctcatccttacattctctttggaatgcctattgactctgctttgaggaacagaccatcatgtctatcagatagggaataaagagggaaaatgggaaagtgagttttgggatttctctatatttgtgtagtcttgaacctttaattcctttgctcttcatctgaagagtatttggccatttttatagtgcagaaattcacaaaattattggacttactaaaagtataccaaagaatcaagaataattttaaaaaatagaagttatttttaaacgaatatttatgtagtacttgtttaggcattgtttttaaaagaaatagatttgcaaaaatgtgttttttcaacattaataaaaaatacgtccgttctgttttctttttttaagcggcttactgaactaaagcgccagtgtgtagagaaagaggaacgttttcaaagtattgctggtttaagtacaatgaagactaatttagagtccttgaaacatgaaatggcttgggcagtggtaattatcacttaattacttgttcacstatctatgtgatatgcagaatgtatttggttattattgttaatctgatcaatttgctatataatttctttcttaggtcaatgaaattgaaaaacaattgaatgccatcagagataatatcaaaattggagaagatcgtgctgctagacttgacaggaaaatggaagaacagcaggtaattacagtttttaaatgcagatttaataggttgaatcatatgaaattacagatattagactatttatgacccaccaaaccatcagtttcagacagtatatttgtctatatttgaattgattgcttaggtgaaatagacctaagcttgttttcaaggcctgttgtggtgactctcttttgaaaagagtactckatccttgataaacctgtcagaggctagggctctagaactcatgcatattgtcagtggaactttgttactgacaagacatagaagaagagcatgaagcttttactctttggttcattaaggagttgaaacacaaaaagacctgagaaataaaggggtgctagaataatataaattagaaccacattaaaggtaagtatcagaaagtatgagaactcagaactgaaaacaatgcccagagattgctaagggaactgagatttatggtccagaaccaagatggcatgtcagaggatttcatatagatggaaggcaagtaggattcattgttaggtctgttaaggttaatttcagcctgacatctaagagtgcaggtagaaactaccctatctaaaattcaagaaagtcataaaagtcttccacacgggcctagaggttacagaagttgagtgttgagtaaaggcagtcattctctgttgaggctttccatgtggaccctttaacattcagcagatccactctttatactyactctttctgttttgaacagctttattgagatatcattcatataccacataattcacccatttaaagtgtataattcactgggttttagtatactcacaaggttgagcagccagaactgtggggctcctcatgctgtaatgccagaagtagaactcctagttttttccttctttactccccttcccccgcaaatgtactcaatgtgccagtgtagcttacttacctcttagcattttctctactttgcttaggaaatttctttctggcccccaagcttggctgtggtatagaatgtaatctttcctagcttgctttttcctgtctgcctccaagataagcagattgatcttttttttcttttaagggttatgacattaattcatcagaggtaatatatgagtatgtaaaaataggtaaagataggacacttagcgatttctgggctaagtttcttactccctcttcaggcagtaagtggaatttcaaccctttccacctctcaccttaaattttcatttctgaaagaatattctgaaattttcaccaagtatttttctcttctcaccctcaattctcagcttatcatcaggtaaggccttaaatactttcctcctcaagcatttcccagtctaaaatggaatccagtctgcgtaatagatgctcacctcttttttaaatgggaaaggaggatcataaggctaggttatgtttacttttgtaggcctttttctccgtttaagcatttgcatactctatgttgtaattggcaaatttctggagggtaaagactatcttattttatctttatatccttaccaccttgtcttacataaagcctttcacattgtgtgtgcttgattattgcttgtagaatgactgttaaatggaaggtttctgaagaaacagtgtctaaagcagactttaaacttttgttaatttaaaactgaaaaataatatgaattatgtttagtttatataaaacctggatccagctttcatttttattaaaaaaacaattcctctactcattgtccttgggtgctttcatgttttaatggcagagttgaattgttttaggagagaccatgtggcccacaaagcctgaagtgtgcactatctagctccttgtagaaaggtttgctgaccccgatcgaaatagttctcatatttgttccttctaatcagtccctattgccagcatcccagtttggtccctaattgtctttgttccataatatattaacttcttactgaaatcttttcctttgatttttctgtctaccctgtgttccaagtgcttccagagtaatctaacatgcagacttaggagataagagacagacttaggtcgtcttcctgttgtcaagaagattaagttgtaagctgttcattgtagaatgcgaggcccttctaccccttcatctcgtctcctgccattatcctttcaatttaagctctagcaatatttaatttctaaagtattaatacctttgtacatgctctttcatctgcctctaacaccttcctcaacttatttcctggtacacttagattaatttttaaaatctcagctcaaaatactacttgctctttgaaggcattcctgactttttctggccaacctctggtttgtttctctgtgctaccacaattaaaaataaatgtaccctactttagtattattgtatacagaatgtatcatcagtttgtgttctgtttttctgctaaattatatctctctcttttgtgttatctgaggacatttgttatcatgtctttgtatcccaagaggataacacatttgttggataactaactgtgggttaagatcaaattatattatagtattttatataatgttatgttatgtttatttgcctgatgtcttgagtgaagttamatttattattggtatatgaactatasataattattttttaaaattctctctattgaagaaaaaatatacttcaataatgttattttcttaaaggtcagacttaatgaggcagaacaaaagtacaaggatattcaagacaaactagaaaagattagtgaagagacaaatgcacgagcaccagaatgtatggcattgaaagcagatgttgttgctaagaaaagggcctataatgaagctgaggtgagataaattttctaaactggaattttaaaagccacacagcaaatataaaggctgttcttctatccttttttattatattttattttttttgaaatagtcttgctctgtcacccaggctggagtgctatggcgccatcacggctcactgtagcctcttatctcctgggcacacgctatcctcccacctcggccacctgagtagctgggactacagacatctgtcaccacagctggctaaatttttttgtatttcttgtagagacaggatttcaccacaatatccaggctggtcttgaactcttggcctcaagtgatttacctgcctcagcctcccaaagtgctgggattacatgtgtgaacctctgcacccagcctcttctattttttwaattattatttttctgagacagagtctcaccctgtcacccaggctggagtgcagtggcgcaatctcagctcactgcaacctctgcctcctgggtttaagcgattttcctgcctcagtctcctgagtacctgggactataggggcgtgccaccacgcccagctaatttttcgtatttttagtagagacggggtttcaccatgttagccagggtggtctagatctcctgacctcgtgatcygcccaccttggcctcccaaagtgctgggattacaggcgtgagccacagcacctggccttctattttttaaagtagagattttgtacctgagttgaaattagtgatgctttgagattttaaaaaatgtaatggtttcaaatggccattttgtgcttcatttaaaaaatatattcctgtatatattcagcctctgaagatttgacaaaagtggacgtgaatgggatatttgtgttttcatttttgtaaagtgtgtctaatttttttggttaggttttatataaccgatccttaaacgaatataaagcattaaagaaagatgatgagcagctttgtaaacgaattgaagagctgaaaaaaaggtagggtagttactttgaaattttcatgrctatcccattttgtaataaagtaaggtagatgcattggagtattatattttatgtattgttgttaatggaattttattacatcggtttgtgttctttaaatgttaggctgttcattgaactaacatttttcactttgggttatttactgttagtactgaccaatctttggaacctgaacggttggaaagacaaaaaaaaatatcttggttaaaagagagagtaaaggcctttcaaaatcaagaaaattcagtcaatcaagagatcgaacagtttcagcaagccatagaaaaggacaaagaagaacatggcaaaattaagtaagttgcaacatccttagaatgatttttttcaattacttttacatcatatagttttgttcttgtatgaagagagcaaatatggttgtttcttctacataataagggatctttttaaaaagattttatttttatgttaaatactttgcagagcagggctaactcattggcagtgcacctacagccagctggatcttttaaaatcacttttcaagacttttcttatagttgtagagttgaacaatttctgggattcctagcccatcattgttgcattactttttttatgccaagttttgaggactccagactgtttttctctggtaacacaattattttcaaataaataattctgcttttggtttttagggtagctagctgggtcgttcactgggatgtaggtgttatgggcaaaggttaaatgtttctgtaaaactatcacatatatgttctgtttttctgcttttgttttttaggagagaagaattagatgtgaagcatgcactgagctacaatcagrggcaactgaaagaattgaaagatagtaaaactgatcgactcaaaagatttggccctaatgttccagctcttcttgaagccatagatgatgcttatagacaaggacattttacctataaacctgtaggccctttaggtatttgtcttaatttagcgaggttataataaactttagaaataagtttttattttcagaacgattgaatgaagttttcgaaataaaatgatttcatttaaaataatgaaattatataaagctttgtagctttcgttttatatttttaaagcataaaatatccgaaagaaagagaactttggaaaaggaaaagtaatcatagagttgaatgatttgattcttgtttttctgaataaatgaatgaataagtaaatgaactaatgtaatatarttgattattcagaaaaaaccagtaacatcaagatatagttgaaggagcagttaactgaattttggtaatctttttaaaatgacttttctttcttagtttctattttggttgggcagcatgatttctaagttctcttccaactgtaaaatctgtggttacttcactcttacatatacatggtacttaaaaaattttttttagtcacgtgttcttggggggttatctttaattctgaaaatcattaggtgaaaatgcttataaatatattttgttagtaaagtattgcatttaagtattgtagtaatatctcttttaaatgatacatacctttataccaggatccatttcaaaggatgaggcttttttttttcgcatcccattaaggactttgaaaatcgtttgattttcagaaccccattggaaggctagaatagtataaactgaacatagaaaagccaccgttgatttacattagagtgggacaatttttttcacaggatttggtggattttctctccattgtatcctatgggtataggggatttcccattcagttaaaatattatttaaactgctttatataaaagtatgttaaatcatttataaactatgattaaatgatctgtaaagtcatttaaactgctttatataaaaatataagtcatttatatgctataattaaagaggaggatgttaatatttcaaaataagtatttatgagcccttctgtaattttctctcacttttaggagcttgcattcatcttcgggacccagaacttgctttggctattgaatcttgcttaaaagggcttctgcaggcctattgttgccataatcatgctgatgaaagggtccttcaggcactcatgaaaaggttttatttaccagggacctcacggccaccgataatagtttctgagtttcggaatgagatatatgatgtaagacacaggtaaggcattagtaattgaatatgtttctggctttgcttaatcatatgcaagattggaaagagttaaaacacttttaatgttaatcatatctttaccactgatttgtaaaatttcatcaagccactttaatttctgtctaggtattagttctrggcattagagaaacatagataaatactccctaccattraagttcttatatgtgggagacattacagggaaacagatgtagtatggcttagaaattacaccagtgaggaaaatgatatgaccaatttaagagggaggggcctgaggaagaacattggcacccattacacacagttaaattctgaaggtgtttcacagaatccgtgaagagcagtaattgtgttctttgatgaccttaacaagtcttttcaagggagctcagtacccaaactggcttctttgctaactactggctaatactttaaaaatgaatgtaggccaggcacaggggctcatgcctgtaatcccagcactttggtaggccaaggcgggcagattgcttgagctcaggagttcaagacgagcctgggcaacttggggagacctgtctaccaaaaatacaaaaaaatagccaggcttggtcgtgtgtgcctgtggtcccagctacttggaaggctgaggtgggagaatcgcttgagcctaggaggtggaggttgtagtgatacagcgagccaaggtcatgccactgcactccagcttgggtgaagaatgagactgtgtctcaaaaaaaaaaaaaacaaaaaaaacaaaaaatgaatgtatatatctattcccagatgacattttaaaatttcttttctctcccatctccactttttaaaataaaccttctttttaattaagtctagtgctatgtctctcatatttggtaaattagtgtgtgtaattaactcatgttaataggtagatcaaggaagaattcagagaggagttgagaaatcatcagtcttttaactgatgagtttgtcaagtgatagaaaaagttaattgccttgtaggcaaatagaattctgtgtgcaaaatgcgtggaagcatgacattgggagttattctgcaaaaaatagcatttgcatttttgataggaagaaacagatagcacagagatttgggcaaaatcaataaaatttgttaattgaatgcaagagaaggaaaaatcaggatgactcctaggtttctggttagagtgactagctgaaggatgccatcagttgtgaggaatgtccttcttgaatctgaactgtcattttaggaccaaagagaatagtcctggccattctggtggggcctgctctgtgaactgacacaaagactctgaagaagagtgcctggcactgccttgctggcacattgtgtgtcccagcctgtgcttctaatcacttagccacgaaacacatgtgacaaaggatccagtgtatgtgtcataatgccagttttcttggaagtaggtgagtttatgtgctgagaacaagggcctcaggagttgctaggaggtaccttctttaagggtttagattggctaccaaggagaatgagagaggaagctgactcgaagtctgcttaagatacaaaagcctagtggctgcaggatttttcactaataatgtttctttagagatgtgagtggagggagagtctrtactgttagataaacattagagttttttagagtgggtaggtactgcagaaagggaaaagggaagcagttgagtgttttgttgacaaactagtttaaagaaagagaggcctacgagaaagtgtttagacccacctcagtgaagttagagaatatgcttaaatgcatgataagtctggaaggataggaggttgtggtaagagtgagaaattcaagttgaatggaacaggtctaggggatgacaaagtccatgttttggcttcaggagcaggtagctgaaacacaagttgttggagttgtggaagaaactagattctaatccttttgggtgttgacaggatattgacaagagtcttgagtatgtctaacattctgttaactttacctgccttgtaaacattttgaaggggtgatttttttctgtgtttgaagaaatttttcggtatgaattatggttcaaatgctaaatttaaaaactggctatattattttaatgtggaaaataatagtaaaatattattagggtattataatgcatcagatacataggactcatttcagtcatttaggcttacgctagataaccttaacagaggtacctaggaagatgcctagctcgtaaggagtattcagaaaatgtgctttcctttcctgtaaagatggtcttgtttcttcttttcagaaggacatagaagctactaaactactactcctgctattatgcctgcatttgtacatcttgcccccatctcaagagagattctttctgtctgaggctagtctacttgtgccttgaatcacatactttcttgcctgactctattaaccatttaaaaaaattatttcagccctctcctgagccttaaactttcctgttaaattttctctctgttttaaacatgataggtctctgatttgcgtttcttttaaaaatacacctctcctaggggagactgcattcactcatagacttaccactcttggttyctaaatgttaattgcattctccagttatttccttgttgccgaatccagttgatatttaccttctctcaagcattagatactattaaatacaccttccttcaaacttcatattccttttgttactatgacaccattttcttggttctcatactctttaggtgtttctcagcctattttatgggcttttcttcatctccttctggtgctccgcacagctctcttcatagtctgttataacttctcactttatatcttcttatatttggagaaattaaaaatacaccaaatttagaccagtcacggtggctcacacctgtaatcccagcactttgggaggccgaatcgcgtggatcatttgatcccaggcatttaagaccagcctgggtaatgtggtgaaacgccgtttctacctaagatacaaaaataaactgagcatggtgctatgtgcctgtggtcccagctactcaggagcctgaggtgggaggatcactggagccctggaagtcaaggctgcagtgggctgtgatcgtgccactgcactccaggtgacagagggaggtcctgtctcaaaaaaataaaataaaaatacaccaaattttaatcatgtttttttcctatattttaacttagtggtgtttttccttttacttgactttagaaatcacatctttttatcaaatgatttaagtataattaggatgaaaaaaaatcattttgtcctgtaactccgcttaccagtgaggcctattatacttgactagattttctgtgcactttttcctttgtcagtatgttttgtttagactttctgcttaacattgtttgtgaacctgtgtcctattatcttctccttgtcccctgtcaccaacatctcattacttatattcctttctacttttggctctgctagactaatattgtatcctccctcaacatactattaattgtaatataagccagtatgaggtaaatcccagggacgaatagcaaaaggaagaggtagttgtgacttggcgctttagaggaaactggtagtaacagcttcatgtaatgatggcctttggctgcccgaaaatggtgactccttcctagtgtcaaaacctgtgctctcaacaggctagcgagagtctacatttcaccagaactgcctaccacgtcctcccctcttagactcctactccctttctttatctccttgttccgtactttgtttcattgactgcctgacgtttctagagcacccataccctattctttcttatccttgttttttttccacctgaactctgtcctaaaaagccatttacctgctactgtcacttttctctgcttcccttttcaggaaaaactcaaaggagttgtctgtttctctaatttctttctaccttctttcttgaaccttctccagttagactttataatttcaccacataccaaaacagctcttatcaaggcatcagcaagcctcacttcgcttaactcaattgactcaaagtcattactcttcactaattttacttactggcagtatttgcccttgatcctttcattcttcctgaaacactttttcacttggcccaaggacctcactcttctcattttcctaattctctaggtgttcgtttttggtatcttttgcttcttcctcctcacagctgactgtaccagtgctccagaactcttcttggtatgcacttctccctaggtgaactcatctgattgcatggctttacagatcatacattgatgactgaaactgtgtttgtaggttgcctttttcttctgaactctataatataatatacttaatatatatttttcacttagatgcccaataagcatttcaaacttaccatgtctgaaagccatactcccgatttccaccccaaaacctgcactttcagtaatcttctccatcttcatttctctattgcagagtcattcttgactcctttctgctaccccacatcctactggctgtacttcagaaatatatccaagatctgaccacttgtgtggtgactctactggctcacgccatcatcatgtttcccttgagaattgcacaggctgatctccctgcttctggttacttggcaccacagtctcagtacagcagccaacgtaaagtcaggtcatgttgtgcctctgctcaaaggactctaaactttgctgttttccttatcacagggctgactgtgacctctaggcctggatgatctgtcctctcaccatctttcttatcctgtctctggaaacacttccctccctgatctgcctactgtggcaatctgtctccttgcttctctgacacaccttttagggtctttgcgattgctcttccctctgtctgaaatggtcttctaaggttacttatgtgactatatcatttcctcaggtatctgcccagtgttaccttagtgaggctttttctcgtctttttttgtgtgtgtaaaaaagcaccataagctgccttcccttctttttctttattctctgtcttccttcaaaaaaatgtaagctccatgaacagggtgtagtctgttttgtatactgctccctttatcctctggaacagcacctggcacagagtaggtgctcactaaatatgtgttgaattaatggatgaataggtataaaacatgtatgcaaagatactttgttttggaattctaggactaggaaagcactaagaatgctaccaccatcttttcctcctcagccattcattgctcctgtacctcctattcttagtatgttcatttttcagtgctattgatagctcacatgtttacattttagttgaaagattgtctctttcatgagcccaaattacaattcataagaatatcttttctttcatatttcctctgtgttggtaataaactttacttcagtttttcttttctcatatcagggaaaagattgtttagctatttataatgaattttaaataattgacttatgtatgataactgtatgagatttaaggaaattgtaattattaattatagtaggcagcagggcatattgattaagaatctggactctagagctgagctgcctgggttaaatcctagcccagttacataagtagcttcatgacgttggggaacatactcaactctctgaagcatccttatctgaaaaaaatgtggagagaataatactatttatcttatgtggttgttatgaggattgaatgagctaatatttgtaacatgcttataacagtgcctagcacatagtattatataaatgctaaataaataaacctatacagctatgttttcaaatgttaccagatatttgatattgtcttgttatttataatttcccccattacaaatatatatggaaatatatatactcttatatatatatacacaattttcatatgtatatatttataattaaaatttgctaagttaatccttctgtatttttgtctcctagagctgcttatcatccagactttccaacagttctgacagctttagaaatagataatgcggttgtggcaaatagcctaattgacatgagaggcatagagacagtgctactaatcaaagtaagacctccagatctttgctgtatttgatgttattgttaaatttttaaaactgaagataattatataaattcctattccccttttatcatagagttgctgatgtgtttcactattgtacttttacctgataggaaaatctgtaggataatatagaaactggttgatttgtacgttttctgccccatggaactttataaytttcagctgttctttataaaatcatttcacaaatgcatattattcttttggtgcatggtgctataactttttttgttcatttttgtttggctgccaaatttattttttatttgcccttacagatatctgtattattctacttaaatgaaatattttgcttgatatcttatgacttctttttcatataactttgtactctgttagataaatcaatatttactatttatctgtgtaggtgtttttatgtgcttgttagattagatcaccatattttgtttcctctgttggcataaatttgctgagaagggacaaggtgatttatattgtctcgttatttaaaacaaatctgtaatcaagacaaaagtcttttttctcattgatagatgctaagaagggtctagataactcaaakgtgtgtgtgtgtgtgtgtgtgtgtgtgtatatatatacatatacatatgttcatattgtaattatttgtgggttctactcatattttagaatggtacttgaaaaaaaataatgaagcgttgttgtaaaggtctgtccccagagaggttgattaggccttaattaatctaatcttcttttacttcctccagggcttaaatatttccagactttccctacatatttcagtatgttaatcttttattggaatttgctattcattcatatcttttctagggtataaaagtcatttagaaaaaataattactatgaactggtctaaagtctatattttcacattaaaaagcacttagaatagttttaacttttaaatagatagcaatatgtgaatttaaaaataaatatacaccaatttgtcatgaagcattgtttactaaactgttttaagactttttaaatagttttcattcttctaaccttgaaagtttttaaaattcttatatttaactttatgaaattatttgaatgttttaaaaagaatacttgaatcatattaaaataataaggacgagtaacattttgaaattctgtacatcagaaaaattttcacatcgtcttaaaaaatttattttcttctattcttttagaataattctgtagctcgtgcagtaatgcagtcccaaaagccacccaaaaattgtagagaagcttttactgctgatggtgatcaagtttttgcaggacgttattattcatctgaaaatacaagacctaagttcctaagcagagatgtggattctgaaataaggttagagtcaagtttagctttactgtatcattcccactgcttccttgggggttcattttctttcatattactcttttagtggttgtttcagtgaggacgtgagtaatctatctcagtgcttggtcttaaaacatcacttagctagtcatagaattcgaggttgacagttatcttgcatcatcactttaacaacgtcattcaggactgataatccagaacgtattccctcaactggatcatttgtacactatttgttacttgtcctcaaggagataggagcttgactcaatgtaaatcagctacatcactgtgctcactgtttagttttgcctatttgtctcagagaggatacagcagactggtttacattctggctcaagctccttataatgtccctgattggtactttgaggtgcacagttctagaaagaagatcaactgacatgattagaacacatgcctaggaaaatacagctactagaatagacaaattgagaagttaaacgaaaaactattaagagattcatgagcatgcaaaaagaaattttggtatcaaaaaacaaccccatgatttcttaactgaattcattcagttgatgaattgatggtttgggcctgaattaatgacttagaagatcttcagtagaagaacttaggacttaagtaaaagaaatatctaagacaactgagcaggaaaaaaaaaaaagaattataaatgacttgtatgtgtaggggaaatgagagttttgttgaaatagatttcttctagtcatttttatgtgattatgagagcagaataaaggaaaataaccataatggatgttggaaagtttagtaaaacaattagcaatagaaaaagttgaatgactagcaccttggtgttctggcacttgcttttgtttattatctcaatgcagttttcagttacaaaagtatacataatgtggaagcaaacccttagaatgattaccagcgtggttcataaaaaaaattacctgtgaatttttgaattgttaaaatgctataacattttaatctaatcttcagaagtatgctctttaaaattttattcttttatttgttctttcaaacaacaaatacttaatgggtatctaatactccaggcactaatcaaggcacaagacacatcaggaaacaaagtattaatatacaaaatttctctactggatcttaaatttaggggaagatagactataaatgaatactaggttaggtggtgatcagtgctgtggagacaaataaagcatagtgtggggcaagagagtgacgagtatactattttagataggctgtcaggaaagatgtattcatcccacacaaacaactcacatactcagctcargcttaatatatttttcattaggtaacatgttctctatgtaaaaactcagtaaaaaaaactaaggaggaacactrtatgaaaatgtataggaattagttttacccagtaaaaacaaagttgtaaaatttattagttttattaaagttacattgattgcttaaatttattctatatgttcagaaaaattgtataatgacaatattgtcttgcttattttgttggttttcatttttggcttargctgtagtttccgaagtttgtttacttggcaattttttttgtttttttgagacagggtctcactctgtcacctaggctagagtgcagtggcaggatcttggctcactgcagcctctgcctccggtgttcaagtgattcctgtgcctcagccacctgagtacctgggagtacaggcaagtgccaccatgcccaactaatgtttgtggagacagggtttcaccatattgacmaggctggtctcaaactcctggcttcaagtggtctacccacctccacctcctaaagtgctgagattacaggggtaagccaccgcacccagcctggcaatttatttttttaattttaattttatttttttgagacagggtctcactctgtcgatcaggctggagtgcagtggtgcaatcttggctcactgcaacctccacctcctgggttcaagctattttcctgcctcagcctcccgagaagctgggactacaggcacgtgccaccacacccggctaatttctgcactttttggtagagacaaggtttcaccatattgatcaggctggtctcgaactcctgacctcaagtgatctgcccacctcagcctcccaaagtgctgagattagaggcgtgagccaccgtgcccagctgcaatttttttttttttagcaaaattactatttgttaataaaagtttaggtttatatatgataaaataaatatttcctattaaatcctgaggacccatattaaatttttgcacctggccccatttttatcagaaattgcgctattctcttcctttccacatttttatcatttattcagctaacatttattgagcctttttttgtaatttaaaaattctagcaaggtagcacagttgttttacataccagtaaatgttgtatatactattattttatgtaccagtaaaaaggaaataaatgctaattgaaccacaaactgcaaaatggtttcagatttcagagatgttaaaatgtggagaaatattcatcttagtggaatatggccagctccagggaatatcccccagaccagggaaaagttgttcttaactgcaaaggtagttctcttccaccaagcacaaagctttggaagacagatacttggattagtgaggaaaagatcasttctgaagccagttgactctgctgtatggagactcatttttatgaatttggaatctggtactttatttattctccatatcttcttattgtcgtcctcttcttccccttcactactcacacatttgttgcgtttattcaccaacagaagtattaagctattagttttatctgttttaatcactctctgtgcctttttgtatttctttttatcttctcccctagttggtccagctgatgaaaaatttagagaatacgattcagttatctcttctcccagattaactcttatgctcctgtagtactatggatatataatctagtgtcctgttcacattttaatgtgatagtttatttcctggttttttttttttggagttacatcttaattctgtttctacttctgtctaccactatgcataatactggcacacataagtcataagtatatttgacccttgaacagtgcagaggttaggggcactgacccccaatgcagtcaaagtctatataacttttaactccccaaaaacttaatagcctactgttgactggaagccttactgataatataaatagccgattaatatatattttagatgttataggtattatgtactgtattcttataatacagtatatacagtacagtatattatacaatatactacaaatacagtatatgataccatacagtatgtcatatattcttacaatacagttagctacagaaaagagtatgttaaaatcataaggaagagaaaatatatttactattaattaaataaaagtagatcatcattaaggtctttatccttattgtcttcacattgaataagctgaggaaaaggagtggttggtcttactgtctcaggggcggcagaggcagaagaaaatctgtgtataagtggacccacatatttcaaaccctgcattgttcaagagtcawctctacttgttaaggaaataagtaaaacttgattcctgtttagaatgttttttgaaatgtctgcaatagattttcatgattaatagcttggtaggattatagaactggtttaactgaaaaggattttgcacataacttactataaataaggctttctttgtaaaggtctaaagtatttgtaatattgagaaaaagatttaaagtattttytatcttctcctttcctatcaagtgacttggagaatgaggttgaaaataagacggcccagatattaaatcttcagcaacatttatctrcccttgaaaaagatattaaacacaatgaggaacttcttaaaaggtgccaactacattataaagaactaaaggtaaaaaaataataataataaaccttcttttgtttttttcaacttactaytacgaagttgattttaagatcccattattgactccaagcaattctcaaaccttttggcctcaagcccctttacactcatcaaagagctttcatttatgtgggtatatctgtcaacgtttacatttttaaaaattaaaacaaaatttaagaatatttattaattcatgtattagtctgttttcacactgctgataaagacgtacccaagactgggtaattaataaagaaaaagaggtttaatggactgagagtttcacatggttggggaggcctcacaatcatggcggaaggcaaaaggcacatcttacgtggcggcagccatgagagaaagagagccaagcaaaaggggaaacgccttataaaaccatcaaatctcatgagacttactcactaccacaagaacagtaggggggaagctgcctccatggttcaattatctcccatcaggtccctcccacaacacatgggattatgggaacttaaattcaaggtgagatctgggtagggacacagccaaaccatatcaattcatttaaaaatagtaataaacttagttaacagaaatattttttatttaaaaaaacaaagctttgaaaccaaaaagattttgtgagaagattggaatattttttaagtatctgatgtccaagtttaataaaattcaattaaatagttatatcagtttttgcattcagtctgttgtggtattacaaatcatatatttataaactttatatatactcatgagaaaatgctaataaaagtggcaaataatgtctaattgtttttatgaaaatagttttggcttcacagaccatctgaaggatatcagaaacccccacagsttacttggatcatattttgaaaaccactggattagaataatcattccataacttgagactttggatgtttcagaaaartttttctcgttggactcaacagtgccatcatttaaaatgctaagatggattacttacatctcttttgcatgggaatggattagtatataagaatgatatggcagaatttatacgtaatttcctttggttgatttaatactaatgtacccctttcattaattatggaatccttctgtatcatcattatagagctttgtagattaatgaatcctttccaaggttttcggtttaawtttttttttatgttactaaaatccaaatacttttcttttagatgaaaataagaaaaaatatttctgaaattcgggaacttgagaacatagaagaacaccagtctgtagatattgcaactttggtaaaatactttttttcaatttaaatgtaatattaaagggtaaagccaccatttasgttaatggcatcaactcagcttttttagaaagttyttttaattgaagctactctttatgattgctgtctccattcaccaagaaggtaaaaactacctggtatacagccttcatattttttaatgttttgtgtatatataactttcatgcataataattgattttgtctcctatcacatggaaaaaaactttaccaaaacttaattgtatttctaaacaagggcccatcaaaccctgctgttgagcatagtgtttttcacataggcactctcagagttcagcagtatcaatatgaatgggcacagatgtcaggatcatcttttagtcagttctagttggtgtcttgttttttttctttttttcaaatcagtatttttcattttaattcaacrcattttttactgtaatctttttttcgggaatctgtttatgacacttagctttttctgagttgcagtaaacagtgaattagataaatggcacagttgtgttaaagtgaataaatatttatcgagtgtctgctctgtatcaggaagcatattaactgctaaggaatacagcagtgcgcaaaatggaataagtctcagtgctagtgaagctttaccctgattagaatttgtctccattttttactagtagtcttttcactttctgctttttatttttctgctttaattcctttttttgatagactaaatttttgtattattattattattattattattattattattattttgagacggagtatcactcttgttgcccaggctgaagtgcagtggtgcaatcttggctcactgcaacctctgcctcctgggttcaagcaattctcctgcctcaacctcccaagtagctgggattacacaggcatgtaccaccacacccggctaattttttatttagtaaagacaggctttcaccctgttggtcaggctggtctcaaactcctgtccttaggtgatccacccgtgtcggcctcccaaagtgctgggattacacgcatgagccactgcacctggccaactaaatttcttaaacatatggataatatcttatttatgtttgtttacttagcatctaacatattctctggcacaagatatatattgtatagtttggaaaaaatgaatagaatgaaagtcattctttttgattatgatcttaagcagaatattgtctcctaaatatcatcccttctgatttttcagcttgttttcctctacttcctaatttaccattaagagtataaaaatattctagtgttctatttgtatttgatctgatttgcatatagcctatagtttctcctctctcagaattatttttatgtttcttctatttgaaaacttaaagtattttaattaaccttatatgctgtttaaattttatcaggaagatgaagctcaggaaaataaaagcaaaatgaaaatggttgaggaacatatggagcaacaaaaagaaaatatggagcatcttaaaagtctgaaaatagaagcagaaaataagtatgatgcaattaaattcaaaattaatcaactatcggagctagcagacccacttaaggtatatatttttggtactgtgttacgtatgtattttatgttttagttttatatccacatgtactctatggatattggcctaaaagaatttttggttaaatgtaaatagcataaaaattgaatataaagaatggtgggaaccaaactttcatcattagatcaattagtattaaacacttctgttcatggctttaggagaataaatcaccaaatttccatttctcctagaggattatagcttttttttttcacctttttatgatttttaaaaatcagaaccaggagcagagacgtctcgtacgtgtacaatgtctctgtgcttgcttgttgtcccagctttgcttcaataactcaaagattagttgctgtaaaagccaacttgaaataaagtactactcatctcttgtttgtcagctatctcagttatgtttcaggctgaattcaattgactttatttttagcacatactttttgagacaaaattgaccatgaagtttttcataatattcacttgttattcctcataaatctgatcaacagagaaaaaataaactaaagaaaaacaaatagactgaaacaaacaaacagcatcttagggacctgtgaaactataacagaatagctgacatttgtattgttggagtcttagaaagtgaaggaaaagagggcatgactgaaaaagtacttaaaaaagtaatggctaaacacttcccaaatttggcaaaaagcataaacttacagattaaagaatgtacgtaaaccaaaaacaagataaacccaaagtaatctgcaataagacacattacagtgaaacttctggaaattaaagaaaaggtcttacagatagcaagagaaaaccttatatagaaaaggatttttgtgtgacagcatatttctcatcagaaaccatggagaccagatggaagtggcacatttttcaagtgcgaaatgacctgtcaaccctgtgtccaccaaaaatatttccaagcaataaaggaaaaattcaagatattctcagataaaggcaaacttagagaatttgttaggaaaaataaaagggggaatcttggaacatcaggaaggaaaaaaaatgagataaaaataggaaaaaatgcaatagactttacttcttgagttttaaaaattatgtttagaaggctagcaaaaattataatatctgagataattctaaatgtatgtagaggaggtatttaggaccattatatttaaaatggggaaaagaaaagggatacaaaagggaggtaagatttctatccttctcaaactggtaaaataattatgccaggagactgtgatgtttggtgtatataatgtaatacctacagcagctactaaaaaagctatacaaggagatgcwytaaaacgtactacagataaatcgagatggaatccttaatgtatgttggagtaaccacatggggcaggaaagagaagacagatgaacaacagaatacaacaaataaaatgacagacttaaatttagacttacttgtctaaataaacaaaagacagatatggacagagtagattaaaacatgactatatgctctctataaatagctcacttcaaatacagccatataggcaggttgaaagtaaaaggatggaaaatggtatatcttgcaaataataatcaatggaaaacaagagtagctatattaaaatcagatgaagtggacttcaaaataaaattaccagagacaaaaaaggacattacgtaatgacaaaaggttcagtccaccaaaaatacatagcaattctaaatatgtgtgcaacaaatattagagctgtaacataagggaagcaaaatcttatagaacttcctcaataattgatagagcaactataccaaaaatgaacaaggatatagaaaaactcaacaggatctaatcattattwatatattgttcagtaaaatttatccatttaaagtgtataattcaatgatttttcatgtattcagagttgtgtaaccatttccaccattttagaacattttcatcgcctaataaagaaacccgtactgattaacagacactcccarttctctcctgttcccatcccctggcaaaaacaaatctactttctatctctatagattgcctattccagatatttcatatgagtagaatcatatagtatgtggtcttttgttactggctccttcaacttagcataatgttttcaagtttcatccaggttgtagcatgtgtcagaactttattactttttattgcctagtcatgttcacatttatgcattcatcaattgatggacatttgggtgctgctgctgcgaacattcatgtacaagtttttgtatagatatgtattatcatttgtctcagatacctaggaatggaattactaagctatgtgcttayacttcattttgaagaactttgaaacttttccaaagtgactgtaccatttaatgttctcaccaacagtgtttgaatgtcccaatttctccacatccttatcaacactggttattttctgcctttttaattttaaccatgctagtgagtgagaagtggtatctcattgtgattttgatttgcattttccttatggctaatactcttggtagttttcatgttcttattggccatttgtttatctttggggaaatgtctttttaaatctttgcccgttttacagttgggttctgagtcttttatttttgagttgtaagagttctttatatattctggatatgtgttggctgtttttcatggtatagtaaatgttttaattcatttttcaattattcctagtatatagatagatgactgaattttgtattgacctgtatccagtgacctttctaaactcacttatagttttgaagttcttcttttggaatttatgtgccatcatctgtttttgtataaatacagtattacccttttttttttctaattgttatgctttctatttccttttattttaactgaactatccagaacctccaacaactgttgacctttagtacattgttgaatagacgccatgagactggaagtccttaccttgctcttgttcttagaaagaaagcattctatatttcatcatgaagtaatagctactatttgtgttttaattgtcctgtttttgttgttcttcatactttccctctttatgtccttcctttgagattaccaagtaattatgagtgttcctttatctcttctcccagttttttagccatacctcttgttttatttttccagtggtggccgtgcattatagtatgcatctttaccttatatctactactgtttgtttttaaagtgatcttgggatagcttctttccagttgtattttatgctcaaaattgtgaagttataccagatgtgactaaataaatcagcgttaaattttttcacatccttgctttttcccgaacccaccctttttaaaaccaggtatcctttttcaggtgtcctctgtaaatacctaacacttgcattgttttaagtttttaaaggctaatgtggattcccccaaaaacacctagtttattagaataaaactgaaagtaccataatatatggggaattcagataagaatttgaatttaatgtgacttcctaatttgggaaactcctcacttctattcagacacatatggatataataacacttgcctcttcaaacagcataatcctagccactttaccgagttgtttattatctttatacctatgctggaaatttttttaaaacaatcttttattctggctttgttcaaacaggatgaattaaaccttgctgattctgaagtggataaccaaaaacgagggaaacgacattatgaagaaaaacaaaaagaacacttggataccttaaataaaaagaaacgagaactggatatgaaagagaaagaactagaggtttttcaccatttttttcaagttattttgttttcagccttagccatgattattaaagtgtgttttccctaatgtcatgtttctaaaaacagaaaagttgtctgaatttctgtttcatatagagtaataggtgtttgggtgaatcaacagaagaggcttagggaccctcagagtgtgaggacttaaataggcaagactctgacagtcctgtattatgcctctgagtgctttagaaagtagcgctgtctttcagctaacatagctccttagatgcccaccttggcaagcggatagcccttgagtgtccggaaaaggcaccccttccagtgagtagttgggctgtgggccgggctagattttagctcctacgagacatgtctattggcaattctaagcagtgacccggtgtttagaggagaataaattgaaggcaaccttgtcctaaccagaacagatggattccaattttgcatttatatcttaaggaaaatgatctaaactctgtaattcattttcttacttgttttcctcatttgtttaagaataatacagaaagttgtgaatataaaaaagtactatgtgtaaaagtgccttgtattctttaccccatgagggtctttgtttgtgtttttaataccattggtgctcagagtcaaccctaaaggatgtggaaacctacatctcacctcgatgccctgggtagcaagcttttcgtaactgctgcattaaatttgtttcactaggaagttgtggagatcttgcaccttattagttacacacagcaatgcagttttctcttgaggtcattactctggactttatcttcaatataaaacttagataaatataaataacattgatattaaatgtaattaaaatacatttcttaaaaatgagttcagaattttactttgcagattttggcacaagtagtataatgaattgttatatcaaagaagagttttaaagatataaacatctactttcttaggagaaaatgtcacaagcaagacaaatctgcccagagcgtatagaagtagaaaaatctgcatcaattctggacaaagaaattaatcgattaaggcagaagatacaggcagaacatgctagtcatggagatcgagaggaaataatgmggtaagtagctggtagcttttctgctttaccacattattcatgcatatcatcaagacaaaaaatgaaaaacatatacatgtcttaaatttgaatgaagtgttactatagcaaatagttatagctgaagtagtcctttatatgtgtattattctcaataaatagtaaccttttttcttctgaactattacaaaactcattatggaatttcattttaacataaatgctttcgtgtatctataaggttcatatagacatgaaaatgttcaacttcataagcaatgaaagaaatggaaatcaaaacagaagccatttttcaaatacatcaaattgaataggatgaaaataacactaatattctaggtcagtaaggttcaatgaaatggatattttcatattactgataaaaacagatgctcttgataattagagcacaggttctgaagaaagagtatcttgatttaaattgcatttccaccacctatttatgtgactttggcaaattagctatctctctgaactttaattttctcattcacaaaatggggattgttctgaagattaaatgaaatgatccataaacaatatgtgggaaatatagtatattagttgttaccattaatgtctttctgaaaagcatttagtggtatgtcaacatattttgtcaaaattttaattgaccacctaatttgttgttattacatactccagtggggtacatatggcattttgatacatacatacgatgtgtaatgatcaaatcagagtatttaggatcttcatcacctcgaacatttattatgtctttatgttgggaacatttcaaatctccttacattgttgttaactaaagtcaccctactgtgctatcaaacagcagaacttattctatctaactgcgtggttgtacccattaaccaatctcttttaattacccctcccatcccactgacacacaccctttgcagcctctggtgcctcattcaactctacctccatgaagtcaactcttttagctcccacatatgaatgagaatatgcaagatttgttgttctgtgcctggcttatttcacttaatacaatgacctccagttccatctgtgttgctgtaaatgacaggatttcattcttttttttttttttttttttttttgagatggagttttgctcctcttgcccaggctggagtgcaatggcgtgatctcggctcactgcagcctctgtcccccgggttcaagcgattctcctgtctcagcctcctgagtagctgggattacagacaggcacatgccacgacgcccatctaatttttgtatttttagtggagaccgggtttcatcatattggtcaggctgatcttgaactgctgatctcagatgatctgtctgcctctgactcccaaagtgctgagattacaggcatgagccaccacgcctggcctcattctttttttttattttttatttttattattatacttttagggtacatgtgcacaacatgcaggtttgttacatatgtatacatgtgccatgttggtgtgctgcacccattacctcgtcatttaacattaggtatatctcctaatgctgtccctccccccaccacacagccggccccggtgtgtgatgttccccttcctgtgtccatgtgttctcgttgttcaattcccacctatgagtgagaacatgcagtgtttggttttttgtccttgtgatagtttgctgagaatgatggtttccagcttcatccatgtccctacaaaggacatgaactcgtcattttttatggctgcatagtattccatggtgtatgtgtgccacattttccagtctatcattgatggacatttgggttggttccaggtctttgctattgtgaatagtgccgcaataaacatacatgtgcatgtgtctttatagcagcatgttttataatcctttgagtatacacccagtaatgggatggctgggtcaaatggtatttctagatcccttagcaatcgccacactgacttccacagtggttgaactagtttacagtccccatcaacagtgtaaaagtgttcctatttctctacatcctctccagcacctgatgtttcctgacttgttaatgatcgccattctaactggtgtgagatggtgtctcattgtggttttgatttgcatttctctgatggccagtgatgatgagcattttttcatgcgtcttttggctgcataaatgtcttcttttgagaagtgtctgttcatatccttcgcccacttgttgatggggttgtttgtttttttcttgtaaatttgtttgagttcattgtagattctggatattagccctttgtcagatgagtagattgcaaaaacgttctcccattctgtaggttgcctgttcactctgatggtagtttcttttgctgtgcagaagctctttagtttaattagatcccatttgtgaattttggcttttgttgccattgcttttggtgttttagacatgaagtccttgcccatgcctatgtcctgaatggtttgcctagggtttcctctagggtttttatggttttaggtctaacatgtaagtctttaatccatcttgaattaatttttgtgtaaggtataaggaagggatccagtttcagctttctacatatggctagccagttttcccagcaccatttattaaatagggaatccttcgcccatttcttgttttcgtgaggtttgtcaaaaatcagatagttgtagatatgcggcattatttctgagggctctattctgttccattggtctatatctctgttttggtaccagtaccatgctgttttggttactgtagccttgtagtatagtttgaagtcaggtagcatgatgcctccagctttgttcttttggcttaggattgacttggcaacgcgggctcttttttggttccatatgaactttaaagtagctttttccaattctgtgaagaaagtcattggtagcttgatggggatggcagtgaatctataaattaccttgggcagtgtggccattttcacgatattgattcttcctacccatgagcatggaatgttcttctatttgtttgtatcctcttttatttcattgagcagtggtttgtggttctccttgaagaggtccttcacgtcccttgtaagttggattcctaggtattttattctctttgaagcaattgtgaatgggagttcactcatgatttgtctctctgttactggtgtataagaatgcttgtgatttttgcatattgattttgtatcctgagactttgctgaagttgcctatcagcttaaggagattttgggctgagaggatggggttttctagatatacaatcatgtcatctgcaaacggacaatttgacttcctcttttcctaattgaataccctttatttccttctcctgcctgattgccctggccagaacttccaacactatgtggaataggagtggtgagagagggcatccctgtcttgtgccagttttcaaagggaatgcttccagtttttgcccattcagtatgatattggctgtgggtttgtcatagatagctcttattattttgagatacgtcccatcaatacctaatttattgagagtttttagcatgaaatgttgttgaattttgtcaaaggccttttctgcgtctattgagagtcatgtgttttttgtcgttggttcaaaacggcaactattcacaatagccaagatatgtaatcaacccacatgtccattaatgaatgaagaaagaaaaatgtgtatacacacacacacacacagacacacaccacattaaactccccctccccccccccccacccccgccccccaactcccctccaccacaacacacaactccacccaatactcccccaacctatctatgacccgtacccactcccccagcatcacccaccactctaccacaccaaccaccctccgtaccatccacaccccgtaaccatacgaaggcttgcgcgccatccccactcgacttaaggccatgtacacacacatcgccccgcctcggtctttcttcatttgccccaacgccccgccacaatccacaaacccgcatatatgacccccccactcccaccgccaacacccccgcccacatgacgcagaaagcgccccgccgtccctccccaccccaccgnnnnnnnnnnnnnnnnnnnnggggattgggccctcaattagctgctcggacggccgccatgtgatggtatgaaaaaaaaagtgtatacacacacacacacacagccacacacacacagagacacacacacacacacacaccagaatactattcagcttttttatagcttttttgtagctgaatagtattctggtgtgtgtgtgtgtgtgtgtgtgtgtgtatacacatttttctctcttcattcattaatggacatgtgggttgattacatatcttggctattgtgaatagttgctgttttggtttagtgatatatcttgaagatcttcttatgttggtacatagatatttcctcattgtcttttataatttcactgtatttaataatctccttttcatggatagctgcgttttaatctaatcttttgttgttgcaaatggtggaacacaataagtgaatgcgcattattttatatgtactcagcgttttttttttagtagtataaactccatatggtcagatttccctttatagggattgtaccaattttgcattcccattagcgatgtgttagagtgcctgttttcctacagcctaaacagcgtgtggccttcttagattcttttttctgatagatttcccaagaaaaagaattaaccgtaattttaatgtacgtttctcttacattgagtgaagttgaacatcttttcatttatttatatttatttttctatgaccttttcatgtacttttttgtctattcggtacattatgcagattttaaaaattaaattaattttgtgataatatattcacagggagtttttttttgtttttttggtttttttgtttgtttgattttttgaaatggagtcttcctctgcaggctggagtgcagtggtgcaatcttggctcactgcaacctctgcctcctgggttcaagcaattatcctgcctcagtctcctgagtagctgggattacaggcgtgcaccaccacgtgcagctaattttttgtacttttagtagagctggagtttcgccatgttgaccaggcaggtctcgaactcctcacctcaagtgatcacctgcctcagcctcccaaagtgctgggattacaggcatgagccaccacacctggccacaggcagttgtttaaaaaccatactgttttagttattgtggctttatgatgttctttctgattttcattgttaatttattcagtgaatttagtaacctgagcaaaagctatttatttttctgtgcaaaatcaattttaattccatggtctgctagtcactcacatattacatttctctattagttataaagtaaaataattgcagtaatgatttaagaagcaactggagctcaaacgaaattttaatcctagtggattttcccatttggaattaataatgtattgaatagagaaattgcctagatccaattgccatagacatgcatccattattgtaaatacagctggctctctgtatccactgattccatatccacaggttcaaccaaccacagattgaaaagactgggggaaaaaactcaaaaacaacaaaaaaagaacacaatagtaaaaactaatacaaattttttaaaaaatacagaatacagtgtaacaactatttacatagcatttacattgtcttaggtattataagtaatctctagagatgatttaaagtatacaggaagatgtatataggttatatgcaaatactatgacatttataaaagggattcatggattttggtatctgcccagggggccctggatctagttcctttgcagatactgagggacagctctatcaaaaatcataaaacttcaaacattattgaaaggccatatatatttagcatgtatacatgcacacatatacatacactcacattactttacttttttttctgtaccattcaaaagtaggtttcataaatcatgaccctttacctcttagtacttcaatatattccctaagaataagagtattatcttacataaccacaatactgttataaagtacaggaaacttaacattgatacctgtagtccagttccaatgttgacggttctccacgtytttcctacgatatcagatgcagtctagggtcgtgtatttcatttgtcatgctcttttacagaatgctctttgttttgattttatacgatattttttcttataattaggttcatatgtgttcttggccaggatgctacagaaatgatgatgtatcgttttctgggtatcacatccagaggcacataatctgtctatctatttctctctctctctcttactgatgatgttaattttgatcacccagtaaaggtgttaattggtttttccattatatgctttactattttttcccttgcaactaataaacattctgcagacagacactttgcaaccctgccagtatcctgcttttcatcatattttcatccctagatttatcctctgctaatgattcttacctgaacgaatctttactatactgcttgcaaaatgaggagttttcaattctgttgcatccttcatatttatcagtcacttgtaaggaagagcctatgttatctccaatttatctatttgttaatttatttacttgcctttgcaatatggactttgcaattattgccaaatcccctctgcaagatatgtttacaattattttttttctggtatttagtaaatttactgtgttgtaaagttacttggattaggtttttctctctactgttacagttattaattgacttgatttggaaatgtttctatttgcattcagtttccacagatttctgttttactcaatggactatagtcatttacggtccatgtttatcttaagattttctttttctgagacagggtctcgctctgttgtccaggctggagttcagtggcaggatctcggctcactgcaacctctccctcccgggctcaagtgatcctcccacctcagcctcccaaagtgctgggattacaggcatgagccactgcatggcctattttaagatttaaattgttccatctttggtcaaatggaggctcttcaagctggttcctgcattttcttaacatgctttccttcttgttttttttttttttttaatagcatttttaaactttgtgacataacaaaatatttcaagctcattctatacctgacccagccttggagtcagtaacttctccaaagagccctggttcctttttttaaggaatgatacctaaaaacaaaatttggattttagggatgctaattgttgctggggtagcatttcttccagtacctttcagttaacagaattaaaaacgtgagtttgtattggtgtctccagtggcagtccagtcccacaaagggctttttaaccttaacctattccttgtttctgtctttttttcctccacaggaggaattctggctctcaacaacgttaatatttactcagttccacaatatatatctacagaaagaaaattattgaaaaacattcaagatgtgtttgcaattattttttctctactatttagtaaatttactctgttctaaagttatttggattaggtttttctttattgttgtagttattaattgacttgatttagaaatgcttttatttgtttttgtttacattcaatttttctctgatccttgtttatttaatttctctttgaggggaatatgtagaaattaacatggtttcacaagtcaaagccataaacaaaagtatattcagggaaatgttctccctctttcatcccttccacaccatttcccctggcccactccctataggcaacagttcttttttattttctatctttcatgttttttatttgtttgtgaaagtaagcaggttcatatgtgttttcttttttccatggttcctctactttttttcacaaaaggtagtcaaccatcttgcttttgtcattcaccaatgtacctgaagatcactccatatcagttcattgagatcttcctcattctttttacagcttcattgtactctgttttgtgagtctgcacacacacattgatctgtaccatagtttattcagtcattctgtgtgtgtgcattttggttatttccagtattttgcagttacagataatgctgcagtgaattatcttgcacatgcacgcacacatgtatatgtgtgctattggatacacttgtggcatcatataagtgctcgaatctgtatcttcatagtaattttccagaagtgactttactagtttgaagcataaatgtgtaagtggttttgttagatattttcaaaccttctctatagggtgtgtatcatttttgcatttgcgccaacattgtacaggttgagtattccttatccaaaatgcctagaaccagaagtattttggattttggaatattggcatatagatgagatatcttggagataggacccaaatctaaacacaaaaattcatttatgttttatatacaccttatacacatagcctgaaggtaattttatgcaatttttaaataattttgttcacggaacaaagtttgtatacattgaatcatcagaaagtgaagacgttactatcttagccatccatgtaaacaatctgtggttgtttgacatcactgtcattcctgattctgaatttatataagcaatcgttttcttacactaattcacacataagtacttagtaaaaaatgtaacatacatatccatgtatgtatgtcatacatgtacagaaaagatacatcacagctgaagggggctaggaaggtctcttttcccttgggggcactgaataaataaactgcattgtgtacctgcgtttttactgcaacctgtcccatgaggtcaggtgtggaatttttcacttttggcatcatatcaatgctcgaaatgtttcagattttgaagtattttgaatttcagatttttgccttgctttttgggacggagtctcactctgttgcccatgctggagagctgcggcacaatcttggctcactgcaacctctgcctcctggattcaagcaattctcctgcctcaccctcccaagaagctgggattaccagcacctgccaccatgcccagctaatttttgtatttttagtagagacagggttttaccatgttggccagggtggtctcgaactcttgacctcaagtgatcctcctgcctttgcctcccaaagtgctgggattataggcagcaaagtgagataccgtacctggccaaatttcaaatttttggattaggaatgctcaacctgtatgagaaaggatactttttccccaactttgccaacaaagtgtatagtgtatagttacgctttgtaatttgtgcctgtctgatggctgagaaattgtatattaatgtaactttaattacattccatcattatgaataaaactcaacattttttcatatatttaagaatcatttttataccttgtgaattatctattcttttttaaaattatttttctatggtgtttttcccctcaaagtttaagtttttaacatatatatatatagatatatatggagtattagccaaatattgcagatttttctcttgatttctttgttgaatttgcatttatattttttgccatgaaaagattatttttatttagttcaatttgtcattctttgattacatctggattttgggtcatagttaaaatgcttttctctacatctaggttatggaggtattcacctatgatttttttttcttattcctttttccacatgttctaattacctatgattttttagtacttctatatgtccatttttgtatatctgtgatttatttggagtttatttttatgtatggtgtgaggaatagattttgtctttttccacatgactatgcagccatttgaaaagttgtttgttcttttttgcttgagaatggtgtgtatgaatattttctatgttttacaagttgataagaatttgtctttagcttttatgtttgaaggatagtttcacctaatataaaatccttagctcatactttttctcctgatgagcatcttgtttatgttggtgtttgtctattatgtcctgtaacttatccagaatgttagaattcagtgatttttttcattgctaaacattgctttttcaatatttagatttaagtcttttagttcttaaaaaatttgttgaattttactttaaaatattttgtttcattgttttggtttttttttgaggtctttagttatgttgaatatctatatcttctctagttatcattttgtctaaccattttgtctttttttttcattttgcttgattttctcatttatgttctttatttccatctatgtgttttccacatttctcttttctcctatgcatcttctcattttgtcttcatatctgtgtgtgttctttttaggaggaggttctagccctcctaccttcccgtctgtgggttctcttgctttacctactcctcttgtttgattattaccttcttttgtgtatctattctttcagttcttttatgtctgctttgaggtattccttcctggtagcacttgtctaatgttcgtgtttgtttgtttgtttgtttttattctttaagacaggctcttgctctgtcacccaggctggagtgcagtggtacaatcatggctcactgcagccttgaacttctgggttcaagtgatcctgtgcctcaccctcctgagtagctgggaccacaggcacatgccaccatacctggctaatttttattttattatttgtagaaacagartcttgctatattgtccaagctggtctctaattcctggactcaaacgatcctctcatcttggcctcccaaagtgctgggattataggtgtgagccaatacaactggcctcttgttttgttttaatttatggtgttcaattataattttcatctgctttgtggcaacactgttctaataagttttctttgtctgtaggagagttttgctgttctttttcatattttccccataaatatctggatgctgtgccagcgcgttttttgttacttatttttttaattagttgaattttcctgggccagttatttgaaggagaatgggaagggtagctgtgggagcctcgaccagggttgcctttcatgctaattcagttataggcttgccacagtaataggctgttgccttttgtaatagcactctgagtagccatgccatctctgcctctttgatcttatcttgtttaggacaggggagggtggattctaatgctggcttgagttctttttttcttttattggcatctgtcactgaaggaaacctttcttccagtgtgaccccttccctttttgaaggtgtgtatttgctagtattctctaagatctgccacctctaggccgtaccagggcatttgttcacacactgtctctgcctcctctagggcttggaccttgttccttccctgtcaggatagcactttcttattccgtaccaccctttcattctgggagtgtaatttgcctggaaatttatgaaattgactgctactaggcccccttagtactctctgcccctccctgttcttcccagttaaatctgtttgagattctactgttatgttttttacgtgtggtgtattttttacgtaatattttgtttatataataggcagtaccaagaagcaagagagacctatcttgatctggatagtaaagtgaggactttaaaaaagtttattaaattactgggagaaatcatggagcacagattcmagacatatcaacaatttagaaggtaagtacattgaaaaatgttactatatattatacatttttgtgtttctctgttttcatattatttrtataattctgttatagcagagactattaatgcttgctttgttattcagttcttaggattctctaatttaatcagacaattccgaatctgaagggctctttatggtgagcttatccaacttttccactctgttagatattctttatgcttaataggtcytttatgcttaaataggtcctttgaaagggaactcattggttctaaaatagcttattttacccttgactattgcatgtttttaatggatacaagcatttggtaggaactataaaggtaatacctcagttgatttaccataatctactagaatgacgtagctccatgaatgtagaaactctgttttgtttactgctgtatctctagtttctataatcatacctgatacataccaatatacattggttggataaatgaatacagaattagggaaactggatattaacatatccagagatgtacagactcacagagatagattgactccaactgatcacaagtgacagaaataaacagaggataattgatagggagggacggtcctttaatatacatgaatccgagacagccctagtccttccatttgcctctgtttttctccaggcaaattccctcagtaatacactttttaaaactgtctttacaccaaaaattctaccatcttaagcttgtacaaattaaaaaaaaaaaaggtacctagctcttatattccttagtgaaactacaggttagtttttgaaattcctgtttcagttttacaggcatattagtagggcttgaattaaataggacccatttttacccttttgaggctacttttagccttgttagatgagattagagcagccgttggttgtgggctaattttttcctacctctgaggcagtgctattttgagtactctaccgataccttgtaaatcacaaggttttcactctggccaataagaacatgaactattcctggtcgtgtgtgagctgtcggaattacttctatttcctttggatatttcttttcccagcctcaaatggtgtcctcacacctatgcactgaccagtactcagctcaagactggagcagaaccctttatagatcctctggagtttattttgcctccccagattcccagctccagctcctgaaacaagagcaacagctccactttgatttctactcctttgtcctctgtcggtgaagagcagtgtggggcattggtggggttcaatttgtttcctagaactagcaggcagttctagtcaaatgacctgatagtcactatctgatagccagagtgtgaaaaccctcagagtttggaagaagttaatttcaacccccttggatgtccttgagggattcagtggaggaagtgactgcagatatggtggaagtggcaagagaactagaattagatgtggagcctgaagatagccagagtctgaaaatgcttgttttatatattttgtctcgttttttagtttcaggcagaagaataaacccaatctctattactacataaatctgttccagatgcagtaagatttatttttatatcattactcagaaatttgtatttaaaaggtttttttaaagtactgatcttacagtttacaggcatacctcattttactgcagttcactttactgcactttacaaatatttcattttttacaaattgaaggtttatggcaagcctgcttcaaccaagtctgtcagcaccatttatccaacagcatatgatccctttatgtctctgtgtcatattttgtttaatttttgcaatatttcagactttttcattattattaatctgttgtagtgatctgtcatcagtgatctttgttactgttcaaattgttttcgggtgccacagactgyccatataagacagcagacttcatcaacaaatgttgtgtgtgttcttcctgctccactgactggctattgattccctcatctctctgtccccttgggtctccctattccctgagacacagcaatattgaaattaggctagttaatagccttacagtgacctctgagtgtccaagtgaaaggaagagtaggatttctatcactttaaatcaaaagctagaaatgattaagcttagtgaggaaggtatgtcaaaagccaagataagccaaaagctagacctcttgtgccagttagccaagttgtaaatgcaaaggaaaagttcttgaaggaaattaaaagtgctattccagtgaatacactaatgataagaaaattaaacagccttattgttgatatgaagaaagttccaatggtctggatagaagatcaaagcagctacaacattcccttaagtcaaaacctaatccagagcaatgccttaactctccaattcgatgaaggctgagaaaggtgaggaagctgcagaagaaaagtatgacgctagcagaggtttgttcatgaggttgaaggaaagaggccgtctttgtaatataaaagtgcaaggtgaaacagcaagcgctgatgtagaagctgcacattatccagaagaactgactaagataactgatgaaagtggctacactaaacaatggattttcaacacagacaaaacagccttgtattagaagatacgatctacggctttcatagctggaaaggagaagtcaattcctggctttgtaggacaggccaaatctcttattagaggcaaatgaagctagtgactttaagtttaagccaatgtttatttaccattctgaaaatcctaggacccttaagaattgtgctaaatctactttgtatgtgctctacaaatggaaaaacaaagcctgatgagagcacatctgtttatagtatcatggattactgaatattttaagcccactattgagtcctacggctcagaagaaaatatttctttgaaaatgttactgctcattgacagtacacctggtcacccaagagctgatatgatatacaaggagattaatgttgttttcttgcctactaacatctattcgtaacccatagatcaaggagtaattttaactttcaagtcttttatttgagaaatatattttgtaagaccatagctgctgtacgtagtgatacctttaatcgatctgagcaaagtaaattgaaaaccttctggaaaggactcatcattctagatagcattaagaacatttatgattcatgggaggaagtcaaaatatcaacaacagtgtaaacaaaacttttgtatgcagtgggaaaccaaaaaatgtgtgtgactcactttattgcaatattcgccttttttgtggtagtctggaactgaacctgcagtatttctgaagtatgctgtattaccttcatatgattcttcaccactgacatatttcatattgtttacccagtcttagaaggggagtaaaaatgacctaatttttaaaattgtttatgtctttactctggagaactttgccattttatgacaacagtctcttttagacatcccatgaatggaagcaatgaatgaatacatatctgtattgaaagaaaagttaacagaaaactctgaaaaccagctagcagtggttgctgtggcagcagaaggaaactcaggctatcagtgatttctagtgtgggaatttaatgcagttcagggagggaaataggaaggaaaagagtaccagagaaatgagccttaggtttactagggagcaaagatgttatgaaaccacagccagtgacttaccatgcagattttattttctaaataccattccccactaaaaggaaccagggctccatggagaaatggcgattccagagctgggcagggaaggtacagatgagcctcatactatggcagagaggaaggaagggctgagaaaaaaaargggggacacatccagcttgaaggggtgcccattggaaaaatctaggacagtctgaggatctcaataaggatagtaatagatggtgtgaataatgtaaaaataaagccaatgaatatcagactccctaatctattctgataaatagaaagttagataaggaaataaagaactgaggaagaagggaaagttccttacagtaaaatgccatctaatatatagagaaggaaagatagagtttgcattgtgccaagcaaagtgtaaggcattagaggtacccagtgcttaagagagtgcccttagcttttttgctactgtgaagttagaaggaggcaaataaatagatactttgtccatttatcttgtcaccattacagttaatcctctcaaggacaagatacctttataatgtattagggtaatgccttagattattaattagttgaatgactgatgcattcctaagcactgactgtggtataatgggttatattaaatgtgagatgactctttaattcatttcattaatttttttgttataaaagtaaatgaactggtgaaagtgtagggacataaatgaatataaagacacaaggcaaaaaatactacctaaaactcaactattaaatgagtaaccaatgtttacattttggcatatttccatctggttttctcacatgcttagatcatgctgaatatagtttttaaaaaacctttgccctctttttaatgtgcctaatttttaaatttcaaggtgtttgactttacgatgcaaattatactttgacaacttactatctcagcgggcctattgtggaaaaatgaattttgaccacaagaatgaaactctaagtatatcagtaagtatcctaattcttttcatcctaatcattagaaaaactagttgtttcttttcttttctatttttgttgggttttttttagaggcagagtcttactctgttgcccaggctggagtgcagtggtacaatcatagctcactgtaaccttgaactcataggctcaagcgaccctcctgcctcagcctcccaagtagctaggagtataggtgcatgccaccatgcccagctaattttttttttttttttttttccgtatagacaaggtctcactatgttgcccaagctggtcttaaactcctggcctcaagcaattctcctgccttggcctcccaaagtgctgggattatcggtgtgagccaccatgcccagcctgctgcttttcttttgataaaacattgataaactttaacctgttgtctttgatttttaagttaaggatggtctttgccaaggtgttgaatttaaatcratcttactaaataaagctgctagcgtagattttatttttagacaaacacattattttcttagggtgataattgggaagtttttttcagtgacaagtatttaccttgtctttctactccactagttcccttttaaaatttacacagcattttaaattatttgggactttatggaaagtacatagtctccagtctcctaaaaggaagcaaagatggttcttccccacttaattgtgtttatactatttacttctgaagttgtccctagatctggccacttttgagtaaaaaaaactgccgtgttcaacttgatttgatgggttctttcatagtcatgtgttaaaagagggcatatggagatatggcattaaaaaaaatgtgtagccaggaggtcaggaacaactatccactctaaatattctggggcagaattttcaaataattacctactactcttagttaccataaatcttatcctttcattttaatacttacaataaatgttaaatttttggaacrtcttttttgtttaaaagctctgcattttaaccatattagaaagttaacttttactctctctttaatttctactggtagatcatgggtaactcctctttacctgcctttggtttttaaaagacccatttattaaagatacaattttgaaagtattgggaggaattgtgcttattgatagggaaggtagtatgtcatggtagtctattgttctcactgcagactataaaaaagccagggaaattacaaaacttttatttttaaagacattggaaagctgtctaagcaataatgagtagacaaattggaattccaagggataggggagcctgtccaaggtaagctgacaattgctggacgttttctttcctgggagtgtttgctgattctggactttgagtagtctagtagtagtaggagggctgayaagacagagtagaaacttgggaagggaactgctaggcacctaactaatatttcagttagtcaattcctgagttctgatgttgtgcacagttggcccaaggaacagttatgaatgataaatggactaagtcttaggaaagttgcaatttaagcccaacccagctttctcccttattgactgtgagccctatcatacctcaagcctaatataaggaaagggggcccctctttagtgaaatattgtaygtttggagacgccattgttcttttamacaaaatatcaagcataaggtaataaagactgcgtgcttacccctaagatcaggaagaaagcagttctgtccacgctcaccatttatattcagaagtagaactaaaggttctagccagtgcagttagcccagaaaaagaactaaaggcatgtatattggaacagaagaagtaaaattcttctgatccacaaataatatggttatctctgcagaaaatctgatggaatctacaaaaagagctactagaactagttgaagtcataactagcaaggttgcagacacaatcagtatgcaaaaattaattacatttctatgtacttgcaccaaatgattagaaattgaaattttaaaaaatactatttatattagcatcaaaaatataaactacctagggaaaaatctgccagagatatttaagacctgtacactgaaaactactaaaatagatgctgagaagctaaagaagacctaaataagtggagagatatagggtgttgttagatcagaagactcagtattattaagaagtaagttcttcccaaattgatatacagactgcctcaactcaattttcattaaaatgccagcagacgtttttgtagaaattgacaagctgatcctaaaattcatatagaaatgcaaagggcctaaaatagccaaaacaactttgaaaatgaagaataaaattggaagacttatcaaattgtacactttaaatatatgcagcttattatatttcatttatatttaaagctgtaaaaattgccacatatatgaagaagcatggaaaggtgattgataattttttttaaagtaggaaatagaaccagactaccagatgataattacaagagaaagcagactagtatttttaaccatgattaatttgttaaagaacatagagttaatcataaacaaaatggacaaaacagatccagagtttcaacatagaattggaatccacaatttcaatacagaattggaagctacaagaatattctaaaactgaaaagtgcagcatctgaaattaagaactcattggatggatttaacagccaactggacacaacagaagacacaattaacaaatcaaggcaggtcgaaaggaaatatctaaattgaacagcataaaaacagaaaacactgaacagagtttgagatatgaggagcacaaccagcaagtttaacataattggagtcccgataggataraacaaagaatgagcagaaagaatatttgaagagagaatgtttgagaattttcaaaactgaaatacatcaatctagattcagaaacctcagcaacctacaagtgaggtaaatataaagaaaaccatacctgaaatttatatgatagtcaaatagctgaaaaccaaaaacaaagaggtaaccttacctttttgtaagtagcaagagaaaaaatatgcattagtttcgaaagagcaacaataaaaccaaaggcagagtttttaacagaaattgtgaaggtaaatgttacctgacagactttaaagtgctagcagaattggttttaaaaactgatatctagaattcaataactagcaaaactacctttcaaaaatgaggatgaaacatcttagttttcagacaaacaaaagctgaaataattattcttcagtatgcttggcctacaagaaatactaaagaacatcttcagatgaaagaaaaatggtcacagatggaaacatggaaatgcagaaggaacagagaggaatgcaaaaggtaaatctatgggtaaatacaaaacagtttcagccgtctaaatcaacaataataatattgctgaatagacacccaagtcttgaggggcttagaagctgtaaaagtcaaatatatgacaatagcacaaaaagggaatagaagtacatggagttctaaactgttgtaaggttcttatacttttcaggaagtaataccaatactaatttaagataaactaatacatcagcaatacatattgcaatctctagagtaaccactgaattttaaaaggatgtataattttaaagctaacagagaccaaataaaaggaatggaaaacaaaaatactcaattatatgaaggcaaaaagggaagagaaataaagaacatatggaacaaattgaaaggagatgcatggctcagatctagatatatcagcaattacattaagtgtaagtgcactaaattattaaattaaaaacaggctgaaaagaaaaatacaaaaactaactgtatgctgtttatcaaaatacaccttaaatattaacataaggacagagaagatcctaagtaaaatatggtaaaagatacaccatgaaaacattagccaaagggaagctggttaagctgtaataataacaaaatagactttatgcaagaaatattactagaggccaaaagggccatttcatggttataaaagttattttaaaaaatttttaatttgtatatacctaataacatagcttcaaaatacataaaaattgggagaactaaaaggcaaagtaaaagaattgacaattacagttggaaattttaataaacttttctcaataatggatagaacaatcagattaaaagtcagtaaggcaatataagatttaaattacacaaccaaattaattggcagaactatagaacattgtgccaaactaccacagagtgtatattgttttgaagtacatgtggaacatttaccaaaatagaccatttcctggctataatgcaaatgtcaacaaatttcaaaggattgatgtcatacagaatatattgtaaagtggaattaaattagaaataacagataaccttaaaacttaatgaatgttagaaaattaggcagcacatttctatgtaatctgtaggtcaaaaaagaaatcaaatagaaattagaagataattttgaatcaaacaacaataaaaagaaaacatcaaaacttgtatgatacagccataggatttctcagaagggaatttatagctctaaatatatacattagtaaaaatggagggctgaacattaatgatctaagttctatctcaggatgctaaaaggaaaaaagccyattataaattcaagtagagagaaggatacagtgatataagagcagaaattggagagtagaaagcaaatgtacaatagcaatgaaacaatagacacctgaggaggaccttacctgtgtgcataaatcatacatatatgtaatgacaggactccactgcaagcctgtggaagagggtggtcttctcatgaatggtgttaggttcaaattgttggatatccttttggtaaaataaacagtaagcggccgggcgtggtggctcatgcctataatcccggcactttgggaggctgaggtgggtggatcatctgaggtggggagtttgagactagcctgaccaacatggagaaaccccatctctactaaaaatacaaaattagctgggcatggtggcrcatgcctgtaatcccagctactcgggaggctgaggcaggagaatcgcttaaacccgggaggcggaggttgcagcgaaccgagatcacaccattacactccagcctgggcaataagagcgaaactctgtctcaaaaaaaaaattwaaaaaaaaaaawttttttttaaataataaacagtaagcaaagtttgaccccctaactttatatacaaaaagtaatttagaagttgatcatagacctaaatttaaaacaagcttctagaggaagagaatgtcttcatgtttttttgaatgggacacaaaaagcaacctactcaaaagaaaagattgataatttggactttattaaaattaagaacttcatcaaaaagtaacattaagtgataaaagaagctacagactaggaaaagatatttgtgatgcatacatgcaacaaaagacttacctagaattaaaaaatagtaagaaagagactgacatcacatttaaaatagtcaaaaggcttaaatagaaaccactttaaagtatctaaatggtgagtaaacacatgaaaaagcgctgttagtcatcagagaaatattatttataccacagtaagttactgtcacaccgttatgatgatgatgaaaatgaacaagactggcaatattttgtgctggtgaggatgtggaattgcaactctcatatattgcttgtgggagtgtaacttggtcaaactaatttggaaacctctctgtcgatgtctgttaaagcagctccattcttgggcataaacccaagaaaaaattagtgcttattttctcaaacagatatatttgaaaatgttcaaagaagttttatttatcatagcccaaaactgagaaacccagtgtctacctagagtcaaatggataaattcgggtatattcaaacagcgacatactgttccgtaatgaaaataacaaactgctgttgcacacaacatagatgatctgacaatggcgagtgagagaagccagttacaaggatgtacatagtgtatataaatctgaagtatatgtacaaaagagtatgtgtaacctctacatatgaagttcagaaactgttaagagtgattttgggtgattaaaatcagaataatagttaccttttcagggatggtaatatacaaatagtttgcttagrtgctggggatattcttgtgtcttgatctcagtagtggttacccaggtgtgtgtatgtattcatgtaaaaattgagttgtacacttttgtgttctttataaaaactattactgtaataaaaaaatggagaaaaaggaaagtattagaagtgcttgaataatttatctccacagctaactatacaaaacaactcaagctagactttctgatgttgtcatctctgtttttcaaaagaataccagaagaatctttaatttatgtggccttcattttactaataaggaaagtgacactgaagttccatgatatgttagtaatagatgagagggtaaaagctagatcccccagatttacttggggcttcatttattaaattggtgcaaaatacagtgtgggggcaagattgcatcttggtatttagttcttgcttttttatrtgggaatttttatttgcttgattgttggtttggtttgtttagacttatgataggtgtaaaattttagagtatgtttagaattggaatatttaccttagaatattaataatgttaatattaaaaaataaatgaatgctcacttgagagcagtatcacttttcaaacagtgaattgaaaagtattggaagctatatgtctgctattgatatgaaactagttgttgctcttttttcaccttgtatgcatatatgtatatctggaattttgtcaaaaaaatagaacccttcctaatgttattgtatattctcaggaaattgtgtgaatgatttgctgttaattttattagttgctttcttattgtttccatggacctttatttagtaaataattttttaaagattttatttagcttttaaaagaaatttaaaattatttaaattttaaaagattttatttagaattcaaaataaatacaatacaaaagaaatttttttttttttttttttttttgagacggggtctcgctctgtcgaccaggctggagtgcaatggcatgatcttggctcactgcaacctctgtctcccaggctcaagcaatcctcccacctcagcctcccaagtagttgggaccacaggagtatgccaccawggccagctagtttttgtatttttgtgtgtgtgtgtgtggagatgaggtttccccatgttgcccaggctggtctcgaacttctaggttcctttaaaggattcctaaagcaatcctttaaatcttttaaaagatatatttcaatgcatttctttggccagtgtaagctttttaaagttgatttctgtccttttgacgttcagtaatcacttttaatgcagcttaaccactaggtgtcactataattcaagtaacaaaaaatctcagcacttttaaatgtttgaagcttaagtttcagggttaggtgtggtggcttacacctgtaatcccagcactttgggaagctgagatgggaggattgcttgaaccgaggagttcaagaccagcctgggcaacatggagaaacctcaactccacccagaaaaaaaaaaaaaacacaaaaattagctggccgtggtggcatactcctgtggtcccaactacttgggaggctgaggtgggaggattgcttgagcctgggagacagaggttgcagtgagccaagatcacaccattgcactccagcctggttcaacagagcgagaccctgtttcagaaaaaaaattgttttattaacattttttaaattagcctttggaattttggtctgttagattcagttatggtgaaaaaggttttcakttttattctcttgcagtagagcaagaagtaccattatacgtataactgttttactgtaaaattttttgaaaggaatgggtatttccaaatcactaagtcattttattcccatctcctttttactgtaaatctattatttatctgtcttgtaaagaatttaatctggcctttcatttacttagttttttgttccttgtcaactcattctcttcaaggttcagcctggagaaggaaataaagctgctttcaatgacatgagagccttgtctggaggtgaacgttctttctccacagtgtgttttattctttccctgtggtccatcgcagaatctcctttcagatgcctggatgaatttgatgtctacatggtattgttaaattttaaattctctttttcatttttttgtttgtttgaaacatgtatttctaaaggaaggaaatctttctttagttttacccctaacaggaaagatcctgccctgactctttagtctgtgaccagtagtggggaagaactaaagaactagagttctctcccttgcttctaggcacacagtaaccctagagaccctggaggggtcctcctcttctcgcccagcatggatatccgtgccttccatcatatctgcgttttctccctcaccctctctcccagcttattttcatcaacccataaatatgttcagactttttgttttaatacaaaattataacctgttcaccaccctggctttgactcaccctagccactgtttactgttccttcatacccacacatttcagaacaatgtacagaacataagcgagcaagaacttttgaatttccagttaaaaagcataggatttgagacctacctctgacaggcaaaatatctctacttattgggtctcaatttcttcatctacaaaacaatattattaccaattcctacctctcatggttagagtgaggctcaaatggtgtctttcatacattatacttactgtggttcaggcatatagtaagttctcataaattagcaattattttcttcttcatatctcattgtttgctcaatctactgtaatctggatgtagatgacactactctagcaaaacttgtttagcaaaggttataaatgagctttaatcttaccttattttttgaagtatttgacaccacagacctatcctccatcccttaaaatgtcttcttaccagctgccaccctctctttcctggttttcctgtttttctattatttgttcttaatctgccaagctgcctcccctaattctgttgcccttaaacgtttgagatctttgtttgcttgttatagtgttgttgattttcctgaattccatatcctacttccccctacaaatatacacatatcacagtccccaaaactactacctgcgtatggacagatacctatcaactcatagcaccacatcctgacatctctcctgtactctagacccagatgccctactacctattagacatcacctggtaaaccaccaatatctgaaattcagcagccccgaggttgaaagtgccttcatctcaaagcctctttcttttcctgaattccctaccttgattaatgcaaactgtcatttccagcgcagtcacctacctttgacatctgtgatttacctttgattcttccttgttcaagtctgacctctgtccgcttctcctttaagaccgctctttggtctctgccctcttctcctttctcactgatattcttcctctcatccccttatcttcgcctcatacctgtggtgatagcctcttctccggactcccaggcttgcatgtggctccttcttcggtccgtcctccaccattttggcaggtttacatttctacagttgatctgatggtggtcattcacctatgtaaaaccctttggaggttattatatatggaataaatgtttaattctgtagggtagctttgagacccttcatgatatcgtacctgcctgcttttttcagctgttctaagctatttgtaattctccaaacatggtgcctctgcctggtatgccctccttaatcacatgtcactctactcatctttcaggacattgttcaaatgccacttttatgagacttctgtgaccaccataccctatcaggcaggatgaggaacttctcagaacttcctttgcaccaccttacatcaactcataatatatattacttttatacttttatttaagataaaaatataaaaatgctttatattattatataatattttatactgktttttattctgttgcagttgcccatttttatatctgaatcccctaccagattgtaaccattttgaggttatcagctatgtctgagatgtttatgtctcctaatgcctagtctataatgaccgtttartaagtgtgtattcgtgaatcagaatttatacctgtgagtgctgtataatagttcagtgtcaatttttttctatgatactattgctgaaaatgggttagatattcctccaagaattgtcttcagagctaatcacgagtcatagaagatgattattctttccatgcagtgtttttgtccagaatggtgctgtgcagtcttatcactcatcttgtatgtcagatttaattctaagcagctcctttctctttcagaaacttagagcttcttaatcagagtggcactttgccccaatgaaattattcagaagaatgtatccaagttctgtgagctaatccaaggaaaacaaatttttttttggtactttggcagttttgttataaaataataggcctctcacagcagatatgcctgatggaattgttataatcagagccattgagcaatatagccaggatgtgtatcccattttgactccacagcccttgttctaaatcaccatgctgtattgccacatacagttttattttttatttatttacttatttttttcaggacacagtctcgttctgttacccaggctggagtgcagtggcgtgatttcagctcactgcgacctccgcctcctggattcaattgatccttgtgactcagccacctgagtagctgggattacaggtgtgcaccaccatgcccggctaatttttgtaytttttgtagagactgggttttgccatattggccaggctgatctcgagctcctggcctcaagtgatccacctgcctcaatctcccaaagtgctgggattaaaggcatgagctgctgcgcccggcaccacatatagtattaaattaagacctttaaaatatacatgttcatatgtcaatgatttcaacttttaggaattttcaagggaattgaggaacactttgattttcttttactgttacttaactcagaaaatgtagccacaggtctagaccatttaatcccaaaacctattataacgaagcattattctttgtctataccctgatgtgctatttaacttatttaaagatataattgagaaattggtctgtaagttcaaattggtttatattgtacaaatggtagaggtaatggggagaggcagactttttaaaacttaacctttatcattgagggaaaatttgagagacttaatgaatttgagactagccacttttgttaccattaccctgactcattaaccattactgtacaaattagatttattctctaacatttagttgtgtcaggagaatattttctgattatttcaattgctacacgtatttgagggagggggctgtgtatacaaatattttgactatagaaattacctgaaagacatatttattcagttattgtccccgaagagtttctcttttttcccttagagatgggctttcactctgtcattcaggctagagtacaatggtgcgatcatagcttactrtacccttgagttcctgggctcaagtgatcctcctgcctcggcctcccgagtagctaggatgacaggcatgcaccaccatgcccaacttttttttttttttggtagagacagggtctcgctattatacacaggctggtctcgaactcctgacctcaattgatcctgtgacctccacctctcaaagcattgggattacaaacatgagccactgcacccagccaattttctcctaatagtttctggtatttcttttccagtataatagatttcttggacatcatagataatgtaatgactgatccctggatgaaaatccaggagcttgtatcagcccacagaatgctgcttttacagaaatgtgacttacacaatagcaatcctaacttttgcctttgtttttcaggatatggttaataggagaattgccatggacttgatactgaagatggcagattcccagcgttttagacagtttatcttgctcacacctcaaagcatgaggtaactttttaaaactttctagatacatatcaagtatataaaagggggaaagaaatcttttacaattttaatttttaaaatacaaatacatacaagaccaatgaaaataaaaattagctcccctactggttcaggagatttgggatgtttttctctttttgagatatttaaaattttacttgtattacttccctttcataactgaagcaagttgttactattctgttttgagtctgcttctttgtagttatcatgacaaactaaagtaatataattttagtaattctgtttggactaaaatgatttatgatttccctaatcttgcctcttttctcttggtgacttacaaatgtcaatctttctaaacaaagagctctactctgctgtcagtcagtatttattgggtgcctacaattgtcaagcactatgtcacttagagttaatattctgtctctaaagtggccatgtgattatatggggatctaaatttgtgattgggaatatccaggtaactccttccttgctagacaataacagaaatttaaaatagttgatatataaatctctttcattttcttttcctccaaactgaaaacccatgggatctagcaggaattaatttttaaaatggaaaacaaattatttccttattgcaaatgatgtttctcctagaactctagatattagatatatcccagataaaagccaaatatttagctttatattttcatgaggtaatattagaattttttttaattggtaaaaggtttcttggaaatttgagtaattgattttgcttcttctagttcacttccatccagtaaactgataagaattctccgaatgtctgatcctgaaagaggacaaactacattgcctttcagacctgtgactcaagaagaagatgatgaccaaaggtgatttgtaacttaacatgccttgtcctgatgttgaaggatttgtgaagggaaaaaaawttctggactctttgatataataaaatgagactggaggcattctgaaatgaaagaaactcctttatatatccaaccacaatcaaacatataaataagcctggaaaaccaactacaaccwgcaatttaagattactattactttaagaaaatcaatttcatagtattggttttaaatctttttaagtttttttaatacgatctatttttataggttctttttcagaagtaaaattttgtacatatatacatgtacatatctgtttagtttgggttcatttctataacattttgtaagaaaataaaagtttgagcacctgattatatttagttttgcttttccagatattacattctatagttaccaaaaatggttgaagggagggatttctcattgcagagggtggggtgcaagggaataagacacttgtacggaacactgaagctttgccaacttctacacatgccttttttgcagtcctttaactgtccaccctaccaagagcttataaccagtatcagaactggataatgacgcagtttttcactcygacctccatcatgcttgcctgatttaaaagccctcagtttgcagtccagggactgttcaggcttgtcctcagctgagaggacacaggctagagggactgtgcagaaccaggctgggagaagggctgggaaaactgggagtggagggtggatcctcatggagcaggagagtagctcatggctccaggagcctgaggccatgcagttgatggtgagctgacatcaattctaagactcatcctaattgaggggtgttaaaaagtgtgctgcttagaatgaccaaatatagttattgtaaaaaatgatatttatgaactttttattttagaaaacatgaattttattgctccctgtattatttgtttgatactaggattcatgctaaactttttaagaatgtattggatatcaagaagcattccttacattagtagcaataaatattagaataaatatgaaattgaactattttcagaaaaagggcagtatattaagagcagggactgttctctagttattgaggaaaactggactttgtttgtgtttttggtggaggaagaagtttaagatactttagtcttaaattgaggtttgccaaatgagaagttcaaaaacttgggctttctaatcagaatttccaggaggaggaaagtgtgtgctgaatattttaaacatttcccactgatcatacaaagtctgatttttaaatttacacttataatgcctttgtattaaaattatttttaacatgtgcttttccaaattaaaaatgaagtagagtataccaaatgcataaactttcattagctaaggaactcatgtctgaattttgttgtagttttgaatgttgtgctctttcatacagaaygggaaacataatcctcaggtatcccagcatctcttgttgaattgaagattattcattgctttggcctcacaaagttttgatttcaactatcataagtgaaaatatcttcctttaatgttctaagtagtgataatattactagaatgaaagaataaaaagaaattgttcttttaaaatatgtgtaacttctaaaaataaaacttaaaatttatatgtattaaggtcatgcttttgtgaattggggaaagtaattgactaaattgatcctccatgaatcgtgacctaaatacatcacacaggtgactcttcaacccctagtttgtcatcaatgcagctatcactgaatgaagttccagaaaataataaaggcttacttggatcttaaatcttaaccttctgaaatctttgggagtagaaatgattaaaatcattcttaaagtgacaaatgtgatgagttttcataaaccaaagtgtaaataatatagttattcaaattagtgatcaacactaaagattcagtaattgccttcttaaatattttccaagttttcgtgtctcatttcttccatttcctagtgcttttttgttttgcgggggcaggggggcatgtcttcctcatgtctgggctgtttatgagaccaaaatgtttaaattctgtgtagaaagctgttggctggtagtcatgaattggattagaaatgttgccgactctgatgaaaaccaagtggtctagaatatctgattaaaagttctcctgagtgcaaactagatgcagggtgtgggggagaaaatgtttataaactttgtgctggggcaatacttttttggttacatttatgacttagctatgcatctacatgtatgccttctactttgaccagttcagattttcaggagaacttggtttgaaatttgcagtcctaaaagtgtagttaccagtgtttcatggcttgaactgaatgcccatggacttgaagatatatcaaaatatttataggaacaggttttgttacttaagggttggcaaagtaataatgtggatataaataagctgtttctttgagtcagcaaataaagttttctaaagcatatataatattgatagttagcatgctaattttggcattggcgtctggatagaatccatgcaaacaggagtggcctgagtgtactcactaattatagcaagcttaacagggctttttctgcctaatttttctccagtttgaaaatgtagagattaattcattaaaaaatgattaagttcctgccatgagctagggacttttttaattactgggaagactgtagtacttaaaatgctacacacatatttaaaaatactaaatctgtcctcatggagtttgaaatctagttagacaagcaataccgtacataatctcagtgactggtaattcttatgaataataataaagcagtgtaaggatttgaaagggcagagaggactgagttttgtttgtttgtttgtttgtttgtttttgagacagagtcttgctttgtcgcccaggctggagtgcagtggtacgatcttggctcactgcagcctctgcctcccaggttccagtgattctcctgcctcagcctcctgagcagctgggattacaggcgcacgccaccacacccagctaatttttgtatttttagtagatacagggtttcaccatgttggccaggctggtctcaaactcctgacctcaggtgatctgcttgccctggcctcccaaagtgctgggattacaggcatgaaccaccgcacccggccagtattttgaatggagtgtcaaggctacagaaggcaatatttgagcagaggcctgaaacaagtgatagaacaagccatgaggaggaaaatgtgcaaggcaaagcttccaggcagaagaaatgagtgcgtggggcttgagataagaatgaacttcatgtctaggaattgtaaggccagtgttgatagagcttagtgaggaaggaggattggtagggggtgaacttcagaggtaggcagaccgagatcattggaggccctaaaattatggtaagtaacagacctggtgtatgcattttaaaagaatcctttggctgctgtgtgaatagattaaagtggagcaaacatggaaagagtatgagcaatttggagacttgcagtggtccaggtaaggggtcatggtgacttggactaaggtggtggagacagaaacattcagatttgaaatagagaggcagcaagacttcccgatgagaatactggagttgtgagagaggaatcaaggataattttcttggggcctgaggcctaaatagctggatgaataatgattcattcacagaggcaggaacaatgcagaagtggagggagtaacagactgccctgtggagagatgaaagctctgggctgagtatgcaaccttgaggtaactgtgtgaatactaaccagctagttaatcacctacttgatgggtaactttacattggtaaatgtaagaacttggaaaataataatataacttaggatactgaagacctgcaaaatgctgggaaaaaattcaaattgcatgcccaaactatgtgggaaacttaattgttttcgaaaaagaagctcaggaaacagtttctcattttacttagaagctctgattgaccatttcttgctagacccctgtacatcctttgccgtgaggctctctgaagatgtctttttaagcctgtgctttacttcttgatgtgatttccaaccgtgtggaagaaataagcatctggactctaagaaactagtttatattcatccagagactgtaaccctgaatgaatgaattacaggaaaaatgaggccttaaagcagtatgatttcccttttaaaatagttaagagttatttacagaatgagaggaaatatggaaacttaggacttctaaatgcagaaagagttgaggctagacaaagtatagaaaatcagacacttggggggttggccaggcatggtggctcacgcctgtaatcccagcactttcggaggctgaggtgggcagatcacctgaggtcaggagtttgagaccagcctggccaacatgtgaaaccctgtttctactaaaaatacaaaaattagccaggcgtggtggcatatgcctgtaatcccagctactcgggaggttgaggtgggagaatctcttgaaccaggaggtggaggttgcagcgagctgagattgtgccactgcactccagcctgggtgacagagcaagactctgtgaaaaaaataaaaaagacacctgggagccttttcccttcagaacagcagcagggcttaaacagctaattaacatggtaattaaaatggcagttgagtgtaagctagaaccagtagaacccaggcccagttgattaaaggaagcccgcagttagtcctttctgaaggaaccgcagtagctggttaggatatcaaggtcagcgaggattcaggttgctgagatacaatgtgtgtttaaatggaactcagtcgcagagggtttagttaaatgtgcacatcagctaatggctaccttcagcactggggcatgcagcaatcacttatttccttttatcttcattctttatccactgtaacaggttgtattttccaaagatggccacaaggataaatcccgcccatgttctcccagaaccttgccttacagagtctaattctcttcttaatctggttagatttgtaactctcttataaccaacagaatgcagtgaaaatgatactttgtaattcccaaggctgggccagaaaggcaatgaaaaggaatgaaagtcccgccttgagctgtggaatacccatgctggagccctgtgctggcgtggaggcagtccgacttccctgaggcggccacaatgagaaagcctaaactagcccatttgaagaaagcctgaggctgcatggacagcgagagatgccctgccagccctcggttgctccagaccctctgtttcaccatctccctataactacctgagaggtcccaagccaggctgcccaagtgaatcatttgagaattcatggcccacaaaaactcagagataattcagtcatcattttaggtcactaaactttgtagtgatttgttatacagtgatagtaactggtatctggaagtataagtaccaaaataaaaataagctatgtggcactcggtggaagggcctcgagactgtgcatgaatctaaagggccttgcagaagctgttagcagaggcctgaagtctcaaggatatttttggggagagctgaaggaattgagagtgggagaaaaggtgtttggcaatactgatgccatggtaacatggaaaataggagatgtacccaataagtaaggtgatctagccaagcagatgtctagacacagtatgaaaaggaccccttggctgctctttgctgcctgtgacacaatgtgagaagagagatgaatgaagaaaagcaattgcatataaaggaggtgagactatttctcattcccagactctcttcaaggggaaaactgattttcaaatacaaaatggcttcagtgcaaaagtccaatccaggatgggactgtaagatcctctgtgaggacctcagaaagatgtaaggcagtatttttagaccttttcagacaggcagcagtctgccttctaaagatgtgcctttcaggttccctccattaaacagtagggcttctctgattattaggggtgttctcacaatgagcctctgctaatggagtggatttcataaactgacacttgagaaacccataaggtttttaaaagaatgtcagcttagaccgaaagacaaagagacagtgcaaaatgaagagtctttctactcctggaattgtataggcaggcagtagactgagaaaactactcagctgtaaacacaattttttttttttttaatgaaaaagaaaggatggcccagagggtagaaacaaacacagaaagcagagcgaagaatcatggagaaaaaaccccagagagtaggaccaaaccctagtcaaggaccttacagggtgtacctggctggatttcagaactgccatagaccagagattgccatgtgctttccctttccccgtttttggatagtgtgtctattgcggttattctaagcctgtaccaccattgcatattgcatgtggaagggaagagaggagataattctctctctctttcacaagcctttggatcatgaagaatgtgactcagtgtgctataattgaagaaccacatctgaggagctttatatgatgagatcttgggcctcaagcctgaccctgaagtcgtaatggtatgagacttttgtggtttcttgggaggggatgaacaatcttgcatgggaaaggatgtgaactgtggccacaaggtagactgtagcagattgttttccaaagatgatggcaacagtatcttttatgccacataattcgtctagaaccttgcctcaccccatcaagagatggagtctgattcccttcttgaatgtggatgggctagcggctttcttgttaccagtagaatactgtggaagtgatacttcgtgacttcagaggctaggtcagaaaaggtgatgaaacttccgactttgcatgaatacttgtgctggagaccagagtccctttgtaagtagtatgactcctcctgagactgcaagcgcagaaatccccaatcagcccccagctgctccaggcccatttcagctccagctgccacctgactgcaactgcatgagagaccatgaggcagaatcatccatttgagcccttccttttcaattttctggcccacagaagccaggaagaataataaaatgattgttttcattttaagccactaggtttgggggtaggttgttatggagcagtaataactgaacccactcccatcaccacccaatcctatagaaaccattataatatggtatttccttttattttatgtgaccttagagttcttttgtgagaatgcatcttttc

SEQ ID NO: 97963 - DNA, 41132 bp, Homo sapiens
  misc_feature (1)...(41132): n = A,T,C or G
accgttgggccggagcaggccagtgccgggcacgtcctgcccatgacagccctgctgccagccgtgggcacttgttcctggagctccgtggctgggtcctgccgtctccgctgctgccctgccctgccatgttcacctccagtttatccagcaatggggagaggggcttcttagatccccctcaggcttttcttttgtgcctttagatatgtgaaatacaacacagccaggcaaagcaggtgccggtgagacacctggctggcccgagctggcccgaagaactgcctgtctgccatgaggaaaacccacactgcgtggtggctgggaggccaggagttttcacaagccggaaacctgttagatttctctacctgacagcaggaaaatctgatgagacccgatcgcatccaggcaggccgtgtgctcgcagcccgcgggttaacacagactccgagtgactccgacgcaggagaacgcggcgaatctgcgtgaggcaggccaccagccttggtgccccggagacagctcccccaacggccatgtgacggcgttgagtgtccgtggtcaggtgtgtgtaagagacgcgcagagaattccacgccgtcccaacctcccagccggaggctctgacgaggcctgcagccacgcggaaagagcaatgaggagcacgtgtgtggggaggaaggcgggttctgaccccgttccttccgcagcggctccggcctggcgggttctgacggaattctgcagcggctccagccagggtcgtcggggcggggtgggtgctcaggggcggcctttgtgttcggattagaagctggtgattgtcacattaagacctctaagctgctgcaatctgagaagatgttacacaaccagggcccctgagctgaggccaaggagggggccaggagagtggcgggaggggccccaggcagggccagagctgcctgtgtacagcaggggagaggggagaaggggtgggcctggtggtctcagccccagggagagtggagtgcccgcccctcccctcccccaggacggctggcccctgggagagcccctgggggagccagtttcctgtaagcagaagggcaagtggttgggacccagaggtgtctgacagttgtggacttagagcccagaggaagggtttggggtttggggctcctgggacgccgcaggcccctgaggacgtccatcaggatcctggcagtgtggaggtgtagggtccagccctacggggcttagcgggtgttttccctgtgtgtggagatgagggattgtaataaataaagacacaagataaagagagaaagagaaagcagctgggctctggggaccactaccatcaagacgcggggaccggtagtggtcccagagggctaggcccactgatatttattgcatacaagacaagggggcagggtaaggagggtgaatcttctcagtgattgacaaggtgaagtaagtcatgtgattacaggatagggggcccttcccttttaggtagccgaagcagagacggaaggcagcaaacgtcagcattttcttctctgcacttataagaaagatcaaagactttaagactttcactatttgttttaccgctatctgctacgaacttcaaagaggaaccaggagtacaggaggagtatgaaatgcaacaaagagtaatattaaaagctaatgattaataatgtttataataatgattgataattgtccatgatcatctctatatctaatttgtattatgactaatcttattccaactattttctttattatactgaaacagtttgtgccttcagtctcttgcctcggcacctaggtactttcgcccacatggaggcagaggtgacaggcgtacagggcagtgtgtctggacccagatggcaggcacgttaacgaccagtgaccagggctctgcccacctggcccggcgcgttggccccccagcgatgtggcttcacgccggctgctttcctgagcgctcggggtttaggtcctgttctgctgcctctgagcacctgtgacctgaaaaggccctaccctcggcctgggtcccttggggtgccactgaccttctgggaccctgaagctgcctgtgtggtaggcgtgtccacccccacacccacccaaacgatgcagaggagtgaaaaatgattcctcgaggagctggtccagggccgggcgcggtggctcacacctggaatcccagcactttgagaggccgaggtgggaggattgcttgagcccaggagtttgagaagagcttgggcacacatggtgagactctgcctctacaaaaaattaaacatagccaggcgtggtggcatgcacctagagttccagctacaggaggctcttacaggggaggagggacaagcctgagctcaggaggtcgaggctgtggggagccccacgtgactacaccactgcactccagcctgggtgacagagcgagaccctctctggaaaaataaaaaggagctggtcagggaggccgagagcaaatagctgctagaatgtggcgctgcctgggacggggagggctgggggcccttggggtggaccaggagcctgagttgagggttaggggcaggtggaggggctgggaagctcggggctgtcttaggagagccctcctgacacctaggccctgggccgggttcctcctggtggaacatcacagacctgagccctcccactcacttttccttggaccccacaggcaaggagctggggcggctgtctgctcccaggctgaggccccgggacgggcccctcctcgctttgttagccggttagacccagggcgggcgcaagcccttggcagtgctccccagcactgccccttggacctcaggggtgtggggaggacagaccagggcaggacccaggaggccacaagggctggtgggggtcatggtcctggcagccccagtcaaaggctctgccctcctgcacccacccccagagggggatcctctcgagggagcatgggccctgtctccccacctgcccttctgggagatcaagagttgctgtgaagtttctagaacagtgcccggcctggcggacgggcacggaggtgcctcctgggtgtgcccgggtgcggcctgacagggctggggtcctgttgggttgtgggcaggtcctcagacggcctcctggctcctgcctcgcccctccccacaggccctgtgccagcggctgtgcaaacagaggccaggaagcgaggtgatgctccctttgtttctggcagagtgtgtggcacctggagctaccttccgggttccatggccctggggccctggggccctggggacagggagggaatgggatgcacagcggccaggggtgttcagcgtcaccggtggaaggggtgaaacctgttcttcctggtggtgagggtttgccccttgactccggaaagcagagaccgtggagcagggcccacttcaaagcacagtgctgggggctgtggcctcggccctctgtggacgtgggcggatgggtggccctggactggtgaaggactggccgggagttctgtagggcccccacctcctgccagcgcccagcccacagtcgaccactgcctgcccggggcaggagacttccttcctgcagccccggacccgggatctgagacctagaagctgactccatcctttgactgctctgttctgagctaggccacccctgcccctgccccgaggtggccctgggcttgcccgcccgcctgcagtgtcggctgaagagggtaacgtgcgtgcgccccggctgctcccggctgctcccggctgctccccggctgctccccgctgctcccggctgctccccggctgctccccggctgctccccgctgctcccggctgctctcggctgctcccggctgctccccagctgctccccaccggccttgggtctggtgggtgtggccctcctagtgggaccaggccacacactggagcacatgggcacggcaatgccaatgccgatggaggcgggttcctgggcatgtggacctgtcccttactcgaagcagctgaggggcctccagccagccccgtccgcaccccaggggttagggctctgccatgggggcgtgggcatctgctctgacaaacaacgtgtgcatttgattggtgttcctgagtcaccgtggaccaggcaggctgccagagcggctgattcttagcggggagctggggccgggcagacaccctgactccctggggctcccagcagggccccactggcaacaggcagcctcctccctctggccgccgggcctccgtccctttcccagcctggggctgggaccaccgctccacaccacactgcactgcccttgtctgccccagcagggggtgaaggtggctggtggctgaggaccccctgcccaggcccacacttcttgctcaggccccataagtcacttgggatctggagagctggggactttgacctgggagggaggcatctggtcgtgaccctcaggcgtgtgtagggaggtgcctggccgtgaccctcaggcgtgtgtccctggcaggttgctctccaccggccccaccgtttgtaacacatggctcggccaaggtgattctggggtaaggacccatgaggcgccatcttctttgttcctaggctgagcctgtggtgccctgggcagggtgggtggaggaagcagcagggaggctccttaatggtggagtgaacacccacacggatgtctctggatagtggaatgcggaggatgcagggcacgccggtggagagctgcccagccgtgccagcaaggccccggcatccctcccacctgccgttagcaccgggagctgctctgctggcccctcccacagactcgggctctggaggtctacagagcagctgggagggtgatgcctaggcgggggcggagatgccaggcccctgggctgcaggtggaggtaaatggggaagggaggctgggggtctctgggcctttcgccagcagccgcccagcccagggtctctgatgccagggaggtccatgtgtgctcggcccctcctctgagcccctcagcccagccttgtttctgcctccatggctatggggcctgcacccatccgagccaggcactggctagggcagggaggctgccttgggctggggccagtcccggaatccaggctcagctggcaccgacagggaggggttgtgggaaggtgaccagccgtgtggagagcttggcgtcggagggcatggtgggcaccagcgctggtgggatgtggcgagggtggtggtgactcatggcgcgtggcccgtagctctgaggagcatttgcgttttcctgtggattcactgtagcgcctggtcacaatgttgcagcatttccctggctgcttgtctcggaattaatatctatttcctgaaaagagaaatgaactttcttgcagtaaaatctaaacaaatatttatatttattttccacctccatgtcctgtttcaaacttattgtccagcccaagattttaaaaagtcagattttcttttggtgtgaagcaggctcaggaggaggaggagggggaggaagaagaggaggacgaggagggggaggaagctgggaattgggctgagctttcctcgctcatccttgcagtggccacagggccctctgccctctcgtctgcgtcaggtcctgagttctgagtccagaagccgtcgctgtgctgttggagcccaccaagcccgtcccttgtggggacagctccctccaagccccccggggggatggacactgagggtggggcaggggagcagggataggccccaggcaggtcctcccagggcctggggaacacaggggcccatcgagggctccccagactccctcagccagttcttcccgagaacagaacagttaaaaccaagccctccgatggaggtgcggggagagggcgtggctcccgtcccaggaggcaggtgagcttctggggattccagttcacctgccccacagccgcaccctgcctgtgcctgcaccctggggagcccagagccggcaggggccgaggcggtgggacctcgggggagctcaagcctcgactgtcccctcgctggaggccagaggccaagatgatgtccwtgctgggcggcttgcagagrtaaggggggcagttggaccccccaggtggacaaagcgcttcatctgtggctattctgagagacggacaggagtgggttttgtttgtctttcgaaggaagtgacttggatttggaggctgttcctactcaggcttccctgaattcacctgtcttggcttcgtttcggaagtagggggcccctcctgcccaggcctggtgctgcttctgggtgtttgggggttctgggatgtggggcccagtgagaaagctgccccccaacactgtggcgtggagacgctcgagtgtccgcgtgacggctggggagggtgagacctgctgggcttgggacctcccagcctcggtctgcggctcaggcccatggctgggccgtgttggtgggagtgccaggcgcttgctggagcgttggtcatgcgtgcgcttcaggatgctcccggggctctgggtggtgacggggaggctgggctctgctgtgctgtctcccttctgtaaacagaggggaggtggatttcttcccagttaggtttggaggggtggtgggtgtggctaaggatgccttgcgttttccttctcctgctcgccatcctgtttggggtgattccagggcagtttgaagccgtccctgcgctggcaggtccctgcctccccggggcgtgtgccgccatgaattcagttaccttcctttaaggggtgacttaagaccagctgccaggacactggctgaggacaccccgtcacagggctgagaggtgtggggccggctgcctggcctggaccatcctagatgccccctcctgtggacattgtgaccatattgtgaagaagaggcccaggggctggggaatcaggctcacttgattagctggtggccaagctagggcccccctggctgccctggggccccccgaggtcggccagggcgggtgtgcctgaccccagctgagactctgtgggtgagacatgggaggcattgcagccgaaggccctcggggagcccagggcacaggctcctcagctgctggtctcactgcctggcaggatgggctcactgcagcagcccatgcaggctgcacgtcccacactaaggccagggagctttggctccgggtgtcccaggcttcattgagcacggcctgcaggagggaagccccgagtcacttccccacagccctggacagcagccttcctgagcctcgcatttattttcctggggttgggcaagtgtgggaggctcacctcgcttgtgtcagcttgcttggcctgtgggtggaacaaatcaacagccctggggacaaaggggacggtagtgtgtggtgccactggcacccacctgggtgattcaaggagctgcccagaacagaggagagactttgcctgcgctagtgaggcctagtcttgaccaccggccacgggaaatccaggccgccgggcaaagtgctcacttggatgcttgctgatcttttgttttgctggtgatgattcaggcacaaaactctgagctatggcacttgggggtgttgcctccctggggtgtggccaggtatctttggggaggaggggactcatgatcagagaagatgtggtacagagcccatgggggtcaccatgccggtgtgaacccccaaaatctgagacaggtctcggttaatttagaaagcttactttgccaagggtgaggacgcgcacccatgacccagcctcaggaggtcctgatgaygtgtgcccaaggtggtcagggcacagtctggctttatacattgtagggagacatgagacatcagtccgcatatgcaggacgaacattggttcggtctggagaggcaggacggctcgaagcaaaggcaggaagactccaagtggggaggggacttccaggtcacaggcaggtaagagacaaatggttgcattcttttgagtttctgatgagcctctccaaaggaggcagtcagatacgcatttatctcagtgagcagaggggagactttgaatacaatggggggcaggtttgccctgagcagttcccagctagactcctccctttagcttatagtgatctgggggctcaagatcttttcctttcacatttccccccgttnnnnnnnnnnnnnnnnnnnnnnnnnnnnnnnnnnnnnnnnnnnnnnnnnnnnnnnnnnnnnnnnnnnnnnnnnnnnnnnnnnnnnnnnnnnnnnnnnnnnnnnnnnnnnnnnnnnnnnnnnnnnnnnnnnnnnnnnnnnnnnnnnnnnnnnnnnnnnnnnnnnnnnnnnnnnnnnnnnnnnnnnnnnnnnnnnnnnnnnnnnnnnnnnnnnnnnnnnnnnnnnnnnnnnnnnnnnnnnnnnnnnnnnnnnnnnnnnnnnnnnnnnnnnnnnnnnnnnnnnnnnnnnnnnnnnnnnnnnnnnnnnnnnnnnnnnnnnnnnnnnnnnnnnnnnnnnnnnnnnnnnnnnnnnnnnnnnnnnnnnnnnnnnnnnnnnnnnnnnnnnnnnnnnnnnnnnnnnnnnnnnnnnnnnnnnnnnnnnnnnnnnnnnnnnnnnnnnnnnnnnnnnnnnnnnnnnnnnnnnnnnnnnnnnnnnnnnnnnnnnnnnnnnnnnnnnnnnnnnnnnnnnnnnnnnnnnnnnnnnnnnnnnnnnnnnnnnnnnnnnnnnnnnnnnnnnnnnnnnnnnnnnnnnnnnnnnnnnnnnnnnnnnnnnnnnnnnnnnnnnnnnnnnnnnnnnnnnnnnnnnnnnnnnnnnnnnnnnnnnnnnnnnnnnnnnnnnnnnnnnnnnnnnnnnnnnnnnnnnnnnnnnnnnnnnnnnnnnnnnnnnnnnnnnnnnnnnnnnnnnnnnnnnnnnnnnnnnnnnnnnnnnnnnnnnnnnnnnnnnnnnnnnnnnnnnnnnnnnnnnnnnnnnnnnnnnnnnnnnnnnnnnnnnnnnnnnnnnnnnnnnnnnnnnnnnnnnnnnnnnnnnnnnnnnnnnnnnnnnnnnnnnnnnnnnnnnnnnnnnnnnnnnnnnnnnnnnnnnnnnnnnnnnnnnnnnnnnnnnnnnnnnnnnnnnnnnnnnnnnnnnnnnnnnnnnnnnnnnnnnnnnnnnnnnnnnnnnnnnnnnnnnnnnnnnnnnnnnnnnnnnnnnnnnnnnnnnnnnnnnnnnnnnnnnnnnnnnnnnnnnnnnnnnnnnnnnnnnnnnnnnnnnnnnnnnnnnnnnnnnnnnnnnnnnnnnnnnnnnnnnnnnnnnnnnnnnnnnnnnnnnnnnnnnnnnnnnnnnnnnnnnnnnnnnnnnnnnnnnnnnnnnnnnnnnnnnnnnnnnnnnnnnnnnnnnnnnnnnnnnnnnnnnnnnnnnnnnnnnnnnnnnnnnnnnnnnnnnnnnnnnnnnnnnnnnnnnnnnnnnnnnnnnnnnnnnnnnnnnnnnnnnnnnnnnnnnnnnnnnnnnnnnnnnnnnnnnnnnnnnnnnnnnnnnnnnnnnnnnnnnnnnnnnnnnnnnnnnnnnnnnnnnnnnnnnnnnnnnnnnnnnnnnnnnnnnnnnnnnnnnnnnnnnnnnnnnnnnnnnnnnnnnnnnnnnnnnnnnnnnnnnnnnnnnnnnnnnnnnnnnnnnnnnnnnnnnnnnnnnnnnnnnnnnnnnnnnnnnnnnnnnnnnnnnnnnnnnnnnnnnnnnnnnnnnnnnnnnnnnnnnnnnnnnnnnnnnnnnnnnnnnnnnnnnnnnnnnnnnnnnnnnnnnnnnnnnnnnnnnnnnnnnnnnnnnnnnnnnnnnnnnnnnnnnnnnnnnnnnnnnnnnnnnnnnnnnnnnnnnnnnnnnnnnnnnnnnnnnnnnnnnnnnnnnnnnnnnnnnnnnnnnnnnnnnnnnnnnnnnnnnnnnnnnnnnnnnnnnnnnnnnnnnnnnnnnnnnnnnnnnnnnnnnnnnnnnnnnnnnnnnnnnnnnnnnnnnnnnnnnnnnnnnnnnnnnnnnnnnnnnnnnnnnnnnnnnnnnnnnnnnnnnnnnnnnnnnnnnnnnnnnnnnnnnnnnnnnnnnnnnnnnnnnnnnnnnnnnnnnnnnnnnnnnnnnnnnnnnnnnnnnnnnnnnnnnnnnnnnnnnnnnnnnnnnnnnnnnnnnnnnnnnnnnnnnnnnnnnnnnnnnnnnnnnnnnnnnnnnnnnnnnnnnnnnnnnnnnnnnnnnnnnnnnnnnnnnnnnnnnnnnnnnnnnnnnnnnnnnnnnnnnnnnnnnnnnnnnnnnnnnnnnnnnnnnnnnnnnnnnnnnnnnnnnnnnnnnnnnnnnnnnnnnnnnnnnnnnnnnnnnnnnnnnnnnnnnnnnnnnnnnnnnnnnnnnnnnnnnnnnnnnnnnnnnnnnnnnnnnnnnnnnnnnnnnnnnnnnnnnnnnnnnnnnnnnnnnnnnnnnnnnnnnnnnnnnnnnnnnnnnnnnnnnnnnnnnnnnnnnnnnnnnnnnnnnnnnnnnnnnnnnnnnnnnnnnnnnnnnnnnnnnnnnnnnnnnnnnnnnnnnnnnnnnnnnnnnnnnnnnnnnnnnnnnnnnnnnnnnnnnnnnnnnnnnnnnnnnnnnnnnnnnnnnnnnnnnnnnnnnnnnnnnnnnnnnnnnnnnnnnnnnnnnnnnnnnnnnnnnnnnnnnnnnnnnnnnnnnnnnnnnnnnnnnnnnnnnnnnnnnnnnnnnnnnnnnnnnnnnnnnnnnnnnnnnnnnnnnnnnnnnnnnnnnnnnnnnnnnnnnnnnnnnnnnnnnnnnnnnnnnnnnnnnnnnnnnnnnnnnnnnnnnnnnnnnnnnnnnnnnnnnnnnnnnnnnnnnnnnnnnnnnnnnnnnnnnnnnnnnnnnnnnnnnnnnnnnnnnnnnnnnnnnnnnnnnnnnnnnnnnnnnnnnnnnnnnnnnnnnnnnnnnnnnnnnnnnnnnnnnnnnnnnnnnnnnnnnnnnnnnnnnnnnnnnnnncttctgacctcaggtgatccatgtgtcttggcctcccaaagtgctgggattacaggtgtgtaccaccatgcctgtccccgaggggttgaatagctttaatttctgactctgtgtttcaataatgcagtttattttgattggcatcttctactggggctttaattgctgtcagtgtttaaaatatagcaggacttggtgtcctttttacacccaggagtcaatgtcctgtaattcagtgtcacaagtactttaaaagtgcatacagagagatacgtggatggaataaccttaatttaaaaatgtttaaggctgggtatggtggctcacacctgtaatcccagcattttgggaggctgaggtgggtggatcacctgagttcaggagttcaaggccagcttggtcaacatggtgaaaccctgtctctactaaaaatgtaacaaattagcttcgtatggtggtgggtgcctgtaatcctagctacttcgaggctgaggcagaagaatcgcttgaacccgggaggcagaggttgcagtgagccgagattgtgccactgcactccagcctgggcaacaaaagtgaaactccatctccaaaaaaaaaaacccacacaaaaaaagtttaatctcaattttttttcctaaggaaaccaaaacttaataataatatgacaacttgatcatataaaagtttttgtgtttgtttttttaaatataattcctcttattgtgacttacataaaccattcattacatgtttggattttctcgtttgtcctgaacttccctgcatcttaaacaaccagtcattttactctaggactaaatttaccatacaagattctttctaatatgaaattatttccctttaagctttcttaccaaaaaatcctctgtattgttataactttctatcttgtttcgtacataaactttaagctttgaattagacaaaaattattcacctttttaaaaggataccattttttttagcaagaatgttttccttcaatatatttttattggaaaatatccaaatatgaaatatctattatctaatttaatataactttagattctaaattatgacgtttgtctgcaagtatttattctaatacatttacctaattattttattttaatcatttacttatttatgaaaactgtgatattcatcatttaacgttatgaaactgctcttgcaaaattataactgagacagtaaaaaacatctgccctaactgactccttgttgcttctaacctccaggccatccttgttcattcctggttggaggctgaactaactttgggaggaacgaacttagtttatagtttagttttgaaacaaaaatgataagagccctttcccaaaacaaacctccttactgcctgtggactagactgtctaaagccacaggattagaatttatggtaatcttactaaattcaagctgtagctatggatcattaaacaaatattaatgtcttcttttttttttttttttgagatggagtcttgctctcttgcccaggctggagtgcagtggtgcaatckcagctcactgcaacctccgtctcccgggttcatgccattctccagcctcagcctcccgagtagctgggactacaggtgctcaccaccacgcccggttaattttttgtatttttattagaaacggcatttcaccgtgttagccaggatggtctcgatctcctaacctcgtgatccacctgcctcggcctcccaaagtgctgggattacaggcgtgagccaccatgcccggcctaaagtcttctttattaaagattacacaaataaagaccattctgttttgggctgcctttatagttttgcaacccctatgccaaattttgacaccttatattatttggcagagataagtaggaaattgcttgattaacaaatgcaaacaaaaatggatgctggcaaattcttaagacatttctagtattattttaccaatgatttaaaatccagcgtattaaagatttgacttaagtggtgtgaacttgaagggcatttgactagtcttttttctttagtatctaagtacttttattttttaagccaattaattgagctcctttatatatttttactagtgaaacattgtgtacacaacacataaatacatagacatattaggcacactgatagaagtacatcttactgatttataaagactttttctttctttatctcagactttcagattcttaataacctgtttcagaaccctaggcagttgttagctagtcttaaatttgcatattaaaggaaacaactctggtgaaaatcaaatagcaaaatttacaacatatgatatggagagaacaagtctggtgtgctagagggaggttaaagatggatgccaaatcaaacataaaattataaaaatctaccattggattatataaggagaccaattttatttagacagggactacctatattgtaactggacctgagctctgggcagagcccacactgaatcctgggtttccaaaaagggagaattattatgaggctggatcatgtgatgcttttacagtgcacttaatttttttttaaacaaagacgtttctaagtgtctaaactacactcttctgtaaaaacccaagagtagcctgtttcaaataactattttagtcaataaatcaggtaacacaatacaaaagcaagcagtttaaaagctaagacagcccacgtgtggtggctcacgcctgtaatccctgcattttgggaggccgaggtgggtggatcacctgaggttaggagttcgagaccagcctggccaacatgatgaaaccttgtctctactaaaactacaaaaaattagccaggcgtggtggtgggcacctgtaatcccagctactcaggaggcagaagcaggagactcgcttgaacctgggaggcagaggtttattgagctgagattgcaccactgcactccagcctgggcaacaaagatgaaactccgtctcaaaaaaaaaaaaaaaaaaagctgagacgaacttgtctgtttacacatttggggttccatgggaacccaaagggagtctggcaccttcttggttttctttaaggaaccccagtctcttataaactattttaggtctctcgtgcagcagagggtgcaagataaaggagagacagcagaagtaaataaagaaaaacagacctcagtcaactgagaaaaaacaaaaaacttttgctcaaaaaaaggacaaggtcctaggagagacaaaaaacccaaaaacatgaagaacatgaagaaggccttttaaatacacacacacacacacacacatcccttggatgttagcttttaattaagctgactttaacagttgagctcctttaaaaaaatgtttttaaatctcattaccatatttcacctgcgacaaattgctgctgtttcagaaatacagacattgctctttcaatttggtctggctagcaaaaaggtggtcttgttatgtaaataaagtccctttagtagtcaaaataaaaaatatttcctctttttttttcttttggctggcatctttctcccccaccacacaccttttgtgtgtgtgtgtgtgtgtgtgtgtgtgtgttgggggggatcttaaccatctgagaggtcttgttcccaataatttggaacttttcttcagatttgataaagttggatagagttggtcaaacccaatgggaaaaagactgaaaaaacaacaaaaacagagacaaacaacaacaacaacaaacagttcagtaaaacaagcaatcacacaactatatgattcctgagtgctctaatggtaaggagaaattaagaccagctggttgataactttagccaagacagaaccccaattcggctacttaacctagggatgggtctcaggctgatactctctaccatcttagaagcaggaaaaaaagaaaacctcatcttccctgttggaaacaatctcaaactccataaaggagttacctgccttccatcgtcatggaagcaggagaactggccctccttgttggaagcaagtaaaactccaaaaaaatagggagttgtacagcaaaataaactttagatcttgaccaaattttgggagatcagggattttttggagggggtgctcccagacctcagcaaattgtcctattggtttgagccataaagttagctcatgtcagtaccaagctccgataggaggtttgccaaaggtcagggacatctccacccagaatccctccatggttaccgaaatgcaaaccctgaaaatttgagataggtctacaaaaggaaaatatcttgggcccctgaaatcactaagctaaagcaaaatgtcaaactgggaactgcttagggccaacctgcctcccgttctcttcaaagtctcccctctgctcactgagacaaatgcatatctgattgcatcctttgaagaggctcatcagaaactcagagagggtaatcagaaactcaaaagaatgcaactgtttgtctcttatctacctatgacctggaagcccttccctgcttcaagttgtcccattttgcttctagttgtcacaccttcccagaccaaaccaatgttcatcttgcatatgttgattgatgtctcatgtcgccctacaatgtatacataaaaaaaagctaagctgtgctctgactaccttggacacatgtggtcaggacttcctgaggctggcaaacaaatgcgcatcgtcaaccttggcgcaataagctttctaaattaactgagacgtgtctcaaatttttaggttcacattttggtaaccacagagggattctgacctttgacaaatctattggtgcttggtattggcatgagctaactttatggctcaaatcaataggataatttgctgatgtccgggagcaccccctccagagactccctaatctccccaaattggtcaagatataaagtttattttgctgtacaacttctcctcctttttttttttttttttggagttttacttgcttccaacaaggagggccagttctactgcttccatgacgatggaaggcaggtaactcctttatggagtttgagctcacttccaacagagaagatgagtttcttttcctgctctaggatggtagagagctgttttcaacctgagacccttccctaggtaagtaactgaactggggttctgtcttggctaacgtgacaaccagctggtcttaatttctcctttccgtcagagtgctcagtgatatattgttggggattttgttgtcgttgtttgttcttgtctttctctaattggatttgaccaactcagcctgacttggtcaaatccgagtgagaattccaaattgtgggtaacaaggcctctctaatttggctaaaattccttgcagctgcaaagggggaagaacgatcaaacataaaaccacgtgtttgctttctgtcttaaaaaagcaattgtcccttcatttacttttcttccaccccatacctccttccccctttgccatctccagtaccaaggactctagagaaggcttctaatgacttgaacccctttaaataattcagaacaagggcaccactcaccgcttttggggtgttctgtcttcattgtggagtttcaagagtcatgggcaggttcttcttaggtctaaagctctgttttcctgtattgcattacctgacctctttggctttggggggtaccatagatgaccttgcactgtgagaggatttgacctcggcgtgtataatggcagatgagagctacaaagttatgggtggctgaatacagtttacaggaagtggtcttggctgtattttttttttcttttctctcctaggaggttgttgtttaaggatcctaattctagtttgaagatgcattctaaagggtcttctttattgcttttctcccaacattaatctcagtttggtttgtctgtgtgcatttgtgcgaggaactgaactgaactgttgttttcataggtaaatgagagactgagtttttcagctccaaagagaaaaggtatctgcttctcccagccaaaggtgcccctgggtgaccagggggcctcgtgggagtgtctagggggttgacccctgctgtgacatgcagcagcccttcagggaaatcccctcaaaagttaatttaaaaatagttcatccaggaaacgcatgtaaaggctgatcacccagcgttttgagccctctctgaggtcatagacctctggagagagaaactgagactcataagagggcagaagtgactcagtggtgacacactgtggagtcctgcccacaagcagcacacatcaatccactacacaaaaacctaggccacagctcagttcctccttttaagaaaaaaaaaagtgggaaacaaataatccaagaatgaggagaaaacacagagaatgatccccttttgagcactctgtagggtttaaggcacatctacttgccagagtaaaatggaagtaagacagtctttgtgcacatttacattaaggaaaaaagagccctaacgtcgaccccaaaccaatagagttcttacgtccccttttccccattttcttttctgcctgctttaaatctgctgttacctttctagtgagataaaaaccactgtttcgatctagcaggtctttttttgcaagccagtgaacttatatttatctcatggctaaagtactgaagtaaaagctatagaatctttgtgtgtgtgtatgtgtgatgtatatgtctgtgtgtgtgtatagttgaaggcccttataatagacttatataattttatgttcaattggcaattaaatctgctttagtttccctctagctcaccagactttctcttcgtaccttactatgtaaattttgctatttgattttcacctgagttatttcctttaatatgcaaatttaagactatttagctgacaattgccttagggttgtgaaacagattatcaagaatttgaaagtctaagatagggaaaaaaatatggtctttatggatctataacatgtacttctggctgggtgtggtggctcacgcctataatcccagcactttgggaagccaaggagggtggatcacatgaggttaggagttcaagaccagcctggccaatgtggtgaagccccgtcccggggcatggtggtgggcgcctgtaatctcagctacctgggaggctgaggcaggagaattgttggaacccgggaggcagaggtttcagtgtgccgagattgtgccactgtactccagcctgggctgataacagtgagactccatctcaaaaaaaaaagaaagaaaaaatgtacttctatcagcatgcctaatatgtctatgtatttagatttcataggtaaatgagagactgagttataacatatgttatggaaaactcctataattctgatataacttagtatgctttatcaataacaattataattgttatgttaagttattgtatgccacagaggaaacaaatttccttgtcaattgtgtctttgactatggttgccctaaaactttttgtcatccacggacatttgttgtcttgttttggtcctccttagaaagtggttttgtaatcagctatagaactctaacaggtgttcttacatataggattctgataactttggggattgtggcattagaatagagaaagaaactttccagactctcatggagagcagaaatgttcatgaatatcaagcagaacaggagttaactgtgtaaactgaactgatagaagactaaagaatctttttgacctttgctttaaatgttgctgattctttcttttgtatttttcagagctgagaaaacttttcttttgagctattgacagctttttacaattcagtatactcctatgaacaaaatttggggtatatttgtttctcttaaggactaagctctgattttgtatcttgcccaaattcctatctaagaggtctggggagtcgtgtcctacaaaccataaattctcatcagatggcttttatttgaccctgtatatcatgatttactttccaatctgagtctggcataacaaggaagaaaataacaatgttttaccccaaaatatatttccttgtcataccttgaaattgccctacaacgtctcttgtgggaaaaatccacattctatagagaatcacctttctcctttgttttcctttcttctcagatccaggagataatcaattaagagccaggcacccttttaggtctgatgagaaacattttacaacctgctctctctttgaagtctgctatctgagagctccctctctgcacaataaaacttggtctccacaatcctttaccttaacctgagcattccttactattgatcccaggtcttcagataaactcaaccaattgtcatccagaaaatgtttaaatttccctgtagtctggaagcccctgctttgatttgtcccacctttctcaatcaaaacaatgtatttcttaaatgtatttgattgatgtctcatgtctccctaaaaatgttttaaaccaagctgtacccctaccaacttgggcacatgttctgaggacctcctgagggctgtgtcatgggccatggtcactcattttggctcagaatagatctctgcaattattttacaatttgactctttttgtcgacactctctacctggtttccccagaatttggaaactatttgtgagtatttttaatttatgggagtacagttatttgtataagtgcaataagaatttgttttcattttgcagcaggacacaattggagaaactggttactccaatgtactaaggctttgactggaatggtgagctttcatttaaggaatcaaacttgacttatggagccaatgaaagccccttggaaaaactggcctcatacctttgtctacagagtccctgtacagggttcctgacctgtggcaagaaaagaatatcactttctgacaggtccaggagccccaggtttatcctggaacctcaagcgatgaggatgactcaactcataggtatttgatggcacaaattcgtggctgggctcggctttaaaaaagtcttatctgagattcctcctatggagcaatgttccatcaaagccaatttaaaagcctatgtaaaaagtaattattcttgctgcactgtatacaaataattaggccaagtataataaagcaaaccagtcttaccatgatttgtctttagtgaaaatgggaaactggagagagaaaaattatgtttcaatactatggtacacctatttttagattccagtcttgcctaatgttttcaagttttattattttctacagtttggaccaaattctgattttccttggctacaagtcttcaaaataatgtttgcaatttttttcatttgtttgccccaccccccatttttctgttttcttttcttttctttctttcttttttttttttttctsagatggagttttgctcttgtcgcccaggctggagtgcagtggcatgatctcggctcactgcaacctctgcctcctgggttcaagcaattctcctccctcagcctccctagtagctgggattacaggcacctgctaccctgcccagctaatttttgtattgttattattattattatttagtaaagatggggtttcactatgttggtcaggctggtctcaaactcctgaactcaggtgatccacctgcctcagcctcccaaagtgctgggattacagacatgaaccactgcacccacccgccccccttatttttcctaatttggagtcactaaaatctaagctgtgctttcttaaagccctgcaaactgaagccagacaacttaaacttcagaagaaaataacagcaacctattttcatacataagccactttcatggcctaccaatgtatggactttaaagttatgtggcctatatcgatttttgcaggattattctttggtttgttgttgttttctttcttcctccccctattttctcttctaggacatgagacttcacaacctgctaaaaatgagctttcctaataacttaggacctgcccatctaggaataaaccatcctagccatgagagatcagatgaaacctgggaccagagactcattttcttctaaaatcttggagagctttctccaagattttaaagagaaaacggggggaaatgtgaaaggaaaagatcttgagcccccagatcactataagctaaagggaggagtctagctgggaactgctcagggcaaacctgccccccattgtattcaaagtctcccctctgctcactgagataaatgtgtatctgactgcctcctttggagaggctcatcagaaactcaaaagaatgcaaccatttgtctcttacctgcctgtgacctggaagtcccctccccacttggagtcttcctgcctttgcttcgagccatcctgcctctccagaccgaaccaatgttcgtcctgcatatgcggactgatgtctcatgtctccctacaatgtataaagccagactgtgccctgaccaccttgggcacacgtcatcaggacctcctgaggctgggtcatgggtgcgcgtcctcacccttggcaaagtaagctttctaaattaactgaaacctatgaacctcccaaatctgagacaggtctcagttaatttagaaagtttattttgccataaagttcatccatgtccagcgagctggtcagaaggaaccgcagggggatgtgtgtgtccgtgtgtgtgtatgtgtatgtatctgtatgtatgtgtgtgtattgtgtgtgtatgtatgtattgtgtatgcatgtgtgtgtatatgtatgtatacatgtacgtgtgtatattgtgtacgtgtatgtatgtactgtgtatgcgtgtgtatgtgtatgcatgtgtattatatgtacatattgtgtatgtgtgtgtatatgtatgtgtgtattgtgtttatatgtatgtgtgtatatgtatgtatgtgtatatgtgtgcgtatatgtgtatgtatgtatatgtgtatatgtgtgtgtattgtgtgtgtacatattgtgtttgtgtgtacatattgtgtatgcatatgtgtgtgtatgcacatattgtgtatgtgtgtgtatatgtgtatgtacgtattgtgtatgcatgtgtgtatgtgtgtatatgtatgtgtgtgtgtattgtgtatgtgtagtgtgtattatttgtgtgtgtgtgtattgtgtgtgtatgtctgtgtgtgtgttcaaccccggagtgtaaaaaaccatcgccataagaatttgcatgagtcttcctcatagtcaacaaggtttctaaaaccagaagttccctgagctggagatgggatgtcttaagtcggttttgttgttgttgtttgtttattttttgagacagagactggctctgtgacccgggctagagtgtggtggtgagatcaaggctcactgcagcctcgacctccctggctcaggtgatcctcctgcatcagcctcttaagtagctgggaccacagtccggagccatcacacctggctaatttttgtatttttcgtagagatgggggtctcactataccacctaggctggtcttgaactccttgactcaattgatcttctcacctcagcctcccgaagtgctgggatcacaggtgtgagccaccacacctggccaagacttttattacccctcattttagatattttgtgggttcttactgagaagttgcagaattctccccgaatgccctgggaactgctgtcctgcaggcgctcacagctcaccgggttgtgcttgcagggccgaggcctggtgcctcaagctgtcccctctgtccccactggaactgggccagtgcctcccaggcctctcttctctttcttttggggagcctcagcgacttgctggggccatttgtctggggctggtgcactgtggcccctgatggccctgcctgatcaggaaccatcagccccaccaacctgcccagagctggaaagccagaccttctgggcgctcccagtgaggcagcaggtcagtggcctccaagycccgaggctccaacagcaggaagtttgaggctctttgggaacgactgagctactctggcaacccccagagcaaaggcagcagggcctggccgcagtccccacggttgtgagtcccataaggcagctttagcttgaggggagggtctttggggacttcagggagctcctaaaagctaagggcacttgaaagcaatgtcaaatggtttataatttttggcaatatttcattttccctccacaatcgtcagctttcaaggtttttagcagctgaactcttgaacatttttaattgattttttatttttttaacagccttattgagatgcaattcacacactaaagaatttacccaattagagtgcacaattcgctggtttctagtaaattcccagtagtgcagccacaggctctccttaaagaatgtgtaacaatgtgtaactcctgcgtgtaaggacagaaacaccatctctctgcttggtggaacacatcacccatttactgccccacggtgctctgggtcggtcacgggcacctgtggctgggctcacctcctgggtccccaggtcacccccttcccggttgctccaacactgaccaccctacctgacccctgcaggtgtgggaccagcaggtcttttggcaaaagggaagagcccgccttgagaaggctgtagcatttctctggaaacgtcattgttttaattgggcagttgcaaagaacagagacagattcatgctgccgcaaggccaaggggggtattgtaagtgtgaaagcagcatctcaaacagatggccagtgcgtcccataaaagtgcagaggggctataaaagtgcagagtgaggggccataaaggtgcagggtgtttgaggaaggagttgactatggcggaacgaagtgatggccaagggtggtggctgagaaaccctgctggtgaagtcctgcgtgggccttatcagtgagttaatctctaactgtgcggagccgtaaaactgcccttcccacctcgtgcagccactctcccggggagggtcttgggaagtccgcagaagtggcccaatggcagagcaggagctccgctctcagtgtggggcctcgtttgggtttgggaaaacatgtcctctctcacgaagacgtgggtgtctccagcgggaccctgatcccgcgtggggcgcatggccctctctgctctgcggcccctctcgctctcctctctgtgcctgggaattctagtgtttactgggccttggccgctgggagcctcttcaaggtggttccattttgacgtaaggactggaggggtgcattgaagaattgtagagtgcaggtgaagggagggcctggaagctcctgtcccgtctcctagaagcgtggctgtggtggcactggcattggagtctgaggtgccgcgtgtgccgtgaggatgaagtgtgagaaattttgggaggtcctagttctaccatccccagtgtcttcgagacccacacccttggtgtggaagaaaggagacaagatgtcatacgaagaggttctgttgaaagacgcagtcttggagctgggggttccggtgtggactcatgaggggttccgtctctgtatgtgtagctctgagctctgactacggagaaggcccagacatatgaccttctcagggcagtgagcaccccagcaccccgagtgtggtccctaaagaccacttcctaccagcgggacccagagctccttggagacatggttgactccagacctgggccaggagacgtacaaagcaggctcggagcaccctggtcagcagggaagccatcgaggaccagggcaggagccctccctgggccggccacggagctgatggtcgtcacgtatcagggctctgctcagtcatgggaactgagtcgtcaccccatttctgtggtgagcggcttctgcagaagacagatttgtttcatctgaagttatttattctgctgtcataggtgaagcctgctacacccatgtccccacatcccactgttctctccctgatggccggggggagcagggccggctctggtcttgtctgaaagggaggcacagagcagggccatcggctggggtcgggggagacagagtggtcctgaccagtagctgagcgcccggggtagatggttactgggtggttcccgtggggggctgggctgttggcagccctgagctggccccacgtggggtcagctagtggctgggtggggcaggcactttgaccagagccagctcactgctgtggccacagccccaggggtgccttgaggtcccatgcagggtgaggggactgcggggggcttgaggccctgagggctgccccgtttgctgttagcatgcacctggccgccctggcgcagccatccttgaaacactctgacagcaatgttttaagaatgtagagatggggtytcactgtattgcccaggctggcctcaaactcctaggctcaagcaattctcccacttccgcctcccaaaatgttagggtcacaggcgtgagctgccgcgcctggcctgaaacattacgtgtttgccagatttgtctttcttttcttcataccctcttggttttgtgtcttgcttagacggcagcctcattctcctttatcctctgacttcagtggttttatttttttacattaaatctttgaccccatgtggaactgattctgatccatggagcagatctgggagagccgatgttcgttatcgtgactgtttagaatttttctggccatcactatatgttttttgtccatttgaactttagaagtgacttcttagttaaaaattctcttcttcgggattatgctaaaattcaagattgttttatgcaaaaatcatctcctttctccaaaaggagaggagtgccgggccagcgtgtgggagtgaggacctgctgctcaggaactcttcctgggcaggggccagtggggccgggcagagccagcccagccctccccgctgctcccatggcagagccagcccagccctccccgctgctcccatggcagcgcaggaatggtcgtgtgaccactgagcagcggggctgatcctaacccagttccacgtcccgggagggtgaagagtgacgttgcactgggcctgggtcctgcctccctgctgttctagcacccccagccccctggcccgctttgccttggttacaattcctccttccccactggcttgttgtgctcctatgtaccctgtaaagccccatgcaaaggccccagtccaagcaggaagctcaccccttgtgtcctctccagatgctgagctygccgagtgcaggtgtggtgtctggttccctcgtagcctgtgcctgacctgcactgagacgctacggcccacgtggcaaccccccatcactgaggggacacagcccacgtggtagccccaccccatcactgaggggccccttggctgctctgtactgatggggggctttgcccagaggatgggggaccctggctccccgcccgactccacggtcaggccttacccagatctgctcttccctgatctggctgcacctgctatgctaggctcctgggacccaggccaggcctcctcaggcctcctcatgtgggccccgcctctctgtttggagacatcatgcttcctccaggctcagtcaccccgggctgtcacaacagacaccacagacaggctggccccagcagcagacatgtgcttctcaccgttctggaggccggaaggcatgcgatctcgagccagcatggsgggttcctggggagggccctcctcctggcctgcagatgccactttctctctgtgcccctatatggggagcgagggtggggagtggaagctgcactctggtctcttccttgtcttagaaggacacgaatcccattacagggactccacccgccctcaaacctcatccaaccctaacacctcccagaggccccacctccaggcaccatcacgctgtgtgttaggggtttggcctgtggattttgggggcgcacagtccattgcaccaaactctcagcctctccagatcccctgggggcctgggggtctccgtcccatacagtctcccagggggccctgcgtgggtagaggtcccctgacctgttcccacctctggtcccaggagcgcggccctgtcagctcccgaaccccagggaaagggatggctcatccactaggctctttccggccctaagccattcaggggtggtcgggatggggtcagattcaggcctgtcctgggttgagactccctagcccatgggccggcacccagtgggtttgaggacaagacgttacagaggtgaggggaggcccagacctgtgtggcccaaggcctggacttggctgcaggatgggaggtggrggtggggctggcacgacccggactgggcactcatggcctgccctttccacagatacttccgggtcatcctcctcctcctcctggccctgactctgctcctgctggccggattcctgcactcggacttagagctggacacaccgtaagtcctgcccccaccataagtcctgccccgggtacctcctaacagccccgaggacagagcctgggaccccagcatgatcacgccccccactgggcctgtctccctctggaagaggaggggtggatgggcccttccttggggggaccctgagagtctcctgttagccacaaacccacctgggcctttggggagggctctggggagcaggggccgggtctgggtttggggacagacccagtgtgtgcagagggtccctgtgtgtgggaggcagggctggaggcctccttcttgctccccacaacagaggtggcctgtgggcctgggctggatctgggaaggaaaaggtcagaaccgtgctcaggacagaccttgcagccatgggcccacctgggaccctctcccctgcctgcctgtggcacatcctctgtggagcccctgctgcatggaggtgcccacctgtgctcacctcgcagcccagctgtgcctccagacagggctttagccaggctgctggaagggtcttccaggccccgccactccccagcccctctggttggaggagacagaggaagcaccaatccctctgggccgagctgccagagacaggtgccaaggaccctgtctttgctcacccccatcacccaggctggccaggcctgggtaccctgaccccaccatcctggtcacttctgctggccctgttctggggcagggagggcgcctgctactccagccccactgggtgggtgtcatgatgggattctaggagtgggcccagccctacrtctggccgctggtctcggctttggggtccttccttttcctggtgtgaagggacaagaagcactgcacgtgtggctgaggtcacaaagccagctgcatgtgcgtgcctgggcaccagggagaaggctggggtgatgtgtgggccagagtgtgtagcccccgagggaaacagggatgggtctgaggacactgtctccgtggggccctgaggctggggctgagggtctctaggttggggtgcagtgatgggtctggtgggggttccagggttgggggtgtcaactgaagaatcatgacatctatgaatgtggagaggacactttgtttcttaaaaagtgtggacatcccacaggctgggagcacagccgccgacccaggctgggagcacagccgccgacccaggctgggagcgggcacttcgagggagggggtgggacaggggcttacgctgaacggcttggccaagtacacgttcagcaggtgacgggaggagctgtggatattcatgaagggggtcctgacgcacgtgtcctgaacaaacaggtgtgttacttacttgtgacccacgttcaccttggggtggagactgcacatctaactgcgttacaatcaggccctgcacgtcagaaggtggagccgggacgggaagcactcggtgcgcagcctctgtaaaccgccagaaccagtccggggctgggggtccctgctcaggggacagttactgaaatgcggctcttgtccgatggcagctgtggttctggctgggggagcaggggtcagcgaggcagcgtctggcagcgggtgagctgcacctgctttaacgttgttcgtctcaaggccagcgtttgggtgtcagagaaaaagaaaactcccgtggcaggtagaacataaataagtgcagcgtgtgtgacttcgcccctgcccggcatggcctcaggtcccgttgataatgtagcgtcttatggccacagtcagttctgctgggccatggtctccttttattttttaatttttaaaaaatttactttaagttctgggacacacgtgcagaacgtgcaggtttgttacacaggtatacacgtgccacggtagtttactgcacctattagcccgtcatctaggtttcaagccccgcatgcattaggtatttgtcctaatgctttccttccccttacaccccayccccgacaggccctgggatgcgctgttcccctctctgtgtccacgtgttctcattgttcaagtcccacttatgagtgagaacatgcggtgtttggttttctgttcctttgttagtctgctgaggatgatggtttccagcttcatccatgtccctgcaaaggacatgaactcattcttttttatggctgcacagtattccgtggtgtagatgtgccacattttctttacggtctctatgtaacattcacacccggcagctgctgggtctaaaccgcaaaggggagggggtgtgacgaggcgtctacctcccatcccatcactgctgggaactcagttttaaggtgggtctggggtccccttggccaagatggggttcatttagggttttatttttagttctcgggggcacagggttgggggagcatggttacgggagacagttgggggagtttgtgttcgggccaccagctgggaggttgtggagtggggcaaggattggggccatgggtcggtgcctacccagttggccccctggcctagagttggggggctcaggttgggaggtctctccttgcggttgccgggctgggggtcgctgttgggcgggggttggggcatctgcacccttgctgaaggctgcgtgtgccttccctcccagcctgtttgggggccaggctgaggggccgccggtcaccaacatcatgttcctgaagacgcacaagacggccagcagcacggtgctcaacatcctctaccgcttcgccgagacccacaacctgtccgtggcgctgcccgccggctcacgcgtccacctgggctacccctggctcttcctggcgcgctacgtggaaggcgtggggtcgcagcagcgcttcaacatcatgtgcaaccacctgaggttcaacctgcctcaggtacygcgggcctgctggggaggagggcgggctgcagccgtgcctgtggctgtgggtctgggtggtgtagcctggaggctggagagaaggagtgtaaggcttgggggcggggcgtgcagaaggcgggttgggagggcctgggccgcacgccctgctgagccaacccctgcccctccaggcggccagtcgcctgccgttgctcttggaatgagacctgggagccccacagcccctgcccaagggcgtccccagcgctcccccgcttctctggcctcctagttgtgcacaggcccggctctccccaccctgtgaccttcgcttctgtggctgcaggcccttctttgggtcccttgggtctcagcatagagccggcttccccccagggcttccctgaccttccttacaaaggaagcagggcagggagtgtgggtgggagggctgtgggcaggcacaggtgttttagggtcaccctgagcgctctgtggagaatggccagcagaggctaggtgaccaggcggggccagagggaggccgggtggggaraggtgatgggcagagagcggggcagcgggggtgtgctgtggggtgggggctgcggggcagagggaggaggaggggccgggaggaggggaaaggaagagggtgggggcagggaggaggcctcccactgttctctccctgggtttctgaggatggagaagcaggcggtgtagttgggcgtgactttctgcaagactttactttctgtgggtggggtatatcctccaggacctctgagggggcacaagcgagggtgagtccagacccaccctgtggggaacctgggtcacggaccttctctgggcctcagtttctttgtctgttaggtgggtgtcaccctggcctgtgggcagctggtggagtgctgaagccccctgtgccaggggcccgtggagggcccttcgtgctgtctgtgcgccacagcatcccactcctagaggcctctgggtctcctcgagatgccagtgggagctcctcctccctcctcctgctctgcccacggactcctcctcctgaggccccttcctggcgtccttggcctctgttctgggcacccgggaaccagtgactgggctgcagggcctgcgtgtggccctggctctgctcccggagctgccgcacgagaaggcgccaggcccaggttcctcggcagatgtgaggatgggggtgctccttgagcgggtgtggccagggcgcgcctcctccccgcgggtgggccaccctggcctgggcccgcggtccgcagcccgcctctctgtcgccacacaggtkcagaaagtcatgcccaacgacaccttctacttctccatcctgaggaaccccgtgttccagctggagtcctccttcatctactacaaaacctacgcccccgccttccggggcgycccgagcctggacgcgttcctggcctcgccgcggacgttctacaacgacagccgccacctcaggaacgtctacgccaagaacaacatgtggttcgacttcggcttcgaccccaacgcgcagtgcgaggagggctacgtgcgcgcgcgcatcgccgaggtggarcggcgcttccggctggtgctcatcgccgagcacctggacgagtccctggtgctgctgcggcgccggctgcgctgggcgctggacracrtggtggccttcaggctcaactcccgcagcgcgcgctccgtggcccgcctgtcgcccgagacccgggagcgcgcgcggagctggtgcgcgctggactggcgcctgtacgagcatttcaaccgcaccctctgggcgcagctgcgcgccgagctggggccgcggcggctgcgcggggaggtggagcggctgcgcgcccggaggcgcgaactcgcgagcctgtgcctgcaggacggcggcgcgctcaagaaccacacgcagatcagagacccgcgcctgcgcccctaccagtccggcaaggccgacatcctgggttacaacctccggccgggcctggacaaccagacgctgggcgtgtgccagaggcttgtgatgcctgagctccagtacatggcccgcctgtacgccctgcagttcccggagaagcccctcaagaacatcccgttcctgggggcgtagaggggccgggccggggacgaggcctcctgcggacaccagctcctctctccgccgtcaccggggaggccgrggatccttgcagggcttctggggcgttgggaaacccaggcccgccggccacggctctaaaatgaagagggcggagaccccagtgaagagcaccccccgcaatccgcgcagatccctcccagagaaggccctgagcccaggcggcagccacccgccccccttccgaggctgtgtctctgtttagaactgaacacgagggtggggagtgggggatgctggaccacagggcagcacctgcccggcaggatgcgcgtgcctgtgagccccgggactccccagggtcctgggcactkgggctgtggatcctcggaggaactcagagtggttcccctgaatttcccggccctggcgacgaggtgctggtcccagagacaggtgcaggcacaggcagtgccacaaagaccggcccgggagcggggcaggggccagggctcagccgctcccgaacagctccacagctttcgctgcaggaggtttggttctgatggaaggatgttttctacagagagatggcacaactgctcacaagaccagggttctagccggagcccaggtcgagytcagctccacgacccctgctggtcagcccctgatgcytcgtgaaggagaggagtctcacttgccaaaggaggctggagtggttgggggtacacacacccttggttgccttggagaccgtgttgggtgtggtgccagagggcagctgtgggtacccctctttgtcattcacagggagggacagagcctccctgcctggcaggaygtgatccctggctgccaggggctcagcgggtaaagggggtgcactcgccgggaccagccgatgcctggggcacccaggaaacgcagctactctgcagcatgctcagcctggaggctgagaccccagcagtggatctaggcctgcaggtctaggtgtgtccacgcttttttggggacgggaaaccagcatttcaaagaagggagagaaccggaaaccgcagcgtaggcagctccctcggaccccagtgtaatgggggagttgcaggaagagtgaattttcagtgagagtcggccgtgaagaatggcaggagctctgctgagtcagagtcagccagggacgtctgcaggccaccctccctccccctcaggcnnnnnnnnnnnnnnnnnnnntccgcaggccaccctccctcccccctcagcccagggacctcgccctccctccctccctcccccctcagcccaggaaaggcacaggagaggatcctgccaggtaaagggaaagtggcccgggaggagcccacgtgccaacaacaggagtcccagaagacagaaaagaccacagatgagaaagcagttcacgcagagaacaaaacrttcccggaccaaacccagggtcgggttgctcattcccgaggcccgatagcgagatgcagatgaactggggaagaagagggattttatttctgtaactggttacagggagaaggcctggaaatgatygccagaccaactccagattacagtttttccagagcttacacaccttctaagctctgtgtctccgtgtcagtgtgcattcgtctaaagacgtacgtgattcaattcttctcatctctaactgaggtytggtcctgaagatcttcctctgaagactcagtaaatttacttgatctaaatgggcccaggtgtttacccttatcttgtyttctgctaaatcatggaggtttggggagttccttctccacttgtttgtggaggcctggggagttttttcagacccccagtaaaacttgyttaatcctaaacgggtcctggtctcgtcatgcttcaaggcccaagaaagccctgggcaaaactcttgatgggcttttgttacgtcccagccctcgtgtgagggcgctggctctcagctttcaggatttcacttcaccctcagtcagtgctgaacagttgtcgcggaggcctgcgtgagtgaggcctggcgtgccctggaaacattcccctgagttgaagaaagactcacagttttcagcatccagttaccctctgagcatcaggcagaacccgccggccccaaaaccaggcccccttggcacatgtgggcccgagtgagtccagcatgaggaggtgccgcttctgagcagagctcaggttgtctctgggaggaggagcgagcgttgggtgcggtggccgctgcgttggcagccctgtccctgagcggaacgcaggtcgtctctgggaggaggagcgagggttggackcagtggccgctgcggtggcagccctgtccccaggcgtggactctgccctcagcttcacagtcaccgaagaaatgaagttacaggaggggcacaccgtccttttgtctctgcctttgaggttggcgggaactgaaactggtacggtctttttgaatagaaatttggggtctttctggcgacgtaaaactgtgtgtagtttgcagtagagagtgttgagaacagcctgtctgggctgtgcattgagaaggggcggttaaaatgctgccacgtcgtgcagcccataaaagggggacacagagtagccgaaactgctcttgggggagggggcacgtcccagccttccgtgtgatgctggggtcagcgtggcccctcggctgccagagctcacgaagacggttaaggaaagcttcccccgggtggctttcaccccacggggacagagccccagatgggcccagggacctctgagcagccgtgggccatggggtgacagttgggggttggtgggacccgtggctgtcatataccctgggtagacggtggcttgtccaggcagagatgcccaggggaagtgggtggcacctgagggcagatctgacttttcaagagaagctgaaaacacgggtttttctgtgaaatctctagattgaaaacagtgggcttgaaaagcctggagcagagggagtgaggcctgctccccaccccagctctgcgggcacaccctggccagacagccctgctccagacccggcctgtgtctcagggtggcccaggaggggactttgcaaggtgacgtggggcttggaggtcccgtttccctgtaagcctgggtacttaggggatggccctggtcagactccaccagtcccagacttgggggacacgagaagggagatgggccacccagttctggttgggctggggtggggcttctgaggggtggggaggttgtcccttcccacccacctgcccctgccccaggattctcggctgtgagcaggaggatgtgtacgatggccaagttgcctggactgggtccgcccctcctggggctgtgagtgcacaggacactgggcccacaggcacctctggggctctgtccccgtggggtgaaagccactggggggaagctttccttaaccgtcttcacgagctctggcggccgaggggccacggggggcattcagatgagtcagaaggagctggggcccacccctcctgcttcctcgccgcccccctcccagctgcccccagtaaatcccctcaggcccctaggacctggagggacgcggcaggtttatcatctcagcctggaaaccacgtgacctacctgtttcccaccacagcgccccaggtttcagaagcagctgaggatgcccttcgcaggggagggagggacagtgagaaaggagggtgttcagggcccagggatcccccacggaggctgccccatcagaacttaccggggacctgtggcctcctctgagattctggcctgggcagtggtcatttgagcattggttaccaaggctgcctctgaaatggcaggctgggggcaggccagcgtgaaagggactggcaggagtcctgcggggacaggctgggggcaggccagcgtgaatgggactggcaggagtcctgcagggcagctgtgctggggaggggtcaccctgggccctgagaggcacaggacattgcgatggggtgctggcctgccaggagcacagatacagagctagagcccagcgaggcctgtgctgcgaggggctgtgctgtgccaggggaggccccgcacccgggaagcccagaggagagtgtgcactcacggagccctcctggcagggccgcgtctctggagcagcagacccgtgtccctctgggaggtcaactgcggcctcacagctgggcctgtcccagcacagcccttgttggagggcgcacccccgtctcctcagcaccccagtgttgagtgcattgacctgcagaggggagcctgtgctggtcccgggcgtctgtgtggctcctgggtgcccatctgcacccctggccctgctctgggcttcagtggagccgtgccaccgtgggagtgtccagggtcctgacgtagccctgagacgtggccagctccctggcctgctgcccgcacagtgggcccttgtctctgctctgggtcaggcgaggcagccacccatgatgagctctgcagccttcccaaggtggctggtgagtccctgccctttgcacccccagcaccctcacccctctacccgggcgcccggggtcaggacccgctcctgaggtatctgtccagctggccgccccctctgtctgggggtgctggacgagtcccactccttgccaaccccagggtggctcctcagctctcaaacaaggggcgggctgcagggattccgagggcccctccagcaggaggtcccacatgcatctcccaatgggacacttacctggcccacagggtgggtgtgacactgagggttcctgggggcagattcagggcatgggatggagacagactggttgtgaggggcccaatgcagggggccggccccagcccacagggtcgttctgcagatgggctggtcggggacgctctaccaggtgaagggtctgtggtcggagtcttcgccctggccagggcccaggacgctcacggtgcaggctgagggtcagagccgccgagggccccctgccgggattctgtgcaaagggcctctgcactttatgtgggtgcatgtgaatgcccctcgccaagatgttcctaccctgcacctgacacttcccacgacaagaagtgctgaccccagagggtgtgcgcggaccccagagggtgtgcgtggaccccagagggtgtgtgcggaccccagagggtgtgcgtggagggcctggtctgacctcaaggctcttggggcgcccacacaggatgggctgtgaggggttggcgggggtggggggggtggtctgtgatggccccctgctgagccagagtgacccctacaaccggtccaggggtccacggaccagaaggccaggttctcctggaggtcccatctcccctgggcctcggtttccccttctgtgactccacacccccaaggagggccctgtcagggagggcggggggcactggttaatgtccaggacatggctgtcccagtcaagccaaacccctggaatgtgctgaactggctacactgagcggggctggcctccgagacagaggggcctgccgaggacacggaggctctgtggaacccagggcctggccacactaactggggctggcctccgagacaggggaggtcctgaggacacggaggctctgtggaacccagggaactggtcacactgaggacacggaggctctgtggaacccagggaactggtcacactgaggacacggaggctctgtggaacccagggcctggccacactgagcacggctggtcccccaagacagagggacctcctgaggacacagagtctctgtggaacccagggcctggccacatggaggacacggaggctctgtggaacccagggcctggccgtggcaaggaagccccaagccaagtgtgtgtcagccttgtcctctctgtgggcctcagtttcccctctgtgcaacaaggggagtgaccagctggtttctggagtctcctcctctccctctctgtccccaggggtgggcctgggcctcatgtctgcagggggtgctgacacctgctcctgtggtccgggccttggggagggagccaagtgcagagagaatgtcttgcttgtgcctgctcagcccagagggacacatggcgtctgcacctgcttcccgcttgggcacaattgccctttgagagcagagccaggggcttcttggggacggaagctgctctcagaagccgcgcactggtggtgggggagcggcaggaaggggccggccagctgtcctagccaagagcctttcaggaaccggtggcccagggcagaggtggctggaggtggagctgtctgtttgggcctcaggtgtcggggcaaggcctgcttgggttttacacgagtgttgcgcctttacccgggtctctgtcagtgggtcccgcctgacccgtgggtgtgcatgggtccccgtcgtaggcaggcgttctgccctggccaggcgtggtgtccggcatccggccatctccctcctccctccttcccttagccccgcatccaggtgccccgtgtgcccggcctgggcggctggccgtggatctgaccgctcctgcatggtggaggaccagcgttcccactgtctgcagctgtgccacctccctgtgccgggctgtgcgtgctcacgctcggctccgtctgcctttgtgcgatcagactgagagaccccccaggcaggtcccgcctgcaacaagcagaccccatgcgtgccccaaatgccccctcacccgggccctgccctggtgggtgttgcctgggagcaaactcccagaatggccgccgggccccactcggctttggagcttctgattcctgtgggcgcttctcaggtcagggccctgcaggtgggaagcaccaggcactggaatgagggcactgtggggccagctgcctgcaggcaggggtctgatcaccaagcacctgtcccctgcaggatccctggctgtggctcccccgatgacgttcaggaagtgggagccgatcccctgtccccagagagccccgtgactcccccgatgacgttcaggaagtgggagcggatcccctgtccccagagagccccgtgactcccccgatgacgttcaggaagtgggagcggatcccctgtccccagagagccccatgactcccccgatgacgttcaggaagtgggagccgatcccctgtccccagagagccccgtggctcccacaggtccctgtgggctcacctctttgtgtctctgctgtggcttccacggtgctgtggcctctattctggggacactgagctcctccttgctcgaggttttgggtcctcattgtccacatgacctcctgctgggcgaattctgggatgaccctgtgtcctgggcacatggctggcagggtcccgggggctctctggccagcctcccctgcaccctggcaccaaccagcctggccgagggtcagctcccagagccgtgttgagaggggaaggggctgattccacagacatttggggtggagtgggtgcgagggagggtgggggaggggctgctccagatctggggtgagggagtcagaaacagggctgaccccaaggtgggtacaggaagaggcccaggtgtgggcaggagctgtctgcacctcctgagcgcgttccccagtccagaccgggagcgagtgtggggctccctgggcctgtcttgctgacctgtggccctgtactgaccagcagagcatgggggtccctcgtaccccttcacggacagtgctcttcgagcgggagaggacgggcctgacctaccgcgtgccctcgctgctccccgtgccccccgggcccaccctgctggcctttgtggagcagcggctcagccctgacgactcccacgcccaccgcctggtgctgaggaggggcacgctggccgggggctccgtgcgggtgagtgagtggccgggggctctgtgtgggtgtagtggccggatctgctggggctgcacaccccgggatggggcgggggtggcggcggcaggcagatgcccgaggtagagatgagcaaaccaggctcagcgatcctgggtgccctgcggggggctgtgcccaggtccctggacgtcctggtcagcggaacttcctcctctgggcagtggggtgccctgcacgtgctggggacagcagccctggcggagcaccggtccatgaacccctgccctgtgcacgatgctggcacgggcaccgtcttcctcttcttcatcgcggtgctgggccacacgcctgaggccgtgcagatcgccacgggaaggaacgccgcgcgcctctgctgtgtggccagccgtgacgccggcctctcgtggggcagcgcccgggacctcaccgaggaggccatcggtggtgccgtgcagggtaggcgggcagggtgccggtctgggtccctttgattggccacggtccacatggaagggagattccagcgggaaattgccattctg

SEQ ID NO: 97964 - DNA, 20170 bp, Homo sapiens
cagtcattcaaatagcttttcctcataggtaaagtaaggtaggtttttgttttctttttttttctggctgctttcagttttttttcttttgccattaattttcagaaatttaataatgctacatcttggcatggatttctttggttttgtactgtttcaggttcacatagctttctaaatctgttggtttattttccaaatttggaaagttttcagccattgtttctctgagtattttattaacctcaccctctttctcctttcttttggggtgaccaatcacaagaatgttaaatcttttttgttatggtcccgtgggtcccttaggctctgttcatttttgttttcagtctattttctctctgttgttctgactggtgatttctattggtctatttcccagttcactgtttcatatggtttggctgtgtccccacccaaatctcatcttgagttgttgctcccataattcccaagtgtcatgggagggacccggtaggaggtaattgaatcatgggagtgggtccttcccatgctgttctcgtaatagtgaataagtctcctgagatctgatggttttataaatgggagttcccctgcacttgctgtcttgcctgccaccatgtaagacatgctttgctcctcctttgttttctaccatgattgtggggcctccccagccatgtggaactgtgagtccattaaacctttttttctttatgaattacccagtcttgggtatgtctttattagcagcataagaacagactaatacactatttcttttattttccacttccattttgctaccgagctttttatttgtgattgcatttttcaattctaaaatttctttttagctctttgtatctttcaggtctttgctgaaactatttttacatttgtttcaagggtggtcataattgcttgtcgaagcatttttattgtggctgctttaaaatctttgtaagataatttaacatttctggcatctcagtgctagctagtatctattgattgtctgttttattgagtccgagatctttctagttcttggtatcatagttatttttagttgaatgctggacatcttaggtgttatgagatgctggatcttacttgtaccttctgtttcagctctctttctctgacactacccaagcagaggaatggggggcaagccttgttactgtcaggtgggatttaaagtctaggttctccatgcagcttcctttgacacctgaatgggggttcctcattactgctgggtgggagtgggagttctgggtccccactagacctccacagataccttcctatctgggaggggtagaagcgccttgtcgtttttcctcatgtggcctgcactaacatcaagaaggtaaggtggcctcttgattactaggtggtgataaaagccttactgtcagctagacctcctctaatgccacctcaaggtggagtgggaagggagttttgttattgccgggtaaggggtggaagtccaggttctctaggggtctctaccgacgttgcaaggggcgaggctcattagtgcctggagggattgaaaatcccagctgctacttggccttctctgacctcgtcctggtggacagattgtggtgctcattacaacctggtgagggcaacaacctaggcttccccttggcccatgttcacgtggctggggatgctgtctggctggggtagaccagtcatttttgcagtgttttctgtcttgcttggctgcccctttcctcacccatttcctacagggataaagagggtttttattgggattttgcttttggagggttacttgtgtttatttagtctgtatccattggtattgttgagtttctggcttcctcaagctgcaagtctggtgatttagggcataaagaaaacccaggaaacttagcactttgtcattccttgagccgtgaggtcgctcgctgacctgctttcttctctccacctttcagagtcttcttatgcttgttttacatatgatatccaggaagtttagttgtatttagtggaaggaataggaaaaagtatgttttttccatcttctaccaagtcttgatttccttttaaaacgcattaaatggagcacccagcggctatgaagcaagaccttcctatgtgccatactcagcaaccctcactgatttaaaaatactgtaaatctagttctctttagtattataatagtatttacaacttcatcaaattcttttatatctgcccatttaaaactgtaagcctgagatccattttacttttaaaattgaatcactacctaatgtattagacagatttcactaatatgccaaacacatgtgaacattacaatgacgtcaaataacaaacataaactggatattcataaacctaactttcctgggttggaaagacacttaagcatgaagagaacaatttgtcttctcaaacaagctgaggttactgcatggacagttcaatgcctgtattcattaccttttcaggcaggctgtgtttgcttagagtgaggagttgttagactcaaaccacagacttcagagctgcaggtgcccaaggtgatcctgcccacggcaaggagagtgtgctggcttgtcatttagggtcactatggcagcgggggactccaggttcatcccctcagctgaggccgtttgcaaccccatgtgccctggattcaatcctttcataatctttcaatcatacctcccattttgggtaaaattctatagctcacacccagcctgcttctcccactgataaggtccatctaatttatttaatccctgaccttggtgcctggctattggccacaggattaggacaattctaggctggccacggtggttcatgcctataatcccagcactttgggaggtcgaggtgggcagatcacctgaggccaggagttcgagactagcctggccaacatagtgaaaccccgtctctactaaaaacacaaaatttagccaggcgtggttgtgcatgcatgtagtcccagctactcgggaggctgaggcaggagaattgcttgaacccgggaggttgcagtgagccaagattgtgccgctgcactccagcctgggtgacagagtgagactgtctcaaaaaaacaaaacaaaacaaaacaattttaatgacatgctaaagttggagagtcttcaccttgcagtgttcaagagcagggggttgacaggctagatctgggtttgagttccaaatctctgggtctcccttggctaaacctctgtttatccccataccataaggttaacaattttcatctgagagggctgctacaaagattaaagtgcaatttggttttttttgtttgttgttagtttgtttgagatggagtctcgctctgtcacccaagctggagtgcagtggtgtgatctcggctcactgtaagctctgcatcctgggttcacgccattctcctaccccagcctcctgagtagctgggaccacaggcgcccgctaccgcgcccagctaattttttgtatttttagtagagacggggtttcactgtgttagccaggatggtctcgatctcctgacctcgtgatccgcccgcctcagcctcccaaagtgctgggattacaggcatgagccacagcgcccatccccactaaagtgcaatttgtttagcaagctttatgtcaataagtagtaactatcttgattttttgtaagcctttactccatatcactgatttgttttcagcattgttgactctagctttgctggtttgatgatgaacatgattgcctctttcacgtctttccatagctctgacagttctctttcatctcaattcatggcttacccattgaacatggaaatcaggctttgacttccttgagagtgtgaagcagttattaactggaaatttcttgttttctcaagagagtcttccaaaatattcttatcctgtatctgttccctgctctgctttcttgctttctctatctctttctctttctttcttttttctttgtttctttctttttctttctttctttctttctttttctctttctctctttctttctttttctttctttcagtagaaattctgcccatcctttgtgctgcttttgttgcatttactcacctttgatggggaccattctaccttatctgctgtttgccctcaaaggtgtgggtagatgtgctttgactcccttccctgtttatctaggaatctctagataacatccacccatgatggagacctggacactgataccttttttcctgtttaacctctgagttgcctaaagagggtttggtagaaactagattcctggacagccttcccccggtgcttgtccctactgagtctctctctgaatttgttgaacacctcaataccatgacccagctctaaagaggtggggacatggcttgcttcctgggttttgggtttgttcctccattttggggaggtgcagccactttgtcgaaaaagctgggcctctgttttcagagacagcatgtggtgctaagtggacttgcctctcagcctcacgctgcctagtccagggaccctgggcagacaaaacaatgccatggtgtggtctgctcccacttccattaagccagcatggagtgtgggtagggctggtggaaccagaatccaaacgggtgctctctgctcatcctttttccccaggagttgaatgccctccagtctagggactggggacctgtcagatctcccgaaactcctctcacaaccatgcccagaaaggaaattcatgactcagctccctgagttctctctgcattttggttttgtctttattctaggtcattttttattcttcttgctgggtatctggaaagataggttttgtaatataatataatgccactgtcatttttagaaatgcgttggaaaaaattgtgagacagcaaaatgcatctaattttttctccatttctccatccccaagccacttctcccagtcagctttttgagggacagccctccctcccccatcccgcctgtgctttatgtcagagcccactcagactgccccacccctgaccaaaacctaggtcttaagtgcccttaggtcagtgcttccggattcagagtgaccaagggattgcattttaattactttcagggagcagaacgatttcaaccctggtctcctagattataatcatccatcccacaggctgtctgatggcaagaattttaagccccatttaaggtggacgctagaattatttctggatggagcagagtagcacaagctgctgagctgcaaatcaccgtgatagtggctgcccaacccagtaacccacaaggctaccacgccttgtcagtgccactgtggtgtgaattagacctttttacaggttacatcaatgcgggagaaggaagggcaatgatgggcaacagtgctgaaatatctggtgctcagaaacttccttcctctttattcctctgttaggtccctggggaggggaacaatgaatgggaaaccctagcacctccgttagctagctttcagtgctattaggttggtgcaaaagtaattgcggttttttacttattagcaaaaccacaattactttgcaccaacctaatagtagctgaacaaaagtgtttgttgaacttaattgatcttacaagactgtgccaacatggaagaaaaaaagaaaagagcccatcttggaatcagacctatctttgctcaaagtaagactctagaatgtaccatctgtgcaacttgaggcaagttatttcacctgtctgggtctcggttttgccatgaatatgaaagctagtcgtgtcactctaggagaagcggtttgtgttggtggcaggtgcgccccctcccaataggtgacaagaacacgcactctcccgttcctgcgttacctcccccaggccgcgcggtggcgctgcgtctctgcagcggcccgggtctctctagggcgctcgggcgcgctggcccctggggacgccgagggcggctgcgacgcgccgagaggccgcggtgagtgcagcagcactgggggggtggtcgtcccgacccccgggctcccgggtgggaaggagcagctgggctgcgcggagcaggcccccgtgagccccgggaaggagcgcagcgcagggtgtggagccaccctcagcatccgaccgcaggcggggacgagagccttgggcaggagccaggagaccccttccctgacccctgacttgccgggggtccctggcatcacttccccgccaccgagccttggaccagagggtttctaaggccctttcggtgccggcgttgcggggtcgcgggagatccgggggtctgtgctctgattcccggccctgcccgtctctcttacaggctctcccacctgtcaccctggcccttctctgcttggatggtgtcttcctctcctcagccgagaatgacttcgtccaccggatccaggaggaactggaccgctttctgctgcagaagcagctgtcaaagtaggctcatgtgaggggcgagggtgccgccttgctgggaagggcagggttcccgagccgcctgtgtgccctcccccaggtggtgcctggcagctggctctgaccttggcctttagtctttataacgccagctgcctcttttagctgcatctttgtaattgtgagcatcacccccagactgatggggcccggcacagggattggggatgggacctgtgggtccctgcgatcacctctatctatgctcagatcctttgcagtccatctgggacccagaggggcagaagggagcccagtgttaatccgcgattaacctgggagtggacctggtaggggccaggccctggacacctgctcagcacttcttcccctccctccccagggttcttcttttccccccactctccagtcgcctccggtacctgatccatagaacagcagagaattttgatctcttgagcagcttctccgttggggagggctggaagaggaggacggtcatytgtcaccaggacatcaggtgtgtagcctcccaccttgaagtgcctgcagcggtggtgtgtgggtggccagctagctggtcagcctttggaagggcagggctggggggaaccagggctgggacccccggctgctgccattcctagctgcagctgctcagccagggctgccttttgcatcaacagtggagcagatatgcagtttgtggaattcacttggcaaaatcagctatatggttgggccaaaagagagagagagatctgtttaagtagtgggtgtgtggcggggggcctccctagcattcctctcagtgagcttgtgtcccacagagaccagaaaagcacctgctgggcttcggtcccctctgttcccatgtgcgtctcagtgagcatcttactttaatgactgtgatcctagtgtttgaagtgacatgtttttctgatagcatacttcttaaatgcaagagcttacctcccctggtgtgtaactgaagatggactgatctctaatttggatcacagcactagagggcaagctggctgctctgggctcatgcaaaagtgacagcctccactgtgatgccttcctaagggattttcgagggtcattttggctgtggtttttgcctaatgctgacccgaatgtctctcctgaatgacaagtggctctagtaaatcattttcctttgggcccctacacactctgattacctcctcccattcctgctccagggtacccagttcggatggcctctctggcccctgccgcrctcctgcctcctgccccagcaggtaccacggtcctcggcccatctccaaccaaggagcagctgcggttccccgaggtgcccgggctggccggtggtatcgtggacgcaagcctgaccagcctttgtatgtgccccgggtgctgcgcargcaggaagaatgggggctgacctctacctcggtgctcaagagagakgccccagctggcagggacccagaagagcctggagatgttggtgctggagaccccaactctgatcagggactccctgtgctgatgactcagggaacagaggacctaaagggcccaggacaaaggtgtgagaatgagccactgctggaccctgttggccctgagcctctggggcctgagagtcagtcagggaagggagacatggtggagatggccacacggtttgggtccaccctgcagctagacctggaaaaggggaaggagagtctgttggagaagaggctggtggcagaggaggaagaggacgaagaggaggtggaagaggatggccccagcagctgctcggaggacgattacagtgagctgctgcaggaggtgatgaggctcttgagcccraaaagggagggcggaggtgaggtgggtgtggccstgggtggatggggaccaagggttatggtgtggagagcaggggatgtgcaaggggaggtagggctgggtgttgggtgacagggattccttagggaactcaggagatgaggtgtggatttgggtcccagcccagccatgtaggagctgcttgaccctgggcaagttattttgtttggctgagtctcagtttcctcatctgaaactaaaaccagttgataatacagccttcactaggtcatggagatggactctgtgtgcaagtacatcrtcttgtgttacggatgccagtcatggaaattactctttagcctgaagttttatcttataaatcttgttttcttgggaccgtgcgactgcccctgagactggctgtgggttcagttgggagggtggcatcttttatggctattttatacatgaagaatgcagaccacagacctgccaaatatcacatcactagtagaggagggaaagttcttggacttgcccagctctgcctcttactgactttgcactttgggaaaaattacttaactcttgggccttcagtttccccatctgtaaaacagctttctaraatatagttttcaggattctatggaacattatgtgtgtaattgccagtcacttagtggggactccatacaagtaagtgccctcccgtaaaacccatgcgtcttgacgtcttgaccttgcagcccagtctgcctgctgctgcctttcccagacttttgccaggtgggccccttctccctgcagagctctcagcgcgtgggctagtggtttgggagctctgcgtgtccaagctccccttgctaagggtccgatctctcctagatcacagacaacctgacgaagaaggagattcagatagagaagatccatttggacacrtcctccttcrtggaggagctgcctggagagaaggaccttgcccacgtkgtagagatctatgactttgaaccagcgctcaagacggaggacctgctggcaacgttttctgagttccagtgagtggtggctggggaggtgctgccttcagagaggagctargatacttctctgtagctgggggtgcttgcctgccccacacccagtgcctaatgcttcagcaagagagacagaaagtgggtgtgttgcctgggctctgtattcctgggcagttctccctgccggcygtccctcgggaaagagagcactgatttgttggttgtagacacaccctgcaggccctagacctgggctgcccccctgcatggccacacgcctgccaggatgccatgcgccctccctcagtctcaagggacatggcagcctcctcttctcctcttgcctgcctcccagcggctgctcagtgtgtctccagcaggctacgggccagctccatgtgggaactgtttctagggtgcactgagcagcctgctggggcagagtggaggtcggaatggtggccagaggctgtattgagagacacgacttccctcctcctcagcttccccacatgcctttagatccaccctcctgtctttccttcttttttcttttccttttttttctcattttgccttctccccttccccttctttgttcctgctcaggctttctttctcctctttttttttgagacaggatcttgctcttttgtccaggcaggggtgcagtggtaygatcacagcttgctgcagcctcaacctcctgggctcaagtgatcctcccaccttcgtctcccaagtagctgggactacaggcatgtgccaccgtgcccagctctgcctaggcttttagaaacccctttctgtggctgggcacggtggctcacgcctgtaatcccagcactttgggaagctgaggagggcggatcatgaggtcaggagatcgagaccaacctggctaatatggtgaaaccctgcctgtctctactaaaaatacaaaaaaataaaattagctgggcgtggtggcaggcgcctgtagtcccagctactcgggaggctgaggcaggagaatggtgtgaacccgggaggtggagcttgtagtgagccgagattgtgccactgcayttcagccygggtgacagtgcgagactccctctcaaaaaaaataaaaataaaaacaaaaagaaacccctttccacgtggcccttkttaactctgcttcctaaagccttccgctgtgctctgctcctgagcaggagagccgaaggggtggctaggggcaacacgttctgctcttctgttctctaccttgatggtgcagccaggctggggccsctgtgcctttctctgcccgggtggggccacactgccttaggcctctcacaagctgcagggtaggtggcaccttcctgagcaataggaataaagctgacaggagcatggtggccctgctggtttgaggtcctatacccctcccccaccacagaaaccctttcttccccagcctcagacaccatggccttggctgggctgagacaggcctggtgaagagtctcttcctccttggtgtcgtgccatatgagctctttgagtcctggcttctttagttctagaaactggtgacctgcctgacattgacaggagtgacatttgtctttctgaagccaaccatatgggcttcagaggaaatttgctgcaaatgattgtctccgtcccagaagagatgggaccttgcctcaggctggtggcatctgcgggctggaggcgagggggtgtggctgcgggattcgaagaggagtttgactgcttgctttcctgaatgtgctgtctcctctctcgccgcacagagagaaggggttcaggattcagtgggtggatgatactcacgcactcggcatctttccctgcckggcctcaggtaaggcacccccagtgggcccagcccttgctcggatccctgttgagagggaggacccttggttccctgggtagaggccaccatctcctgggcgcaggctcagctgagccagtrggctctgggggttttgttcccagcctaaaacccagggggagctragyggtctctggcccatagtaatgcgccttaatgaagaagcccttcctattgtgttagtgctttcaatgaaaaggcatcagattcaggcgacctttgctgaggaaggtcgtgagccaagcccaacggatgtccctgtgttaaatgaaaccacagcaaagtgctgctttaacggccaaaagcatttgaattcyggagatttcatgtggttcaagtagacacattcttactcgattttcgcttcagcctcaagatgtaggtcaggttacctccattgtacagctggagagacttaagggtcccagagtgtcaggggtacactccaagttacacagcctctcagtgtcacagctcggggcaccacactgcctcatgactccagtgctcctgtctccctcagtcacttgcctgcattgccctgccacaccaccgtgcttacatttggtataatttatagttacccgcgccacgccccctttactggtcttcccagaaacagccttctgaaaacccgagctggggcctgggagcgccattgctgctggggcccagtcctcaggagggagggccctggcagcatttagggagggaacagggcagggtggggtctcaaaccccagagagggagattgtggaaaggaaggcagggagggaggccaagaggctgccctgtgctgcgagaggaatgagctgtggctggggttggccrtggcgttctgatctccacagactatggtgagagcaggttcccttgcttcagtttcctcttctgtagaacagtgggcagcttggacctgaagcctctcccagctctgctctgccatactctgtaaatagtcggggtgctgcaacaccaggcatgactcagggcagtgaacgcatgttccctggagggtcttgagtggtgaaagggggagaggttgtgtttagccctggggctttggaaactgggagcccgcctcttctgatgtcagaatcacagcctccccagtgctctccctgaccagcctggggtgggagtgtcctctgagcgcaggtgtccctgtgcgggcctgtggggctctgggggatgaggcaagcaggcggcagtcgtctcttgcccatccagggcggtgtcggagcagccctgccctgagctttgaataggtgcacaacacggctgcaggggttcggggtggtgggtgtgccgckgggtcctgaggaggagggagtggctccacgcctgctttctttccacagctgcggaagccctgacccgggagttctcggtgctcaagatccggcccctcacrcagggaaccaagcagtcaaagctcaaagccttgcagaggccaagtaaggaaagcgcatgtccctgaatagggaggctgtgtgtgtgtgtgtgcgtgcgmgcatgtgtgtgtgtgcgtgtgtgtgtgtctggtttgggcagggtcttcccctctgttaattcttcccgcttgacttctctgctctttgggagccctgggctgcagtagccagtggggctgtgttccccctccctagcaggcctagggggggtctggggcaggggtctcccttggggagtggcgtctgccagctgctgtgcagggaggctctcctgcycataccctcttctgggcacagggaaaagcttggtccttcttctggagggccctggaaaccgtatcccatagggccgggaagggcctgggctttggggtccgctccrggacccccaaatggctctgtcagttacttcagttggtctcagtgacactgaggaagtcactcagtgtgtgagttggtttcttcttctgtaaaataagcagactcttcagtctgaaggattgaatgagagcctggcatacctgcctggagccctgagggcacatagaaggtaccagataaccgttatagcgcctccttttccccttctacttccagaaaccatggtgagagattttagacacgagttttccatgacttcaaagtagyaactagtaaaatggacctgcaagaggcctgccgaggccagctgtgctctcgtgggtggttacgtagccaacatggtccagggtttcttggaacaataaatatcctgtccgtaggtctgtgagctctgggtgttccatcctgacttgatacccctcccaaaggaccctaaaaagcagggaggtgtgcaggatgaayccctcagccccctcactgtagagacagagaaacaagggcatgkagaggcgacaagtttgggtcagcatcccctggggggccaggatccctaagttggccccctctcatgagcatccggccacaccacgggcacagctgggccgaggccccacatgtgtcacatgagaggctggctctgatggcttgtacggctgctgtgttgctgggggagaggcagccacgaccttgtgtttaggtccccactgtggggctttccttctagaactcctgcgtctggtgaaggagaggccacagacaaatgcgactgtggcccggcggctggtggcccgggccctgggactccaacacaaaaagaaagagcggcctgctgtccggggtccgctgccgccctgaggcctggagacccaactggcctggatctgcgtcccgacgtagctggcgcccccaacaccataagccttcacagacgccagagcagccccgcaccaccctcgagcttcaccatggggtgtggtgggctttagtttagtcccagaaatggagaaaaaataaaaactcacgttgttctaatgtgatcactttgaaatgtggtctgtaggggacgctagggggtgctattccaccttgcagtgcaggtgggcagctgctgaaggaaggtcacttgagcttagccgggaggatccccactgggcctgcagggcctctgtgcacagcctgcccaattttgggagctgggttgcacctgctgtgtagcacctgcccacactcctttggcagttcaggtatccagccttctggcctgtgctgtgggacagttctgggacccctgggctggtcctggtcttacctgtcagtcagtgccagttcctgcaaaataaatgtaaacaaaggcaagaggtgagatctgaatgcgtgccgacgccctcattcaattgtggtttgagtggagttggtgccaaggtggtcctacctaccctctagtttgctgggccctagcatgctgttgacacaaggggaagtcccctgtgtctgggtgagtggctggcttggcccagccacccccccactgccactgggaattgctgggagcccctgtcctgtgaacggatgccctcttgctttgataagctgcctggtggctgttgttaaatctagacttcccatccagccctcgcacaactcctatgccttctgacaagtttcagtaaaaaccacaggagttcaagaaagattatgactcctgttccgttactttttgtgatctccttagattgcttctcccagatggtaggagctgccccttttggagtctattgaaggaggtgccctggtggccacactgggctggaggggatctgaggacccatgtccaccggagaaaaccacgaatgtacctgaagctctgcttctggccactgaacataggaagcctgctgctcagggcccaggtgctgtgggtcaaaggaaacacagacacgtttcataaatctttcttttattccaagtttcaagtatgtgtaagtgtctgtgatgacacatggtgctcagtgagcgccctgtcacccaggaccctggttatagcaccgttgaatcaaaaacccacagaattggaacaacaggaagatgagtcacttacacagtgggttggtttttccttagatttgtacttccaagggcccagatgtccaatattaaatgccaataaatttgtgcttcaaaagtctgtgaaaatataataatagtatcttgaaaaacaaggggtgggggctgtggatagggaagcaccaagtctgagctcaccaaatcagaaaacacgtggcaccattatctatgtgactataatagactggagggtttcattggaagagaggtctagatattcaagtttgctgaaaatgacctaagaggaggagaaatggggttcggcctgaccctctctgggggggctgatgagcccgcatttgtccacgtgtcactggagaagagcgcggctccactgtgtctgtggtgagctcggtggcttgaatgggacaagctgatgacaacctgtctgtgggcctcatcccggtcaagactggctcttggtgctgctccagcagctctgtggacaaaccccacccccgcaaggccttctcaggccccaagggtcaggtagcagccccccatgaatgatgggagggtccctttcctcctgagcttagacacagctgtaggggtctggacagggtgggggccgggctgggtgagggcacgtggcattcgttcagactcagttgttggggggaagtcccatggaagatgtggtgtggcctgaagacaggagttgaccacgcaggcttctttactgcggggacagctggttgtttaagagcccgctgaagtgctcaaactttttttccgtctcttcgctgaaggaaccacctgaagagcgagaatcgggtagagagagtggacaaatgagatgctcgggccttgcctgaccctgagccaggggagtgggcctcaggggctgctggggccacctgtgtgtgccctcctcaaaaggacaggtgccaggcactggccatctctagggctgggcacatagcaggtgctctgtcaaagttgagtgaacgagtgaataaatatagcgcctttaattttaaccttttgccaagagtgaggcccatgacttttcctgcagaggaaaaagctctgccttcccttttgttccccaagtcctatcatccaaggaaaaaagtgtctttattggagactagaaataacagtagtttgctagcttccagctctcgacagaaaaacctgataggcagagcccacagattgctgatgcccacatttttgaggtcacatacataatgagccagtggcctcagctccaacccttaaaaagccttggggtctgcactgggctggcctggtcctgtaccatcctctatccgtggccggagctggctgtaaaaactcagtctccatccaggcctgtgtgtctgtggcttctgtcctgaatgtggaaatgtgatgctggctgcattccccgagctctttacccaaattaggaagctgcctctgggtccttgagaaagtagggcagctcccgcctgcttcctggagtgggggcggcctggccttacctatgtggcagttgtacatccagatgcggtggccgtcatagcggctcctgcatttcatgatgttgttggagtaatcggattctgcaacctcgaagttggggttaataacaacctagggagaagcagggcagaggaggctgcttgttccctctgcggccacctccacccaggcctggggctctgagagaccagcacctcagggaaggggagcgtggcaggtgccgggacccaagacgggggtctgtgggtctcaacaaagtccttggggaggggaagagatgagtcagggagcagaggaagcatggcctggaagagggaaaccctgccctctgtccatatccgtgtaacacacacccctctacccagggtgggccttcggaagggggtcacccactcctgggagttctggggaaggcagaagttggggtctggggaggccccaaaaagaagatgctgaagagaagcagaagggtgcagggaggacctggcggtgtgggaacctggaagagggctgcctgggcgttggagatgggacactcgtcacaggcgtgtgactgtggacatgtcccttcctctctctgtaaagtgacaggtgggacttggggatccatgtccctgtctgctctgctggccgagggcctggctctggggctgctggagaagttgcaccctctccccatccttccacccacccctgtatccgcatccccccagctacagcaggaataggaaggacatattctgggagagtgtctgtgagggaacagaaaaggggaggtttacggtgaggacccgaggagaaaagagaaagggagggagagggagaagagacaacagtggtgaacagaggggcagaggacacagatgacaggccttccctcgagggtcctgccacatttggaagggctgcgacccacagcaggggggcgggtacaggctgctcgttcaggaacattctctaaatttggggccccagaagggcctggacacgaacctttagcaggccgctgggcttgcccaaagaggtgctgtgggaagccaaggccagcctggcagccggccctctgctctggcccagcggggctgttctgggggcctgcacctggctcagctgtgtcccgctggggccctgtgcctttagctaaggaggtacatgccctgctccggggcggcttgagttttttcttttccacccaaccattctagctgccccctcgttcctggcccacacatggcatggggcaaacacagctccacatgccaaggcctccagctgtgcaggcctaggcagctccttggccgcccaggcgtctcgacagtgcagccgtgagggcggctggatgcagcaagggctcgtgttggggacacgagggccagtgttacgtgtggggtggaggcggggctggaaatgtgtgtcccccactgtttcaccccactcatctactgcagaccgacatctcacgagggcctgcgggaagtggctttaggtttctgtatgtctgtgaatctaggaaatgatgagaaagcggataaagcggggccaccaggagccaggaggccccttcacccctgcctctgagctctgcacaggtccctctgcgtggacggtcacttcctcctcgcccagctccctcctcctgtccttcacagcaccactgatgtctgaagtgaagaccacctcttgtgtcccgtgagtccccaggccggtgcttgtggcacctaaagaagctccatgtctatcttaaggggaatgttctttttgattaatcagaggtattaacatgcccctaatgagtccatttgctaattgtattgtttaggggttgagaaaacaaaataaagagttgatatgtctggggttgggtggccgtgaaatgagggtaatgatgatgccccttccttgggagattaaatcaaacaatgcattccccaggcttaggcaattgatagtagttattaagtggatggcactggccagaatacagggagatacacactcacccagcaaaatgatagcaaacctcaaacagaaaccaccaggcactgtatacgtgcacatggccacggctattcatcttttaaaataaataactctctggttaggcctctccaagtctgtggttctgggcttgtgggtggaaaagtgcttggctgtctgctttccagcctctgaaactgcccaggaattctctgaaagcccctctgtggtgacttctctgaaggtgttgtttcttcagaggactgtctgtaggtggggaccgtgggccaggccctgggctggctgaatgccccctcaggaaagctttcaaggtggaatgacacatttctggtcatccactttgctagccaacagggcaagctggaaaacgagatgggtgaggacgtaggagagagtgagagggtgagataaagcttctgcaggctacgtgtacccgtgcactgggagagacactagggacacaatgccccttttctcccccagttagagccctggccagaacatgccgctgttttcaggaaggagggaagccaaggcccccttgttcctcctcagggctggccttccacccagagtatgtggaaacaaatctcggcaacccctctgacaaagaagtcacctggccaggctgtgtctcgtgttcagtattttattcttatagattcactttgcattgagaatggccccttctgcagatcctcctctatgaggcagatatttccggaagagctaagtcacagatatttgcaagtgactggctctttatgagtttgctttcagtcttgaaagcacagaccaaggcagcctagggcactaggagaaatggggatggtggagacaagagctccataggagacaagaggtgtgggttgcctgagcatgtatggaataaactggccggaggagcaaatctagcctgctgatgagttttgatttgcatgcaccaggtgttaactcaatcaaatgtgaatgcctgtggtgtctctggtcctgtgcacgccctatttctcaggcccccatgcctgatatctttgggttaactgatggaccgtgatggcctctgggggtagcaccttgccctttagacagcctgacttccatgcccctgtgtggacaccaatgggaaggagcctgtggaggtggcctcccctcctccccctgcagggctggaaccccttcccacccacctcacctggaacaggtagtctccagggggcacgtcagtgatgtcaacccactggcagtcgatgtcatggcggtacatgtcccagcagcccatggtgatgccctgatcgccgaagttggcacactcgtaattcttctggatgtctgcgggcagggtagaggagagctcatcaccagggaaccatggccccactgccgcaccctcttcctgcttccaaggcccctaccgctgcttcatctgggctcggcatcccac

SEQ ID NO: 97965 - DNA, 99335 bp, Homo sapiens
  misc_feature (1)...(99335): n = A,T,C or G
tctcaaactcctgacctcaagtgatccacctgccttggcctcccaaagggctgggatcacaggggtcagccaccatgcctggccggttgtgggttttttcttagtttacattctttcactcttccttttaatattagaattcccagagctgggccgagcacagtggttcacacctgtaattccagcactttgggaggccaaggcgtgggcctgggctgatgggatttgctgccgtgggagaaatggccaggacagtggctttccttggcattgtcagtgagtgaggccacagaggttcatgacagtcccccagccccactttgctgccaggctggctgggcaggggatcggaatgggcatgtgctataacaccgtgtggttggcgtctgacagcatggaagtccagtgcgggctagtcaggctggtaaaatgggtcacacctcagaactgcctcgtgtgctcttaaaaaccgcagcactcaggctatataccctggcctgtcccatcagaccctctgagggtgtcactagtcgtcagccgcgccactggtctaccccttgggttgggaagggggctcccaggatttccacgttgccttcctattacagtaggtagccagtcagacgtgagcggtgcgggagagggctcccctgctccccgtcccccaaccaggaaagtcagttgaccatcaggtgatggtcagggagctgtttgtttgttgttgttgttgtttgagtctcgctctgttgcccaggctggagtgcagtggcgcaatcttggctcactgcaagctccgcctcccgggttcacgccattctcctgcctcagcctccggagtagctgggactataggctcccgccagcacgcccagctaattttttgtatttttagtagagactgggtttcaccatgttggccagggtggtcttgaactcctgacctcgtgatccacctgccttggcctcccaaagtgctgggattacaggtgtgagccactgtgcctggctttttttttttttttttttggcagagtcttgctctgttgcccaggttggagtgcaatggtgggatcttggctcactgcaacctccagttcccaggttcaggcgattcttctaccttagcttccctagtagctgggactacaggtgcccaccaccatgcccagctaattttttatatttttagtaaagacagggtttcactatgttggccaggctggtcttgaactccctgccttaagtgatccacccgcctctgcctcctatgggagaggatcacaggcatgagccactgcgcctggcctggaattttcttgaccatacttttttttttttttgagacagagtctcgctctgtcaccaggctggagttcagtgacgtgatctttgctcactgcaacctctgcctcctgggttcaagtgactctcctgcctcagcctcccgagtagctgggactacaggcacgtgccaccatgcccagttaatttttgtatttttagtagagacggggtttcaccatgttggccaggatggtcttgatctcttgacctcatgatcccccgatccccccgcctcggcctcccaatgtgctgggattacaggtgtgagccaccgtgcctggccttgaccacacatcttatgcaggagcttagagggctgcccctctgttggcccaagggtgccctgagccggtaacccgtactaggggctgcttgggacagaccttgatgatgtcatcaccctgccacctagtggggtgtctggcctccttggccttagtcaccccgagctgcccttctcctttgagagcagggggcctgctgatgtggctgcacccccacagcctcagaggacggccctgagagcctgtgaaggtgctggccttgtgcaagttacacatctccaagcctttggcaggaagggtctccttaggagaagctgggcaggttcagtccctgagtcctctgagcccctttttctgcattatgtccagggatttctgtcattgtaaccatgttttaggggctgccctgcatgtagcttccaggaatttggcccagcagcagccggacggaccctgggctgccaggctggctcagttgatccagacaccgtgggtgctgcaaagaaaggacccagctgttgtccggggcctgtgtctcaaaagccatcctacaagtgttctgtggggttttgttgacagaaactcagcttcccgctgttcacaggtgcccagtcatccccctctgtgcgattgtgggtgtggatgtgttggggcctgactcaggatcaagggctgagctgggcggggactcttgggaagtggggcttggggtcccaggttatcgaatttaccccatgccagttctctgggccccgcacagcactgcagctctcccgccagacgtctggggaggctgcacctcccaccctggtggctgttttgctgctgtctgggcccagctgtgaatggctttgtattcctccggctttgcagtggtgagaaagatgtgtggtcatggcagctcccacccgccccgtgatgagcactcaggagcctgagctcatcttctcctccttcaggtgggctggctatacctgacgcacccacccaccgcagagttccagaatgcacccctcatgcctcccacccttccatggcaggggacagtcagttcccacagccttccctgagcatgtcactcctggggactgcaggtgctcagatgatcacgggggggccacagggtctgagcatgccacctcattgtccctgaactctcatgagtgcacagggaccaactgtacatggaacatgctgccagaccctcttctggaagggtcattgtctgcaacttacgccagagatgatgagaaggaaactgggtcatttgtaaaacagacatgttcaggtctgggtaggacccagggcatggccagctaacgctgcaggggctatatgttggggaaccctgctgcagtgagacagcacctccacaccgcagcttggggccccagcctgttttcccttcatgatgcccacgtcgggcttgtatctgtggaccctggcttccccatggctgtggatgaaggaaagcgactcgtccccacctctgcccttgggaatagtactgtgaccttgcgtggctaaagtatgacaaacgttcaaataatttaagaaatggctggacgcggtggctcacgcctgtaatcccagcactttgggaggccgaggagggcggatcacgaggtcaggagattgagaccatcctggccaacatggtgaaactccacctctgctaaaaatacaaaaaattagccgggcgtgatggtgcgtgcctgtaatcccagctactgagaaggctgaggcaggagaatcgcttgaatccgggaggtggaggttgcagtgagccgagatcatgccattgcactccagcctgggcgacagagcaagactccatctcaaggaagaaaaaaaaaaaaaaagaaagatactgaggctaggcacagtggcttgtaatctcagcactttgggaagccaaggcaggaggactgcttgagcccaggagttcaagaccagcctgggcaacatagtgagactccatctccacaaaaatcagaaacttagccaggtgtggtggcgtgcacctgcagtctaagcactttgggagccaaggcaggaggatggtttgagcccagaaggtcgaggctgtagtgattcatgattgtaccactgcactccagcctgggagtcaaagggagaaaccctgtctctaaaattaaacataaataaataaataaataggccaggcatagtggcttgcatctgtaatcccagcactttgggagacacaggcaggcggaatgctgggattacaggagttcaagaccggcctgggcaccgtggtgaaatgccatcactacaaaaaataaaataaagaaaaagaaactgtttcctaggactgcgcactcccgaagctggcctctcccgagccgaggagtggcagtggtcagagaggcccacatggactcagacccaaggctgggactggagtgaatcatctggagggcttgcgtgtctgcaagggcaacgacgctggaaggaggtgggaagtcttttgcatggctgcatgtcgggccttctgggacccctaaacactcttgtgtggacgggaggatgtctgtgggaatcccagagctggcactgaggaggagtcttccgagtgggcggagggggatgcctgccaggcccaagccctcctgtgggcagcccctgcagcacccccattgccctgctctgtgagtggctgctggtgggggggcacagtggtctgcttgtctcggtcttctgcactgccactgccaatgggagcttggattaggcatgccagcctcctgacgcccagagcccatgctctgcccacgtgtgttagtggacggtcctcgtgactgctgggactgtcctggagagcagcccaggacccctcacatggcacaagatgctcttgtgtccagaatggcctttatttgttgtcagggacaggggagggaagcttcttggtggaagggagaggctgaagaatgaacagccccgggaccactttctctgccaggaggtggcactgggagaggatagggactccggaggggtgtaccgtcctccaggaagccctctgctgggtcggctccgtgcctctgtcttgggaagtgatggacttggttgccttatgctgactggggtctgtcacagatcttggttttccccaggagttctggaggcccagagcctgggtgcggcacccggttcattggggaggggcatgggtcctgtgccctcctcctggccgggctccaccagggctaagctctcatctggggctgcggaagtgagccagggtggggacaaagccctggctggtgggtctgggccagttccaggtacagggtccagatccccccactgcagcaggagggagcttcctgttcaaagccatctggctctgggaaggacagtgaggcagggccatctgcttccccactccctggggtctcttcctggccgggacctggagctgtgcagcctggcccagcaggtcctcccttgcgatgtgtccacaggggtgggcctaggcctccagcttgcagtggtgcagagggctggggagcagagggggccctggcaacagtggccaaaagtcctggcgccgccgagggactagattccgcaggggctgccgcccccggccgctgtcactggggtggggtgggtggttgtttctctgcaggcccaggtgatgtggagggggcacctgggctgccacacagaccctgggctgggtcgggcacggggcctgcctcgcccccagctcagggaccgcaagagatgtggccctggcggctcagggcggcaggaggggcgggccagccccaccgtctcaggataccgtgctaggggagggtttcctcgccaaaggccgtccagcggctgtgaccccttcgcctggagccccagcttcctcccggcgccgccctcccgccccggcccccgcggaacaaacaaggccctggcctcggagctgccccgccgcccagcgctcacaggtcgtttattccaagtaagaaaacggagactgctcggggcaagctagtggggccgaggcccagggcgaggccgtacgcgtgtgcctgcgtggccgcctcttttgcagtgaccaccaacaacgacagaggcggcccgctgcacacgcgggttcccgcccggacccacgcccttcccgtgggggacgcgggcggcatcgccagcttggcgcggccccgggacgcgaacgcgtggcttcagcggctccgtccatggtgtccgcctgcagggggcgcccccgcgcctgcctcgaccggctcgcccccgtgccgcggacgcgcgcgcgctgcctcacgcgacacccgccccggccgccgtccgtcgtcgctcgcgtgcgtgcgcgtgcgtgctggtgcgggcgccgtacgtgcgcgcgcgcggcggcccagaaagcggcgctgggaccctgaggcggccgtggttaggcggctccccggcggctcctccgcggcggtgacggcgaccgcactccccgcttcccgctccccgcgctcctccgcccgggtccgccagccgaggccgctcccgagcgtcggaagatgccggccgtgtccaagggggacgggatgcggggcctggcggtcttcatgctcggatatccgcaactgtgagtggcggggacggcgtggggccggggccggggccgccggcggagacggggtctgggagcggaggcccggggcggggcctcgaggcgggggtgcaggctgggatgcgggcggggcccggggcctgagggtgcgggcggcgctcggggtcttggggtaccgggtctgggggtgggggccagggtgcggggtgggggtccagggtctgggggtgcgggcggcgctcagagtcttggggtatcgggtatgggggtgcgggtcaggatgcagagcggggccctgggtctgggggtgcggggtggggtgtccagggtctaggggtgcggggtctaggggtttagggcacggcccttcatccacatctccactcccgtttgctggtccgtgcggggggctgcggcaccaccaagggggttccgggccaagacgcccctccccagcatgatgtcaccttggtctttctagtactggagcgtttaacccagcgttttccaaaacggcgtggattttagctttgggagcagaaatctggaaatcagtgtcttcccaggaaacagctttgtgacctgggttctggaggcttattaacccctgattagatctcacctacgacgattaaaatgactcattcccggagggaatctggacacgagcagcagtcggggtgtgggatggcctcgctgcctgctgctccaatcacagacctcgttctcagccccgtgcctgtcccctcggggtgggaaaaatccacaccaaaccgttaaacaagccaggaaggctgggcctgttagaaggatgtgcagggtggctgggtgggtgcaccggtccaccaattaatttgactttggtgtgcagaacctcctcttggctttcagaggccatctccttatttaatttgagggagaaacaaagccagtttcctgtctgctgcgttgatttttttccttgttatccagcaaatagttgacttcatgatttttgtttttcttttttttgagacagggtcttgctctggctcccaggctggagcgcagtagttccatcacggcgcactcaacctcccacctcaagtgatcctaccacctcagcctccggagtcactgggactacaagcgtgcaccaccaccatgcctggctgattttcgtgttttttgtagagatggggggtctcgccatgttgcctaggctggtctcgaaatcctgagctcaagtgatccacctgtcttggcctcccaaagtcctggggttactggcgtgagccacggcaccctcataatttttaatgtgtattttgagggactgttgtgatcttccctttgaattctcatctccttagacgggatggaggatcaggaggatagtggttctcccacactctgtggaagggtagaggaccatctaacccttcctgtactctgttaaaaaaaaaaaaaaaaagcatagagctgggtgcggtggctcamacctatagtcccagcattttgggaggctgaggcaggtggatcttttgagcccagaagtttgagaccagcctgggcaatgtggtaacaccctgtctctacaaaaaaatacgaaaattagctgggcgtattggtgtacacatctatagtcccagctacttgggaggctgagagaggaggatcacttgaccccaggaggttaaggctgcagtgagctgagatcgcgccatactccagcctgggtgacagagtgagacctttctcacaaaaaaaaaaaaaaaaaaaaaaaaggcttagaaacaccctcagatcagcacttttacgagtagcattttttctctttgtttgttacataatgagaccaacatgcattttgtaaaactaagtgtgtgtattatttcttaaggggacctctgggacaaagactgagtacccttaaatgcgctatgatgtctgtccttccatttttgaagaaaattgcgttaggcaggacaatgagattgaaagccatttcctcagacagcaagtcacccacttgtcagatatattgtctgtgccagggcctgcgtttgacaggatggcgcctaccacagtgagtgcggtatagccgtcctcccttatttgtggtttcaccttctgaggtttcagttacctctggtgatctgaaaataggtgagcatagtacaataagatatttaaagagaccacattcatataacttttattacagtatatcattacagttcttttttattattggcttctgttaatctcttactgtgcctaatctgtaagttagactttttcataggtatgtgtgggaaaaaagcagcttgtataggatttagtattatctgaagtttcaggcacccactgagtgccttggaacgtatacctgtggatatggggaaactgctgtactctataaaatacttgactatatagaccagactttctccaactcagcagagctgacatttggggctggatcacactttattgtggggaactgttctgtgccttttaggatgtttatagcagcaccagttgccttagttgtgataaggaacaatgtctccaggcattgacaaatgtgcccttagggcaaagttgtccgccgtcgagaaccactagtgtatcccattgaataacacagcccctcccctgaaggagctcgtagaagaaggggtgcttagtcctagctgggggagccaggtctctttaatacggcccctttctcggaatcctctttccctcattgctgttggatggcctctcatcagctgcagcgcccaccattctcctcctgggcagtgtcttcagcttgtggtgctgcttttcacctgagtggccccatctcccccactgccctctagggtggcctctacaaggtgcgcaccctatcttgctcatcacatttttcctgctgttctcctcatggcgagcgtctggcatgcgaggtgcatgccagagaagacctcacaaggaaggtgattcttgggcaattcaggcagaagaccaagaaggtattagaggaacagcaaataattaatgtatatatgtattgagttaatgaatgttggctggtgcctggagacgggattggagagccagccagggtttgagctgatctgaacttgacctccatgtcacaggcagaggggtccccgcttcccctttccctggccagctctgattttgtgtgctgttttcctgtcgtgagagtgaatgataggagtagtcgggccctgtggaaagaggactctgagccaacagccaaggctcttgaccctgactctgcctcttagcagctgcatgagtggtggccactggccatggagcctcagtttccacagcggacagttgaagggctggattttcagctgaaatatcattaaagctgcgtgagtggaggccactagccacggagcctcagtttcctcagctgacgcttgaaggggcggattttgagctgaaatatcgttaaagcctgtttcagctccaaatttgcgtctttctgaccagtttcttaagttttcctcctttagcctgggcaatatagtgagacccctgtcttttcaaaagagaaaaaagaattagccaggcgtggtggcacgcacctgtggtcccagttactcagtgggctgaggtgagagcattgtctgagccctggaggttgaggctgccatgaactcggattgcgccactgcactccagcctgggcagcctgaggagcagattgagaccctgcctcaaaaaaaaagtttttcccctccaagacctggtgccagccgggtgcggtggctcacgcttgtaatcccagcactttgggaggctgaggtgggcggatcacctgaggtcaggagttcaagaccagcctagccaacatagggaaacactgtttccacaaaaatacaaacattagctgggcgtggtggcatgcacctgtagtcccagctactccgggggctgaggcggaagaatcgcttgaacccaggaggcggagcttgcagtgagctgagattgtgccattgcactccagcctgggtgacagagcgagactctgtctcaaaaaaaaaaaaaaaaaaaaaaagccctgtgccaagtatctgaggtagcggacagggagcatgtggacactaggatgctctgttttcacttcaagtaacccactcccagcagactggcttggggcattactcctcttagcataggcagcaatgaatatgctccaggatttgaaaaggtgcctcgtgtcaagctctgcccctcaaagttgtagcttttgtggctcaggtagtgaactaacttaatgtctcctaaaattaacttcatcctttctgattgacgtcaacccagcggccactgcatttggtcagcatgcattcagtgtgtgagagttaataaactgtttctttttttttaaattggcattaaaaaaattctagtccttttatttagtcccagttttagaatttttttttttttgagacggagttgcgctctgtcgcccaggctggagtgcagtggcgcgatctcggctcactgcaagctccgcctcccgggttcacaccattctgctgcctcagcctcccgagtagctgggactacaggtgcacgccaccacgcccggctaattttytgtatttttagtagagacggggtttcaccgtgttagccaggatggtctcggtctcctgacctcgtgatccaccggcctcggcctcccaaagtgctgggattacaggcgtgagccactgtgcctggtgccctacctttcttaatgtggacatcttgcataactacaggacatattcaacaccaggaaacagacactggtacacaccaccaggcatattcagatttcgttagatcgacatgcacgtgtgtgtgtgtggttctatgcagtttagcacctgtagctttgtgtaaccggttccctacctcagtcaagatacagaactataccatcatcacaaagctaccccttatagccatactcctgaaactaatctgttctccatctctgtaattttgtgggctcaaggatgtcatataaagggaatcacatcatatgtgatcttttgagattgcttttttccccctcagtacagtcccatcgaggtccattcaggctggtgcattgattgacattgtatttgagcaaaagataccgagaaaacaaaataactgctgaaattggggaaacaagaccataattatttgctatttattcagttattttggaactttcgtttgtttttacacaaatgacatatctgcagaggagagttgtatctaacttagtgaatgcatgtctttatgcattgctgttgacatgccaacactagaatattgttggagagacacagcactgctgaaaatgttgtcaggctctgagaattgactgcaaaacaatcaggactgcaaggaaagggaagaagtgataagtccttttgagaccggtcagtttgccaggaaaacaacttcaggcaggaaatgaccatttttatttctctacatgtggtgctggtgtggtgcagatgcttggaggcgttttctttaacccccccaggtcctcacatgaaggggaaacagatggagagatgttattagcaagatggcaaaaatgaatttccatggtcttgaagaaagtgatacagttttgctgcaggtttcacgataaattagaaaaattatcagtgctctgctcattgtggttggcataaaacttggtcccttccatttcttgtttttttttttttttttttgaggcagagtctccctctgtcacccaggctggagtgcagcggtgtgatctcggctcactgcaacctctgcctcctgggtccaagtgattcttgtgcctcagcctcctgagtagctggggctccgccaccaccacgcccggctaattttttgtattttttagtagagacagggtttcactgtattagccaggatgatctcgatctcctgacctcgtgagccaccacgccyggccaggttcaagtgattcttgtgcctcmgtctcccgagtagctgggattacaggtgtctgccaccacgcctagctaatttttgtggagacgtggtttcaccaagttggtcaggctggtctcgaactcttggcctcaagtgatccacctgcctcggcctcccaaagtgctgggattacaggcgtgagcccctgtgcctggccatttctgttaactttcttgaaattagataccctttgaattgtgtttcagtgggactaaagttaaattttatttgttcatgcaattccagttatggagtcataaattagatatggagaaactgaacactaaattttaaactctgcttaaacttcagtataaaaattaaacataaagttatactgattttcgtgcagacgagtgaagatcagcatcagaattggtcagtctgcttttgcatttcttaaataaccttcacagttaaaagctcattttgtccttttgactgtacattcctaaaaagtgctgactcttagaaaagaatgctctccttgcatgtcttcttttgcatgcttctgcataatgtgtgttccttagaaaccagtttaggaaatgtgtcatggtggctatggagagaaggaaggaagtccttgctcgggttgaatttttcttgccaaggttggtggtcactgcttctgggacaccctggttctcttcacagtgttttccgtctggctcctctgaaggtcaggatcactttcttttatgacaagttgaagtgtcctggtggtgaacatattttgtgccagatacttactattacttctctttcctcttaaaatgaactgttacttttggtaacaatctgtgtcaagattttgtagtagaagagttcctggaaaggctgtcagtgaaggattaaatggcatttccttggctcttaaaaaaatcaaatacgccgggcgctgcggttcacgcctgtaatcccagcacttcgggagtccgagccaggtggatcacctgaggtcgggagttcgagaccagcctgaccaacatggaaaaacatgtctctactaaaaatacaaaattagccaggtgtggtggcacgtgtctgtaatcccaggtacttgggaggctgaggcaggagaatcacttgaatttgggaggcggaggttgcagtaagccaagattgcgccactgcactatagccagggcgacaaagtaagactccgtctcaaaaacaaacaaacaaaaaaccccagaaatgaacagtttttaccaggccacatgatgtcccagacttagattataaaaccacatttgctgattctggcagcatgttccttcttcagaaccttcctgactttagcttgaaagctgagctggttgaaacgtcttgaaaagcagtatgtgcagttttgtcacgagagaatttccgggtgggtgggataggttgaggtgggtgttcccgtgtagaagtgggggctgaagctgtgtggtaagatgagctctgtgcttgggacagggttgtaagggtctggccaagacgcatagaagaaatagcatgtgagtaggaagcagccctattttaaatagcgccctggagacttgaattgggaagaggaccaagaagagtgtgaggcagtgagatgcccagcaccagggtgggagaggcgagttccagtgactcgtgggcactcaggagcggggatgaccccagagacacagggagcttggaaccatgcttctgtattcagacatgactttctgccagctttgcacgctttttcctgaaacattgttggcagaggggaacttgtatcttctgttcagttgattctygattttaaacgtttgttgccttttggagcctgcacttccccttacctggtgattggagtgtgggaatggttgggggtatcaaggcttcagcaggctgggaaggtggcaggagcacagggtgccaggggtgggctgaggggctggtgggtgctccgggattttaggaggagtgctgtgcccacagctgctgtgtgtccctgaggccagggaagtcctgactgccatgctagattctttctgccccatgtagctccctcagcgcccccaccccgatacctcaggaaactccaggtcgaaactccaggtcgagtggcagacctcctgctgggtgcgttcttaggaataacacttctagccgggggtttgggtcagatcctgattctactctcctttgtttcccacttttaaattttttatatttatatttaaaatttagagacagggtctcactatgttgcccaggatggtcttgaactccttggctcaagtgatcctcccccatcagcctcccagagtgctgggatttataggtgtgagccactgcgcccagccctttcccaccttttcaaattgtagccctgtcgagagcctggagtcttcatctttgcctgaaattcagactccgagttgtgatggttttgtgttcatctctgtgcttggcttcaggatactccccatttacctttcttctcacccaccctaagctttggtgtctgtctaygggtttgcttagaagtgtagagaccaacagccaacatggggtgcctggcttttgtttttgcgttgtggggtgtttttcttacctttaaaatccctctgatggcagcacaagggtgtaatgaggattagttatttagcatatctaaagaactttgagctccttagggcaggcggcactgtattaggatttatgttttgctttttctgtggaccgcctttgtgtttcatgtaatgtagctgaaatagcaagtacgtgtttcttttcttttcttttttttttttggagatggagtctcattctctcacccaggctggagtgcagtggcgcaaycttggttaaccgcagcctctgtctcctgggttcaagcgattctcctgcctcagcctccggagtagctgggattacaggagcgcaccaccatgcccggctaatttttgtatttttggtagagatggggtttcaccatttttttttttttgagactgagtcttcctctgttgccaggctagagtgcagtggtgcgatctctgctcactgcaacctctgcctcccaggttcaagtgattctcctgcctcagcctcccgagcagcttggactacagatgcgcgcaccaccatgcccggctaatttttgtattttttttagtagagacggactttcaccatgttgaccagaatggtcttgatctcttgaccttgtgatccgctagcctcggcctcccaaaatgctgggattacaggtgtgagctaccgcgcccagctggggtttcaccattttggccaggctattctcaaactcctgacctcaagcaatccacccacctcggcctctcaaagtgctgggattacaggcatgagccactgtgcctgggcggttttgaatttttagtagagacrgagtttcgccgtgttggccaggctggtcttgaactcctgacctcaagtgatgcgcctgccttgggcccccaaagtgttgagattacragtgtgagccactgtgcccggccagtttttttttttttttttttgagatagagtctcgctgtgttgcccaggctagagtgcagtggtgtgatctcggcttactgcaaccttcgcctcccgggttcaaacaattctctgtctcagcgtcctgagtagctgggattgcaggcacctggctaattttttgtatttttagtagagacggagtttcaccatcttggccaggctggtcttgaactcccgacctcgtgatccacccgccttggcctcccaaagtgctgggaattacaggcgtgagccactgcgcccggcctattcctttttttttttttttcccccaggcggagtcttgctctgtctcccaggttggagtgcaatggcactatctcggctcactgcaagctctgcctcctgggttcatgccattcttctgcctcagcctcccgagtagctgggactacaggcgcccaccaccacgcctgcctaaatttttttttttttatttttagtagagacggggtttcaccgtgttagccaggatggtctctatctcctgacctcgtgatctgcctgcctcggcctcccaaagtgctaggattacaggcgtgaaccactgcgcctggcctttttttttttttttttttttttaaagatatagggtcttgctgtcgcccaggctggagtgcagtggtgtgatcacagctcactgcagcttcgacctcctggactcaagcagtcctcccatctcagcctcttgagtagctgggcctacaggacatgccaccacacctggctaattttttaaataaataaataaattagttatttattgacagggtctcattcgcattgcccaggctggagtgcaatgttgcaatcatagcttacttcagccttgacttcctgggctcaggtgatcctcttgcctcagcttcttgagtggctgggaccacagccacacctggctaatttttaaaaaacttttttgtagaaatggggtcttgctttgtagcccaggctgataacgaactcctaggcttgagtgatccacctgcttcagcctcccaaagtgctagaattacaggtgtgagccaccacgcctggcctggtttattattagatgcttgacgttgtgaatttcaccttcttagagcagaatatttttgtgtttcttttaatattcttgagcttggttctgggaggaggctaagtaccttgggaacagtgtgattcctacaaggcagcaccaccgcagcctgtagtctggggctagttttacctcactcgaggcagtgtcttctctgaatgcttcttgaggccgttgtttgatgtggtttttcctccggctgctgggcctgtgctgcggcaggggctcttctctcctctttcctgagactcttccctctgctccagggagtttcctttatttctatttaatgtatttatatttgtttatttattgagatggagtctctgtcgcccaggctggagtgcagtggcgcgatctcagctcactgcaacctctgcctctgggttcaagtgattctcctgcctcagcctctgaagtagctgggattacaggcgcccgccactaygcctgcctaatttttggatcttgagtagagacggggtttcactatattggccaggctggtctcgaactcccgaccttaggtgatccgcccgcttcggcctcccaaagtgctgggattacaggtgtgcgccaccgtgcccagcctattgttatttaccactgaccacagcgcaacaccattgtccgtctccagaaagaggccttcagtgccgtgagcgcatgtcagatctctgccatcttctcaaagcacactttgaacagtatcttttaaaagttcacttttggggccaggcaaggtggttcatgcctgtaattccagcactttgggaggctgaggtgggaggatctcttgagcctaggaggttgaggctgcagcgagccacgtttgcgccattgcgcagcctgggcgacaggatgagaccctgtctcaaaacaccaccaccaaattcacattagcctacagttgggcaaaaccatctaacacaaaccctatgtataaaaaaggattgaatatctcatgtaatttattgaatactgtatgaaagtggaaaacaaggtgattgggcacttgatgtacgatttctactgagtgcgtgttgctttcatgccattgtaaagtcaaaaaatcgttcagcttcaccatcacaaattggagactgtctatacttatttacagataaggaaactgtggcgtggagaggttgtcagttagcctaagtcccggagctcccgagaggtggagctggagcttgaactgtgtcggtttgcccctgagatgcctgcctgccacctttctgcctctgattgcctggagcaccaggcagccaggttatgcttctgcctggagggagcagtctcatttaaaaacaagaaacaaaacgcatgcttattggtttgtctttcctgtgacttctctgtgcccctttgcatttgatgagtcactggggtgttgctttatgatggtgacagaccctctgttggggcctctcacctgggtcgcctgtgtgccggctggtgccgcacgaaggccagcctttccttacagatgctgccttggctacaccgaccctccctgtggcttctcccatcgcctgaagtccccaccaaacccctatacgatactgaggttttaaagcttttgaaattatgtttatcccgttaaccccttgtagtttattttcttgtgagatrggtctccatcattcctcgcatcgattaccaaatatgttctagaacatttatgaggtaatgcttttttctccttgcaatgcatcgtcaactgtattctcaaatgtttgtatgtttttttttttttttgagacagagtctcactctgtcccccaggctggagtgcagtggcgcgatcttggctcactgcaagctctgcctcccgggttcacgccattctcctgcctcagcctctcgagtagctgggactacaggtgcccgccaccacgcctggctaatttttggtatttttagtagagacggggtttcaccgtgttaaccaggatggtctccatctcctgacctcgtcatctgcccgccttggcctcctgaaatgctgggattacaggcatgagccgctgtgcccggcccaaatgtttgtatgtttttacagactccttctgtrctttctagtctgttctatgaaaatgttgatatgtttatttttagttattaggaagtaactgggcaggtcttcctaatagcgtttattcttgtgactttcttgtctaggcttgtccttacttaaatgttttaaaagattaaaaaagttaaagaatgtagtttaaggccaggtgcggtggnnnnnnnnnnnnnnnnnnnncaccattgcactccagcctggcgacagcaagactctgtctcaaaaaaaaaaaaaaaaaaaggtttaagaagttaattataaaacattgcccctgccttgcccacatttctaaacctgagtgaattattttcattttatagctgtttcttcttaaaaatttactttaagaatgattgctttttaagtctaaattgtgtgttcctactatttatgggtgttctttcccccatttagtcattacttattgactttttttgagacggggtttcgctctgttgcccaggctggagtacagtggtgggatctcggctcactgcaacctctgcctctcaggttcaagtgattctcctgcctcagcctcccgagtagctgggcttacaggagcctgccacactcccggctaattttttgtatttttattagagacggagtttcaccatgttgaccaggctggttttgaacccctgacctcaactgatctgccctcctyggcctcccaaagtgctgggattacaggcgtgagccaccgtgcctggcctgtttattgatgccttactctagaagatgagtcttttaactcttgctcaagtttctcttctcctgtacttgtatatgtgtaatattttacctgattaatgtctatttcatgtctgaaagtactgttctcagccgagaataacagttcaacttttgggtcagtttttaatttttttgaaagttaatgattgccttttgttttgcttacttttttttttttttttttttttgagacagagtttcactctgtcacccaggctgtagtgcagtggcgcgatctcggctcactgtaacctcttctgccgggttcaagcgattctcctgcctcagcctccagagtagctggaactacaggtgtgtgccacctgtctggttaatttttgtgttttttgtagagacggggtttcgccatgttggccaggctggtcttgaactcctgaccttaagtgatccacccgccttggcctcccaaagtgctgggattacagccgtgagccactgcgccggcccgtgtctgaaattttaagacgatgtgctcaagtgtggcatttggtggccttattcaatctggaaacttatgtcttttgggctctagtggaaaatattcttgttgtattttgttgctaacctcttctgtttcatttcactttctcttttctctgtatttctctatggtagttgaaattatacctcctggtgtagattttcctgcctttctgcctttcgcgttctgtttccacgactctcaagtttgtcctctagcccttgttttgcatttttaatttctgctgtcagttttatagcttgagagctttctcatgacccaagtgccccttttttggtggcatctgtttctttaagctgtattttatctcgtctgtgtaaaggtgtttcctttggcgtttccttctgtgcattgtctcattgctttgaatgccttttgtgtaggtttgtttggtctctggcccatgctgtgaggttctgagctctcactttgtgcttggtggctggtggctgtccacccatgtgtaccagtgcctgccaacctgaagggctttggcaggggccttcgctgcagggtgaggtctgaggaggagcctgaatgctggttcagttcttccagaggactctcgactctcttctcttgcttggtgagcaggtgggtgttgtgagcccggctgccatcattctgggatggggcatctcacccctcggggagtctgtcactgcgctgtgctgctctcacgaggccccttgctccacactccgtggagctcggagcttttgtgttctcacttttccagcttgtctttttctgagatgggggccgaggggcctgcctggctgcagggtctcatggcagggatctgctgctctctgtatagacttgaagcccatcctcctgacatcggtctcctgaggttcctttcattcccaagccttttcgggttctctgttcgagacggtttgcttcttaatttgtcttccctcctgcaggtagctggggtgcagcttgctctccttggctgagtcagttactgcttgaccattgcttgrcaatgtccaggattgtgataactctattgtccttgatgactgattgtttctacacacatgccccggcccccatttatgacttctgatatattcttgatttatcactgcctgagagaaggctttggggaggaataatttgactttatgtaatttttattttttttagagatggggtcttactatgttgcccaggctggtcctgaactcctggcctcaagtgattctcttgtctcagcctcccaaagtgctggggttacaggcatgagccactgtggctggctgctttcttattcttttttttttttgagatggagtctcactctgttgcccaggctggagtgcagtggcgtgatctcggctcactgcaatctctgactcccaggttcaagcgattctcccacctcagcctcccaagtagctgggactacaggcatgcaccaccacgcccggctaatttttgtatttttagtagacatggggttttgccatgtggctaggctggtgttgaactcctgatctcaagtgatctggtggccttggcctyccaaagtggtgggattacaagcatgaaccaccatgcccggcctctcatgcttaaatgaagtagtaatacctgaccttttattttttatytatttatwtttgagatggagtctcgctctgtcacccaggctggagtgcagtagcgtgatcttggctcactgcaacctccgcctcccaggttcactccattctcctgcctcagcctcctgagtagctgggactacaggcgcccaccaccatgcccggctaattttttgtatttttagtagagaggggggtttcaccctgttagccaggatggtctcgatctcctgacctcgtgatctgcccgcctcggcttcccaaagtgctgggattacaggcgtgagccaccgcgcttagcaatacctgaccttttagtaaatcaaatttgggcaggtggttctgagagcttgtgtggcatgtatttctcagtggaattttaaatagaatggtgactcggcatttattccttgtctgaastaagcaagtaggaaggaccttgttccccattcaagggaatgaacggtgtggtatgtactttgcaaacctacgtatgggattagtctgtagtgctctgaaacctagaaatcaaaggaaaggcatggggcctttgaccgactgacctttgtttcttgctggtaatagaatatagtaaatggaaatttatctcagtagtttagtcagtagattctgttattggtaatgatgggtgagtccaggggagtttggatacttgaattttccagagagatttgtttaaaccctgaactgaaatgttttttctcatgtattttttgatgactttaaaaaataatttcagcctttattttagattcygggggtaaatgtgcaggtttgttatgtgggcatattgtgtgacaccaaggcagtttatcatggtggatgataaaaggggactcccttaggtcgagtgttgctgaaagacctctctgcggaagtgacatttcatctgggtcctgaagctgcctgggaccagccttgtcccagcctggaggggagaagggcttgaggtggtagagagccagttgtgtttcaggacctgagaggctgtactgttggaactcagtgagcgaggagaggagctggcataagccggattgctgggggaggccagaacgtgctgggccttgaaggctccggcatgagtctgattttatcctgggtgccttgtaggaagctgccaaaggaaagcgagtgagtaacaggtctgatgtaattatatgacaatattacactgtagcaggacaagccacagacaaaacccctcagacaccgagttaaagaagggctttattcggccgggagctttggcaagagtcaaatcttcaacagccgagctccccgaatgagcaattcctgtccctcttcagggctcacaactctaagagggtccacgtgagagggtcgtgatcgattgagcaagcagggggtatgtgactgggggctgcatgcacctgtaattagaacggaacaggatgggacagggattttcacagtgcttttctatacaatgtctggaatctatagataacataactgattaggtcaggggtcgatctttaactacgaggcccagggtgtggcaccgggctgtctgcttgtggatttcatttctgccttttagtttttgctkcttctttctttggaggcagaaattggsaataagacaatgtgaggggtggtctcctcccttaatgccagcttctctgtggaaagtaggttggaggtgagtggaaggtgaaagctgcgaagagtcccaactggagatgcaggtggcagcggagatggcgagaataggagagtccgaccggagatgcaggtggcagcggagatggcgagaataggagagtcccgaccggagatgcaggtggcagcggagatggcaagagtaagagagtcccgaccggagacgcaggtggcagcggagatggcgagaataggagagtccgaccggagatgcaggtggcagcggagatggcaagagtaagagagtcccaactggagatgcaggtggcagcggagatggcgagagtaagagagtcccgaccggagacgcaggtggcagcggagatggcgagaataggagagtccgaccggagatgcaggtggcagtggagatggcgagagtaagagagtcccgaccggagatgcaggtggcagtggagatggcgcgagtaagggagtctgactggagatgcaggtggcagcggagatggccggaatagagcactcgtttggaggaaaagcggacaggtcgacaggatggatgtgatgggggccccgaaggagaggatgctgtagagactgacatggcacctctggtgatcccgtcgctcaggaaatgctcgttgttttccagctgtgttgctcagaagctcttgggacagtttttggtgcattatgagcactcagagatgtggtgctattgctgggtacctgctgtctgcagagcatttattcttaccaagtatttattgagagcctgctacaatgccaggcacttcccaggattctgggactatggcagggaaaaaacaactccgtgttcacatggagcttgcattctagtggacagagatcgaaaagaaaaacakagtttagtgggatgttagaagatgataaacacaacagagaaatatcattctagtggatagagatcgaaaataaacacgaaatttggtgagatgttagaagatgataaacacaacagagagatattaaggggggaaggtgattgggtaaatgagggtataggtgttcaattttaagtagaatgatcagggccggcccttctgtgaaggcagcagttgagcaaggacctggagctagtgaggcagtggccacgtagaagttagtggggagggcgtcttggcagagggagtggtaagtgcagaggcctttgtcggggaggatgamtgctgcacrgaagaaacagcaggaggcgcatgtggctttaggacagcaatcctgggtggaaaggcagtagggggttaggttggggggaatgaaggtgggggacaggtggagtagggcctttcctagagctttataaagactgtggctcttactagaatgctaaacactgagtatccttgagtagctcaggcctttgtaatgcagagtggtgaatggtgtgaggggtgaacagcttcggagaggtcaggcatggaatgcaggggtgatgcttggctcaggtcttgctaggctgatgggatgtgggggatggtctggaaagggtgggcagtcccgtgtgccacgctgcagagaggcatgagcagcagcaggacacatgtgatacattgagggtgactcctagcgtgggtagggcctagtggggcacgggaatgtggctggagaccaaggtgggagaggcagccaaaaccagatggtaggacctcctgtctaggatgtgggctgtttaagtattttaagcaggggaatgacactcaatttttaaaaatttttttgagatggaatctctctcgtcacccaggctggagtgcagtggtatgatctcagctcactgcaacctccacctcctgggttcaagcgattctcctgcctcagcctctcgagtagctgggattatgagtgctgccaccacgcctggctaatttttgtatttttagtagagatggggtttcaccacattgggcaggctggtcttgaatgcctgacctcaggtgatccgcccgcctcggcctctcaaagtgctgggattacaggcatgagctaatgcatccagcctcactttctgttttgctggtagaatagtcattttgaggccaggcayggtggctgaggtctgtaatcccagcactttgggaggccaaaactggaggatctcttgagttcaggagttcaagaccagtgtgggcaacttagtgagaccttatctctacaaaaaataagaacagaaaaggaaaagaatggtcattttggatatagaggatgggttttaggtgaggcttagaggcaggaaagccagttaggaaaagatggattgctttggtccagaggagacggcgaggatctggagtggaaaggtaggagtgacatgtggaggtttagaaaacagaatcaacagaggcatgcatgctaaacattcttcattcgtgacagctttgagtctgcatcagaaatgccacttagccggaatggtggagtgaggcctctgtaatccartcctccataaaagcagtgaaaacactggcaaaaatggtcaaaatcaactgtcagaacgcgaaattaaccaacggttgcgacactctgaggagcttttatctgtgaacaactgtggcacctctaactcaacctcctcccattctcttctccccagctcygtggtaaccatggaaaccagctgccttataaccatggtagctgggaaagccagcagcctagcagcyactggaggggacacatgaaggctggagctcctcagcaagtcccggctgcagagcatgtcactctcggacctgtcccacttactgagcttgccatcgtatgagctagctcagtgtgaaaaccctgtttctgaaagagagactgtcagttgagaattctgtgtccagtaaaactgtcctttgaaaatagagraattggctgggtgtggtggctcatgcctgtaatcccagcactttgggaggccaaggtgggtggatcatctgaggtcgggagttcgagaccagcctggccaacatggtgaaaccccgtctctactaaaaatacaaaaattagccaggcgtgttggcgaacgcctgtaatttagctactcaggaggctgagtcacgagaattgcttgaacctgggaggcggaggttgcagtgagccaagattgtgccactgcactccagcctgggtgaacagagcaagatcctgtctcaaaaaaaaagaaattaagatatttccaggtaaacaataaacagaggacatttgttgttttagccaacctcccttataatacatactgaaaggaatgtctcaggctggaatgaaaggacactaggtggtaggatacgtgaagaaataaaagaacaacggtgaagacagctacatatgtcaagttaaaagacaatgtaagtgcacttttgtaacttttagtctcctgtctttttttcttttcttttttttttttttttgagacggagtctccctctgtcgccaaggctagagtgcrgtggcgccgatctcggctcactgcagcccccacctcccggactcaggtgattctcctgccttagccttttgagtagctgggattacagactcccgccaccaggcccagctaatttttgtatttttagtagagacagggttttgccatgttggtcaggctggtctcgaactcctgacctcaggtaatccacctgccttggcttcccaaagagctgagattgcaggcgtgagccattacgcttggcccctatctgccttaaaagacaactgtacaaagtaataattataaagctgttttgataggcttataacatataaaggtgtgatttgacagttacagcacaaaagagaagtgagggaagagctttataggagcaacatttctccgtaccattagaattaggtttgtgttaatcaaaactggattgttttaagttaaggtgctagttggctgggcgcggtggctcacacctgtaatcccagcgctttgggaggccgaggtgggcggatcacttgaggtygggagttcgagaccagcctggtcaacatggcaaaaccccatctctactaaaaatacaaaaattagytgggcatggtggcgtacttggagacaggccagatgtagtggctcacgccgcctgtaatcccagcgcttttgggagaccaaggtgggagggtttcttaaagccaggagttcgagagcctgggcaacaaaagtgagacccccgtctctacaaaaaaaattagccaggcccagagatgtgcccttatagtcccagttacttgggagactgagacaggaggattgtttagcctgggagtttgaggtgcaatgaactatgatcacgcccctgcacttcagcctgggtgacaaagcaagacattgtctcttaaaaaaacttggagataaatgcaaataaaaacacagcattccaaaaattatacactgcagtgagagcagggctgagggggaagtttataactgtaaatacctacattaaaaaagatctcaaatcattaacctgtgtttcaccttaagacaccagaaaaagcacgaacaaaacctaaaacaagaaggaagaaaatagcaaagatgagagcaaagattggttatttgaaaagatcatcaaaattggcaaacttagtgagactgactgagataaaaagaagactcagattgctaaaagcaggaatgagaggggagattattattcaccttacagaaataaaaaggattataagagaattccatgaataattgtgtaacaaaatattagataacttagttgaaatggacaaattcctagaaagtcgtgaccgaagctaactcaagaagaaatagaaaatctgaatagttgctcactttggcaacacatatactaaaattggaacaatacagagattagcatggcccttgtgtgagaatgacacacaaatttgtgaagcattccataaaagaaaacctaaatagacttataataagtaaatagattgaattaataatttaaaaacttgtcacggccgggtgcagtggctcatgcctgtaatcccagcactttgggagtctgaggcactcggatcacttgaggtcaggagttctagaccagtctggccaatttggtgaaaccccgtctctacgaaaaatataaaaattacccaagtgtggtggtgcacrctggtaatcccagctacttgggaggctgaggcaggagaatctcttgaacccaggaggtagaggttgcagtgagccaagatcgcaccattgcattcaaacctgggcaacgagcgaaactccatctcaaaggaaaacccaaaaactgaaaaacaagatcttgtcacaagaataagctctgggccaggtggcttctctagaaaagtcacacttactgagcttgtcattatttgagttctaccaaacacttaaagaattaataccagtcctggccgggtgcagtggctcatgcytgtaatcccagcactttgggaggctgaggtgggtgatcatttgaggtcaggagttcaagaccagcctggccaacatctctactaaaaatgcaaaaattrgatgagtgtggtggcacgcacctttagtcccagccacttgggaggctgaggcaggagaatcgcttgaaaccgagaggcggaggttgcagtgagccgagatcatgtcactgcactccagcctgggcgacagagagagactctgtctcaagaaaagaattaataccagtcctttacaaactctttggaaaagtaggagggcatacttaactcattctataaggccagtattatgctgataccaaaactagacaaagacatgacaagaaaggaaaattacaggccattatcatgaatatagaaacaagaatcttcaaccaaatgctagccagttgaatccagcaacaacgtataaaaaggattatacaggccgggagtggtggctcacacctgtaatcccagcactttcggaggccgaggcgggtggatcacgaagtcaggagatggagaccagcctggccaacatggtgaaaccccatctctactaaaaatacaaaaattagctgggtgtggtggcatgygcctatagtcccagctactcaggaggctgaggcaggagaagtgctagaacccrggaggcggtgttggcagtgagccgagatcacgccactgcactccagcctgggtgacagagagagaytgtctcaaaaaagaaaaaaaaaaaaaacaggtttatacaccagattcgagtgagaattgtcccaggaatgcaaggttggcttaacatctgaaaatcaatccatgtaatacttcatattaataccataaaggaygaaaaaatgcctggtcatctccatagatgcaaaaaagaacaggattggaggattcacatgctgattccaaaacttaatacrcaaatgattaagatagtataatactggtataaggacagatacgtagatactgagataataatattgagagtacagaagtaaacctttacatttgtggtgaattgattttcagcaggagtgccaagataattcaatggtgggggaaaagaatagtcttaaacaaatggtgctgggatgactgaatctccatgtaaaagtatgtaaatggactcctaccttacactatgcacaagaaataactccatggatcataaacccaactgtaagagctaaaactatgagactcctaccaaaaaaacaggagtaagtttytgtgactttggaatatggttttttttttttttttttgacagagtttcgctctgtcaccaggctggagtgcagtggcgtgatcttgtttcactgcaatctccacctcccaggttcaagagattcttctgcctcagcctcctgagtagctggggccacaggcctgcaccaccatgcccagctaatttttgtgtttttttgtagagatagggttttgccgtgttggccaaacgccattcgcttgcctcggcttcccaaagtgctgggattacaggtgtgagccactgtgccctgtctggaatatgatttcctaggtgacaacaaatgtgcaaatgacaaaaaaaaagttaatctggacttcataacgtgtgctacaaaatactatttagaaggtgaaatggcaacctgagaatgagagaaaatatttgaaaaccgtgtacctgataaagggctcgttatytagaatatataaaaaacttcatgaagacaactaaattaaaaaattgatgaagtgttaggggctgcgggtgtggtggccatacctgtaatcccagcattttgggaggctgaggtaggtggatcacccgaggtcaggagttcaagaccagcctagccaacatggtgaaaccccgtctgtactaaaatacaaaaattaactgggtgtggtggtgtgcacctgtaatcccagcttcttgggaggctgaggcacaagaatcacttgaacctgggaagcggatgttgcagtgagccgaggtcatgtcactgtactccagcctgggtgacagagtgagactgcatctcaaaaaaaaaaaaaattgatgaagtattaaaatatayatttcttccaaatagatttacgaatgttcaataagcatataaaagctatcagaaaaatgcatatcaaaatcacaatgagatactgcatcacacttacccagatggctgtaataaaaaagatgaggccaggcactcccagctgtaattccagcactttgggaggccgaggtgggtggatcacctgaggtcaggagtttgagaccagcctgaccaatatggtgaaaccccacctctactaaaaatacaaaaattagctgggcgtagtggcaggcgcctgtaattccagctacttgggaggctgaggcaggagaattgcttgaacctgggaggtggaggttgcagtgagccgagatcgtgccaccacactccagcctgggtgacagggcgagactccgtctcaaaaaaaaaaaaagaacgtgtgagtttatccttggtgatgggcacagtagcttctcgtggctggaccagtgctttgctccttatttcacacttctcatcacagctctttcattgatggcacacccatttgaagaagagaaaccgaggcaggttgcggttaagttgatagcccagggtcacgtagctagtaaaacatggagtgacattccagtccaggcctgatttcagagtttgcttggctgactgctgtgctaaccaccttaatagtaattttagcaattatagcttccttcaaaaattcttgggcttggtcaattttgggcttttgggttactcggcggaatcactttatttctttgagacagagtctcaccttgttgcctaggctggagtacagcgatgctgtcctggctcactggagtgttgacttcctgggctcaggtgatccccccacctcagcctccctagtagctgggaccacaggcatgcaccaccacacctaattttttaaaaaattatttatggagaccaggtctccctatgttgcctaggctggtctcgagctcctggactcaaaacagctctcccacttcagcctcccaaggtgctgggattataggcgtgagccactgcccagtctgaaatcactttatatacagactaaaactctgtagaccaagttttgctgcacattgcaaggacagaagattttggtactttggtattttataatcatctgtcataggctcctttactattttttgtggaacttgggctgttcccagaatactaatcctctctgttgattagttcagcctgtaaacaagaaatcattaaccagcatgctgttcctgaagaatgaccagggacaataattgtaaaaattcaagagcttttatccaagcctgcccctatagagtgtgttctttgctacttcatggaatgcaaattgtaacttgcttttgccagtagctatggcatgtccaggttactcattagccaccagagctcctaagttcactgcgagaattccctgatgcaagtacagtacccttagtgctgatgggctggctgcakttcagacaggaatagtgcaggatgactgtggccagcgtctctttaacaaagatcagactgtgtgtggggctgggcttgttgctgtgggtcagttactctttaacaaagatcagactctgtgtggctgggcttgttgctgtgggtcagttactcttgctcatgctttaccctttcagaattcagctcctccccgcttctcctcaagctaatttatctaaaaagataagatttttttgctagatctgttcccggcacggtggggtggttgaagtcctcctgtgaggccctctgccttatggagatcagtgcagtgtcagtggcacgaattggtgcctggccaggagcacgctctgctcctttacaggagagcccctgacaggcactggagggctcagattgttacctgcgtccgtcatgactgcaggggtgctgcgttgatcatgcagcttctactagagcgtttttggtaaatttgggacatggtagttgacttgaatgtgtcagtcttgcctgcaggtcatcatccgtcatctcagccatggtcgtgctggattgtctttcttgtttttgagacagcctctctctctgtcacccagtcgcccagtctggagtgcagtggtgtgatctcggctcactgcaacctctgcctctcgggttcaggcaattcttccacttcagcttccccagtagctgggattacagrcgcacgccaccatgcccagctaatttttgtgtttttactagagacaggatttcaccatgttgcccaggctggtctcaaactcctgacttcaagtgatccacctgcctcagtctcccaaagtgctgggattataggcgtgagccactgcgcctagcctgaatgcgtatttttatgtgaaattagttttcctgaactgtcagaggaggcatggtctgggtggcttttctaccgtaagagcccccccccmccattgtcttcacacagtggcctgcctggcagctgcagttggaagtccctggctccgtcctggctccgtctgcctccgtctgcctccgtctgcctgctgtccctgcacctccccttttycctgcttttgcrtcgtctctgctcagtaggggcgctgggccaggtcactccatccctggttcttgcatcatgctcagccctctgtggatactggggctgcttaggctctcctgtcctcaggtctggccgagacgtgacactactcttctctctaccttctctctttttttttttttttgagatggagtcttgctctgttgcccaggctgtagtgcaatggcgcgatctcggctcactgcaacctccgcctcctgggttcaagcgattcttctgcctcarcttcctgagtagctgggattgcaggcgcctgccaccatgcctggctaatttttgtatttttagtagagacgrggtttcaccatgctggccaggctggtcttgaactcctgacctcaggtgatccgcccgcctcagcctcccaaagtgcagacgtgagycactgtgcctggcctctctaccttctcttgcacagacatgatgccgtgaggttgtacggccgttggtggctttccttttgagggagctggagctcagaggcacagcagaatgagtcaaaggctgcacttggattcccacctcacttggattcccacctcacgtgctggccccaaagttcactcttgtcatcaccttccatgcttctccccctcctcaggggctggcctgccctcgttttaaagtgtgtgtgtatgcgtatatttgtatttatgcatgtgtgtgtacatgtgtgtatttgtgtgtgtgtatgtatttgtgtttatgtgtatgtatgtatatgtgtatatatgttgtatttgtgtttatatttgtgtatatatgttgnnnnnnnnnnnnnnnnnnnnnnnnnnnnnnnnnnnnnnnnnnnnnnnnnnnnnnnnnnnnnnnnnnnnnnnnnnnnnnnnnnnnnnnnnnnnnnnnnnnnnnnnnnnnnnnnnnnnnnnnnnnnnnnnnnnnnnnnnnnnnnnnnnnnnnnnnnnnnnnnnnnnnnnnnnnnnnnnnnnnnnnnnnnnnnnnnnnnnnnnnnnnnnnnnnnnnnnnnnnnnnnnnnnnnnnnnnnnnnnnnnnnnnnnnnnnnnnnnnnnnnnnnnnnnnnnnnnnnnnnnnnnnnnnnnnnnnnnnnnnnnnnnnnnnnnnnnnnnnnnnnnnnnnnnnnnnnnnnnnnnnnnnnnnnnnnnnnnnnnnnnnnnnnnnnnnnnnnnnnnnnnnnnnnnnnnnnnnnnnnnnnnnnnnnnnnnnnnnnnnnnnnnnnnnnnnnnnnnnnnnnnnnnnnnnnnnnnnnnnnnnnnnnnnnnnnnnnnnnnnnnnnnnnnnnnnnnnnnnnnnnnnnnnnnnnnnnnnnnnnnnnnctttattattgcttaaaaaagtgacttagggccaggtgcagtggctcacacctgtaatcccagcactttaggaggccaaggtgagaggattgcttgagctcaggagatcgagaccagcccaaataccgtagtgagaacttgtctctattttttcttttttctttttttttctttctggggatggaatcttgctctgttatctcgcctcactgcagcctctgcctcctgggttcaagtgattcgtctgtctcagcctcccaagtagctgggattacaggcatgcgccaccacgcctggctaatttttgtatttttagtagagacggggtttcgccacgttggctaggctggtctccaactcctgacctcaggcgacccacctgcctctgatgaggcaccaccatgcctggccatatttttaattttttaaaaaatagaataaaaagtgacttaaatgtacacaaagttgtttttgcacacaactcaccttaccctgtgtgatgaataattgtattttgacagtgcttgttaaacatgtgtatccctattaaaatcacttgtactctttaagcctcagttttcacagctggtccaggtagagttaaactacacgtggtctcatctctctcccttgcctggcttgtgacatacatgcaagtgtttgttgagcgaggtccctttagcaatagatttagcgtgtactgaaagtttgattgtcacacatctaatgtgcrttttccctcttttgtacaatggagaattcccacatttcatgggtgtgagctgaaaaaaagacttgaagctaacattcctctgctgtcccactacaacacagaagacttctgtgaccccagaatatgtgggggtttctccccatcggcaaacaagctatcagttctgcagcaggcaccagcggggtgtcctccagcttgattctgacaccgtctacctggaggtagtgtcagatcctgcaggggagtcccagggctaccccctacttctcatgttagcctcaagcctcaggttgtgacctgtgcttgtgcatgacagactgtgaatggacatctcacgaccccctctttggattcaattagtttgctagagaggctcacagaactcagggaaacacatttatttgatcataaaagctagtatgaagggtgcaggtgacgtgatgcgtagggcatggtacygggccatggccgctccatgtccctccagggatccccatgtgttcagttatctggacgttccccaaaccctgtcctcctgggccttttgtgcagacttcattggataggcatgattgacagctgtgtacaaatgggactggaccaaaagggtgtgatctaaacccagcagggcctgtctgtgcagattcttcccggcctatctgtgcggcgttccttcccccggggtgtggggcagggccccttcagaaatgtgggtcttgtgacccacagtcagacaaggtaggtcagagaatttatggccagctccacgacagaaaggctgggggtggttagagtcccttgttagtcttatggcctgccttggggaaaaaataacaagagctgtgagagttttgagccaggaactgtagatgaaaaccagtatgtatgtataatatcacaattggatattatgcaagtggacttgtcagattttgtaggaaagccctcatgttcctaccaacaactgtttgccctgcagcacagacctgctccctgtatcgtaatccctcctagcttcatctgctttccttacacagcacatggtgattaaataggtgtgcgactgcttggtcagtaacagtcttctgccagactgtgtcttccgtgagggtaacagagaccatgtctgtttttgctcatccttgtgccttggtgcccagcaccatgtgtggacagttgtaggtgctcagtggatatttacggaacaaatgcatcagtccgtctttaaggttccctctagctgtggaccgagttgcctccgtggctccaccccagttcatatgctgaagccccaaccccagtgtgactggatttggagacagggctttcaggaggcatttaaggttaaatgaagtcatagaggtggggtcctaatcctgtaggattggtggccttgtaagaggaagagagagcgtgctcgcttcataagcatgcgtcaaagaaaggccacgtgagcacacagaaggtggctgtctgcaagccaggaagagagccctcaccagaaaccaccctgctggtgtgttgctcacaggcttccagcctgcaggcctgtgagaagatgaagtgtttcagccgccccgtctggggtgttttgtcatggcagccggagcagactaagggacctgtagccctgacattccatcattttatgaccatgaggaattacagatcctgggcattgctttcaaatgagacacatgaaattgaaatgtgtcagttcaggtattttgattgccattggggatggataagccaaaaagaaagactattttaaatgactagatttgacaacagataggttgtagtgtctatcaacagatagactgaatannnnnnnnnnnnnnnnnnnnnnnnnnnnnnnnnnnnnnnnnnnnnnnnnnnnnnnnnnnnnnnnnnnnnnnnnnnnnnnnnnnnnnnnnnnnnnnnnnnnnnnnnnnnnnnnnnnnnnnnnnnnnnnnnnnnnnnnnnnnnnnnnnnnnnnnnnnnnnnnnnnnnnnnnnnnnnnnnnnnnnnnnnnnnnnnnnnnnnnnnnnnnnnnnnnnnnnnnnnnnnnnnnnnnnnnnnnnnnnnnnnnnnnnnnnnnnnnnnnnnnnnnnnnnnnnnnnnnnnnnnnnnnnnnnnnnnnnnnnnnnnnnnnnnnnnnnnnnnnnnnnnnnnnnnnnnnnnnnnnnnnnnnnnnnnnnnnnnnnnnnnnnnnnnnnnnnnnnnnnnnnnnnnnnnnnnnnnnnnnnnnnnnnnnnnnnnnnnnnnnnnnnnnnnnnnnnnnnnnnnnnnnnnnnnnnnnnnnnnnnnnnnnnnnnnnnnnnnnnnnnnnnnnnnnnnnnnnnnnnnnnnnnnnnnnnnnnnnnnnnnnnnnnnnnnnnnnnnnnnnnnnnnnnnnnnnnnnnnnnnnnnnnnnnnnnnnnnnnnnnnnnnnnnnnnnnnnnnnnnnnnnnnnnnnnnnnnnnnnnnnnnnnnnnnnnnnnnnnnnnnnnnnnnnnnnnnnnnnnnnnnnnnnnnnnnnnnnnnnnnnnnnnnnnnnnnnnnnnnnnnnnnnnnnnnnnnnnnnnnnnnnnnnnnnnnnnnnnnnnnnnnnnnnnnnnnnnnnnnnnnnnnnnnnnnnnnnnnnnnnnnnnnnnnnnnnnnnnnnnnnnnnnnnnnnnnnnnnnnnnnnnnnnnnnnnnnnnnnnnnnnnnnnnnnnnnnnnnnnnnnnnnnnnnnnnnnnnnnnnnnnnnnnnnnnnnnnnnnnnnnnnnnnnnnnnnnnnnnnnnnnnnnnnnnnnnnnnnnnnnnnnnnnnnnnnnnnnnnnnnnnnnnnnnnnnnnnnnnnnnnnnnnnnnnnnnnnnnnnnnnnnnnnnnnnnnnnnnnnnnnnnnnnnnnnnnnnnnnnnnnnnnnnnnnnnnnnnnnnnnnnnnnnnnnnnnnnnnnnnnnnnnnnnnnnnnnnnnnnnnnnnnnnnnnnnnnnnnnnnnnnnnnnnnnnnnnnnnnnnnnnnnnnnnnnnnnnnnnnnnnnnnnnnnnnnnnnnnnnnnnnnnnnnnnnnnnnnnnnnnnnnnnnnnnnnnnnnnnnnnnnnnnnnnnnnnnnnnnnnnnnnnnnnnnnnnnnnnnnnnnnnnnnnnnnnnnnnnnnnnnnnnnnnnnnnnnggactccggattgagtctcccctcgggggggaaaatactcacccatagttgtaatgtctatttcacatgactgatagacagtccttctgctttggacagaactagcctttggggctgtggtgggagcactcctaatattattaatgatattagtacctaaccatatttgctgaggacttctcttgtaggagtgctaatcccatcatgagggcccacctcatgaccccatctaaacccagccaccttccaaaggttccatcttcagatactatgacattggggttagggcttcagcatgcgaattttgaggggacagaaacattcagtccatacggcaggggaggcaggctgatttcaacgggcacatctgagctgagtcttgaaggatgcgtgttgcagaggctgcatctgttttgcgactgcagttgatcgaggaagaaactgtggaggtgaatttataaaagaaaattgaaagcctatagtagtaaaactgtgtgcttttggcagtggaagttgattttaggagtaaacctccgtgttattagcggatgacgatttatcatggcaaacatccagcaagatatttgagttctgagcttggtaaagaggtagagttagaaatggtgctgtggagcaccccctgggtgcgcagcggctggcccgggcggttcaggactcgctcctttgctgtcctgacccaggcactccctttcccctaggctcagtcccggccccggccctgctgcagccccttcctgccggctctgggttggaggcaggtgtctgcttcggcttttctcctgccttgaaacggggcctcatcccattcgtgagttctgagtgtcagtcttatcagggaaatggtgtttctttagaaatcaattaaaataaaaatggctttttgttcttttttttaggtaaaagtaaagaagcagaaataaaaaggataaacaaggaactggcaaatatcagatcaaaatttaaaggtaagtatgtttaaccttttccatgaaatgtcctgttgtaaattttctgtagtaagaacccagtcttttaatactgtcttcttttctcccacactaaagtgaagttctcagtttgtacagtttctatcagggccctgtcagaattaggaaatggcatgtgtggagctggttaggtggggcagcccctcctggtgtctggtcttttcctggagctggaacagcactggtctagtgcccagctgcatgtcgcagtattagccaccaggccagygtgctgggggttcagaggacagacaccaagtacgggaagtgctctgtgtaaggcgccaccgaacgcctcctgctgacggtcaacagggacctgacctgcgctcggtggactgcctctctgtgagccagtgtgtgggctgagtgccttccctgaacatccttactttgaagaattgtgaagtacggatttagttttcagcccttgggacatttttgaaaccccagttaatccttaaagccttaatttttcagttaatgtttacagatttgcaacctggctcacctccctgagcataccttagccacggtgtagctgaaattgcccaggcacaatgagtcggggagagggctgagcctgacccctgtggaactggagggacaggcagaacacagcttggggacaactggagtttcatgggatgggtgcttttgagggcttgagaatggatatccagtagtttcttttcttttcttttttttttttttgagatggagtcttgctctgtcgctcagtgtggagtgcagtggcacgatcttggctcaccgcaacctccgccttccaggttcaagcggttctcctgcctcagcctcccdagtagctgggattacaggcgtgtgccaccacatgcctgtaattttatttagtagagacgagatttctccatgttggccaggctggtctcaaactcctggcctcaagtgatctgcccgcctcggcctcccaaagtgctgggattacaggcatgagccactgtgcccggcccagctgatttttgtacttttagtagagacggggtttctccatgttggtcaggccggtctcgaactcccgacctcaagtgatccacctgcctcagcctcccaamrtgctgggattacaggcgtgagccactgtgcctggcctggctgatttttgtacttctagtagagatggggtttctccatgttggtcaggctggtcttgagctcccgacctcaagtgatccacctgcctcagcctcccaacatgctgggattacaggcgtgagccactgcaccccacacggctggtttttgtatttttagtagagacgggggtttctccatgttggtcaggctggtctcgaactcccaacctcaggtgatccacctgctttggcctcccagagtgctggaattacaggcgtgagcctctgcgcccggtgtgcacctttgttcttaactgtagaatggggaaaccagtgatctcaagttgggttctccaggatgtggactctgaaatgggctgtgtacagaagatttattcagagtgacaccagtgaaaagtaaagggcagaagcagatggagatgtgggtctgacagtcaccaccaccagtgaaaagtaaagggcagaagcagatggagatgtgggtctgacagycgccrccacyagtgaaaagtaaagggcagaagcagatggagatgtgggtctgacagagtcrccaccaccagtgaaaagtaaakggcagaagcagatggagatgtgggtctgacagtcgccaccaccagtgaaaagtaaagggcagaagcagatggagatgtgggtctgacagagttgccaccagtgaaaagtaaagggcagaagcagatggagatgtgggtctgacagtcgccgccaccagtgaaaagtaaagggcagaagcagatggagatgtgggtctgayagtcgccgccaccagtgaaaagtaaagggcggaagcagatggagatgtgggtctgacagagtcgccgccacgagtgaaaagtaaagggcggaagcagatggagatgtgggtctgacagagtcgccgccaccagtgaaaagtaaagggcrgaagcagatggagatgtgggtctgacagagtcgccgccaccagtgaaaagtaaagggcagaagcagatggagatgtgggtctgacagtcgccaccactagtgaaaagtaaagggcrgaagcagatggagatgtgggtctgacagtcgccgccacctgcccatcagggagctcgggagcccagattgccggctggaggtggtggcactgggttgaaagggctgcgccctggcaccctcttgctcagccgtggctctcaacctgggggagccggaccatgacaaagccagccttactcttggygtcactgggccttcactgaatgggatctgcgtctgctgtgctcattgtgaggaaatgaggaaatgcatagaaattgcttgaaaggaaaccagcacccagccagtgtgaatccattttgttattgtgaaaagagttmatggccttcagaatggtgaagatgaaattcgaatgggaggtttttataggtttcagaagaatcatctaatgtgttgaggtgtaacttcaaagactttgctaggctgttaaatttacaaactctctggccaggcgtggtggctcacgcctgtaacccagcactgtgggaggctgaggcgggcggatcgattgaggtcgggagttcgagaccagcctggccaacatggtgaaaccccatctttactaaaaatagaaaaattagctgggtgtggwggcgcgtgcctatagtcccagctacttgggaggctgagtcaggagaatcgcttgaactgggaaggcggaggttgcagtgagcygagatctcgccattgcactccagcctgggagacacagcaagactctgtctcaaaaaaaaaaaawttttgttttataaattctgtataaatgttttgggactaaaggagacttcatgcctgtctggctgtcctagatagggaaggtggcccctcctacacagtgatctgttggcttttgttgagcacgcgcgtaccctgggtggtggcagcagacatagaagaaaatctactccttgtccgtaagaaatgtgctgcctgaggcctgccctgccagctgtgggtagatgagatgacttagagctgtgctgtccaatttagaaatagagtatcagtcacattcataggtctaaaggctctggcagcctcattgaaaaaaagtaaaaaggagcaaatgaaattaataatatattttatttagttcagtatatctaaaatttcgttgtaatcaattgaaaaaaaaactggctggcacgatggctcatgcctgtaattccagccctttgggaggccgaggtggctggatcagttgaggtcaggagtttgagaccagcctgaccaacatggtgaaaccccgtgtctattaaaaatacaagaattagctgggcatggtggcgggcacctgtaatcccagctactcgggaggctgaggcaggagaatcgcttgaacctaggaggcagaggttgctgtgagccgagatcgtgccagtgcactacagcctgggcgacagagtgagactctgtctcagaaaaaaaaactaaaaaaaaaacaaggtaccgagttattttataccaggtctttgaagtctggtgtgtgtgtcacacttaagagtgagtctcactttgtactggctgtttcacttgctcactgaccgcatgtggcatgaggctgctgtgtgagcactgctgatttagagcaacccttctgttgaaaacagttgatcaattgattgatctattgatttactgagacaagatcttgctctgttgaccaggctgcccagtgcaatcacagctcaccgcagcctcaaccccccgggctcaagccatccttccaccttggcctcccaagtaactgggaccacaggcgcgcaccaccacgcctggctaacatttaaaaaaagttttgtagagatggggtcttgccatgttacctaggctggtttcaaacttatgggctcaagagatcggtctgccttgacctcccaaagtgctgggattataggcatgagccactgcacctggcccctaggagtgtgggtccactcgtgggtggaggtgggaggctgttaaacaaccgaagtgcatagagtggcccccacaacagaggcgtcagccaggatgtcagtggtgccagggctgaggagccttgtctagagggatgatagtcaaagactggagacccccttccactgtgaactgaaggcctcaccagagggaatacccgtagggcagagtgaactgtcagtgagccagtcctcttccagacttgccgctgggtgtcttgacatgggggtgctctacacaacctcaaaatgttgggaaggttacaaccagggaaagaatcgatatccaacaaaaatacctttcaacaatgaagctaccctgtttgagtggggcatcacgaaccatcctgcttcaagggagcctgtgggtctgactgcagcttcagctctgacctggagttctggggcttctctgcggggcaccagtctgtaggctccattttagataataaaaattggcatattctggggtgggcaggatctggggttcacctgcagatgaacagggcaggaaaagcttgatggggtgttaggggaatctggttggcctcaaagggaattaatttggggccctgttcctgaattggtaggcagcctgcatgtaaggctgaagtcggtttggccagagcatgggctggagtgctaccaccctgctacatggtcaatgccacagtctcacttttcctatttttttttaataaaatgttgtgaacaacaacaacaacaacaacaaaaatgaagctaaaaaatacctgccgaagacagaaatggaaagaatttcctaccagaaggcctgtgttaaaggaaatgccaaaggaaataatcccagatggaagcgtggaaatggaaagcatggaacgggcaggaaattaaaggaaataatcccagatggaagcgtggagatggaaagcatggaacgggcgggaaattaaaggaaataatcccagatggaagcgtggaggtggaaagcatggaacgggcgggaaattaaaggaaataatcccagatggaagcgtggaggtggaaagcatggaacgggcgggaaattaaaggaaataatcccagatggaagcgtggaggtggaaagcatggaacgggcgggaaattaaaggaaataatcccagatggaagcgtggaggtggaaagcatggaacgggcgggaaattaaaggaaataatcccagatggaagcgtggaggtggaaagcatggaacgggcgggaaattaaaggaaataatcccagatggaagcgtggaggtggaaagcatggaacgggcgggaaattaaaggaaataatcccagatggaagcgtggaggtggaaagaatggaatgggcaggacagcgggagatgtgtaggtaacgccagtgtgttgtgtctcgtggttatgtctgtctgtggagtttcttcagtagtgcagtgaacttcagagagttgaaaccgtatttgtttgccatcaagaagactgtaggcccaaatggcttccctgtgatctttatcctttaatgagggttgttaggtgtgaccatctgatgtgtggcctaaggtgtgtggagaaaagtgttcatgtcagtcccaactttggctttaagggagtctcccctctgggctcttcctacctctgctatggtaaggatgtgctttgggtggtgtgggcctggagcagagccatgcacagcaggcccgtccagatctgacggtgtcttgacggtggccccggctgacctgcagacgcatgggcaagaaatcagtgcttatgtgcacctgccatgctagtgggagcccaggggagttactgggatgttcacaggtgtgccttccatctttaagcctttagaaaacaactgttgtgttctcatactctacagagacatggtagtttctttcttttttaaagagacagggtcttgttctgttgcccaggctggagtgctgtggcatgatcctaactcactgcagccttgacttcctgggctcaggtsatcctcctgcttccacctcccgagtggctagggctacaggtgtgcaccaccacgcccagcaaattgtaaaacttgtagagatggggtctcgctgtgtttcctaggctgatcacaaattcatggcctcaggtgaactcacccacctcaagtgaatcctcccaaaagtgctgggattacaggcgtaagccactgcacctgactgggaatttcttatgactgatcatctccaggagtttyccaggttgtgcacattaatttgctaaataggccaggcgcggtggctcgtgcctataatcctagcactttgggaggccgaggcaggcagatcacttaagctcaggagttcaagaccatcctgggcaacgtggtgaaaccctaaaaatctctactaaaagtacaaaaaattagccgtgtgtggttgcacatgcctgtggtcccagcyacttgggaggctgaggtgggaggatcacttgagcctaggaggttgaggctgcagtgagctgtggtcatgccactgcactccagtctgggtggcagagggagaccttgtctccagacaaaacactttactttttctttcacttgggcagcctgtttttcattttaccgtgagtttgcttgattattaattcattgatgtaaaaggcaaagactgagcaactgccttgtgccacacactgttgttggggctggtgtgcattggtgaggaagtggaaggagttcccaccctgcccccgagggtgtgagcctcatgcaggctgtgtgggttggagagtgtagagccagcagtgcctctggctggtgaccagatggctggtggccagtcagggcactgtcccttttcccaactttcaggtcaagagaaggcstggaggctctggttcctgactcactctccagtttatcttattctacttgatattttgttataaaaaaataccaggccaggcgtggtggctcacgcctgtaatcccagcactttaggaggccgaggagggcagatcacgaggtcaggagtttgagaccagcctggccaacatggtgaaaccccatctctactaaaaataaaaaaattggccgggtgtggtggcgtgtgcctgtaatcccagctactcgggaggcagaggcacgagaatcgcttgaacctgggaggtggaggttgcagtgagccaagattgcaccactgcactccagcctgggcagcagagcaagactgtctgggaaaaacaaaacaaaaataaccaagcaggtttcagtcattatgaggtagacattttgtcacattttatcgtctgtgaagtctgtgtgcatctgatgagtcagtgaaagatggtgctcatgaacctgtgttgtgaccttacgttgcctcagacacctgatgctccgtccgtgctgtgctgtttcrttttatttttttattttattttatttttttgagatggagtctcgctctgtcacccaggctggagtgcagtggcgcgatctcggctcactgcaacctctgcctcccgggttcatgccattctccttcctcagcctcccgagtagctgggactacaggcgcccgccaccacgcccggcttatttttgtatttttagtagagacaggatttcaccgtgttagtcaggatggtctctatctcctgacctcatgatcctcctgcctcagcctcccaaagtgctgggattacaggcgtgagccaccatgcgcggccctgtttcatttttatagtaacctgctgagaaagttgggctcagagaggttaaggaatacgtctgagaccacaagacaagcaagtggctgcatctttcagactggagcccaaacttaatcgtgatccttttatggtttaggatgaggttttccagccatctctcctctgatctgcacaaaccaaggagacagatattactgttatcctctgccttttatagctcagaatattaaagttcaactcaacattttgaaattactagaataaaaaagtaattctagcctagtactgaaaccagcattttgaagactgtatcagtctgggtcctttcaggagggataaacttcacagtggcacctgccaggggagctggcgggctcacctgccacctgccccaccgagatgggtgagggtgtggagcgagcattgctgcttgtttcctgtggccctgggttaggccaggaatccacgtgctgccacatgagcagcgggccgagcactgtggctttctcctcgcgctggcgacttccgctgcccctcacggtgcttatgcaacaggggtggtgtgcccaggggagtgctctgtgacatctctgggaggcccagaggtgatcctgcatcaccctcactgaccagtgggctcagcttctaaaggtgggcctaagtttcccagcacccgggagctctagagcagctcttcgtctggggtcccgcgggagcagaggctggtcggctcctctcggagagagcctgtctccgtctccgcccctgtttccatccccgtccccatccctgtcccacaaaactcagcccagtcgggccgctggtcctctcccctgtcagttattttttcctttgagaggtgctttgagtaacagggaagtctccggagggaggaggaggtcaagcagtatttttggctgtggttgtccaaggcggcttccagcgggtgatggaatctgggctgggtaggagacacggtgctggggcttcccagtggaggatctctgctgcgcagcccgtgctcagctgtgtgtgccctcctgcacaaacagggcacggagaacgtgtctgctgggaccccttgggcacagcaagcagataagtgggtcggggccgggggagggaggaaccaggtcgggtctgcttttatttatatcatctggtcttttaaattatgttaatttgccgctgacaaggaggggggtttctcatgagctcctcagagtgcagcatgcagctgactggccgactggtgatgcaccgttccccaggaaatgtggccggtctgtattctacacagttgaggtcgtccgtggaggtgtgagcgccccagcccttcacaagaagggggccagagcggctgtcgcagctgggctgtcttcccagcctgcgttccttcacgctgtggcagcagagtctctgtgagactcggcctgcacaaggccacctttctcgctcgcctccacagcctgctggaggctggctctgagggacactccctcacctctcaggtgggatagaaactcctggcaatgtagaacrgcctttttttttttttttttttttttgagatggagttttgctcttgttgcccaggctggagtgcaatggtgtggtcttggctcaccgcaacctccgcctcccaggttcaagcaattctctgcctcagcctcccgagtagctgggattacaggcatgcaccaccacgcctggctaattttgtatttttactagagatggtgtttctccatgttgaggctggtctcgaactcctgacctcaggtgatccacctgcctcggcctcccaaagttctgggattacaggcgtgagccaccgcgccgggcccagaatggccctttttttaagggttggttttatattttggaattttatattctgccaattacatgttttgaacctgccctgccatgatcccttgtgaggggctcagacaaactgcgatgaggcagagaaacagaagccctaggggccgtcgcgtgtgggccttgttttcatgaccagctgatttgccctagaatggctatgaagtggcagataatttagactgtgttcatatgcctaaattaaactgatttcaaagacaagcttgatggttgaaggcagggtttgcaagttcyatcacagcagggccctctgtgggattttggctggtcggagtgaggccctgtgagggccagctgggctgcacctgcccagggttgtcgtgggagggtagaactcttgttgccagatgttctggtgcctgtttttaaaagggaaataaaaaacttggactctcatgagtaccatgagtttagaaaggttattcatgctcagcagcgtctgcattgcacctgcctgggcccggccacccctctcctggaggcttgtccgtgctgcctgctgtactgctgcactgccctctgctctcccctctcccctgcctctgcccgcctggaataaaacctcttccccaccttttctgtaggtgacaaggctcttgatggctatagtaaaaaaaagtacgtctgcaagttgctcttcatctttctccttggtcatgacattgactttggacacatggaggctgtgaacctgctgagttcaaacagatacacggaaaagcagatcgtgagtatcgctgcaggtggagacggcagaggatggcgtgggcctggcaggactgaggccccgtgcccgtgtagggccgctgcttccttctctacccacagctgacgtgagccacgtgggtctgctgcagatggagacgcgtgcccagtccttgttagcacctgctgccaacaccctgcgggcccccttccygcccaakctgggtgttcttcaggaagccctgatgccctcacagggttcctcctcctgcatgcggttttcctgatgaggtggccatgccttttcctcctttcttygcaacctcccttacggcgagtttcaggactgcccggttggtctggagagtgccgcacgcggcccagcgtttgatgtggttggtgctctgtgcccatgaggtcggcctccagaggaggggaggatgtctccctgacacagtgccttgttgacgcactgtcccaagtagacccgtcccgtggtcccttggacagctttgtttctgcagtaggcgctggaggcacatggctgggtcttggtgcggagggtgctcaccccaccatctccccagcccttgccgggctggtgcacagtgtcctgtcactctacttttgaagtcttcttgggctctgcacgttgagctgtgtagtctcttgcagtcacattatttctatgttttccctggtggtataaagtaatattttcttccatttgtcaaaaaatttaacttagagaaattaagagagactgtagatgtcttggggttttgataagtattggtgtttattcaagcatttgtggagtgcctgtggtgtgttggggggatgggggattagccttgaggacggaggcacagggaccggaacttgggcctgcccttgtcctgggggagatgggtgtnnnnnnnnnnnnnnnnnnnnnnnnnnnnnnnnnnnnnnnnnnnnnnnnnnnnnnnnnnnnnnnnnnnnnnnnnnnnnnnnnnnnnnnnnnnnnnnnntggaggtgggtgtgttgagctgaggctggagggaggggaagttaactgggggctgagggtgggaggagcagggagagcagagcaggtggtgcctggcagtggcctgggcgtgcgagcgcagggctgaaagggcagtggtgtttggcagggcgggagctccctcgtggcgtcttcctgggagccrtgggaggctgggtacatctttaaccggggtgctcagtgatgggcctggagaaaaccactgtttccctccaggtggggagggtgtcaccttcgaggatggctgggaagaagtggcagtgacacaggactggggtttgccctgggtcagtgggggtggaggggggcagcatgaggctgtgacacaggcagattaaagagtgggagggaacaggcagccgggtttctggaaatcattgtagctaaaatcagcctctcagtgaaggttcctgcccatcttaacttgaggatagtgtgatgtccggaacactcagacgcgtggcccacagtgaagtgagtgggaccggggggtccagttcctgttggcatctggctcgtggcacgctagtcaggtgtgccccacaggaacgctgcgccatgagagcatcgtagcagaggcatcctcggttccactggaacagacgtttgccgaatcctgagaggcgccgctcccacagcagtgccctgggtgcgtgggtggtgcctgggctgcttccgcatctgtgtgtcactgattgttgggtgactcagggccacaggtggacttggattgtcatgagctttctcttctcctgtcttttggaacgcagggctaccttttcatctctgtgttggtgaactcaaacagtgagctgatccgcctgatcaacaacgccatcaagaatgacctggccagccgcaaccccaccttcatgggcctggccctgcactgcatcgccagcgtgggcagccgggagatggccgaggccttcgccggggagatccctaaggtcctcgtagccgggtatgtgccgggctygtgccgggctcctgctgaagatgtgctgctttcatgccaaatacatcaaatatggagctgcttagcctaggaaatgttttactctccccatcttatgggagatgagatgtagcctaaggtgggatccagaattacaagtttaggccgggcacggtggctcacgcctctaatcccaggaccgtaggaggccaaggtgggagaatcgcttgagcccaggagttcaagaccagcctgggcaacatagggagatcccatctctacaaacagttttaaaaaattagccagttgtggtggcgtgctcctgtcgtcccagctacttggtaggctgaggcrggaggattgcttgagcccaggaagtcaaggctgcagtgagccgtgttcatgccttggagactccagcctgggcgacagagcgagaccctgtctccaaagcaaaaagagaattacaagtttagatttcaattaaagtgcaatctaataccactgagattcaaaacacagatcaaagaagaacgcccacaccctgccagcaaaaccaagaaggggcttcagccccgcagggcactgggtagaacgatgcatctctgggcagctcctcctcgtgcccgttccccagggcttcacgcggagaagccgagcaccgcgccggagcgccctcggccatccgttccgtcccttgttaatttggagagaagcctcgaggggctgagtcaccagctctggaagagcttaaagcaaccctggggtgtctgtgccacaggcagggcccccacctgtgtgttccaggataccctgcggagttgggaaactgacccctcgcccacacggtgccacccggctgagctaggcctcaggccacgggagagtgggtggacatccacccagaccacacagtgaggactggagacaaggtggtgggaaggcatgagagaaacaggcctagaccggcgtctcaactgggccacattggctttgtgagggtactgggccgtgtcttggggcatttttggttgtcacagtgggtagagaccagggtgctgcaccccacaccactcaggatgctccacaacagagaatgaggcagccttctatcagctgtgaggygaggacgtcccacaatagagaatgaggcagcctcctgtcagctgtgaggcaaggaggagcccggctggcagagagaccgcagcataaccacgagaagacagatattcagaagcgcaagagctcagagatgggtgaccccacagtaggatggacaggagcagaaccacygagccgggggagcaggcgcagtgcctgaaggcacygttgctcctcaggccattcagtcataggtggcagagcatgtgggcgccccgaaaacagggtgcccaagatggaaggaaggctcgaatgatcacagggcgctggtgcaggagagggagggtggggctgggggtcgaaaccagccagcaggtccagtggattctgcctcagggccacggcctcctggccctccctctcctcctgcccccagggttgttgcttgcctgtttattacctgtttccacccttcggggtggaagcttcctgggctctgaggtttctgtccactgtggtggccgctttacaaacccagcatcttgaacagtaccaggtccctagtaggtgcttggtggatgtctgcgcgtgagcggaatgcaagacagggccacccctgaggcacgtgcagattgatgaagtggggcactacctgaaccgaggacctgctgcaggagccagggacggaggagggaggagccagggtgaggaggggtctccaggggccagtgcagtgcatctgcggctggaagggagcaggtggccagtgcacagcatctgcagccagaagggagcaggtggcccgtgttctggtgcctgagtggtcccatgaagggagtgggtggcccgtgttctggtgcctgagtggtcccatgaagggagtgggtggcccgtgttctggtgcctgagtggtcccatggggatgaaggtcacaggcagggttctcctacctcagagagctcaggtaacatggtacccatgggccttccttgaagaaaagggctagttgttgaaatccagctaagtagtagatgactcaaagtaatatgctaaggctgggcacagtggctcacgcatgtaatcccagcacttggaaggccaaggtgggcgggcctgaggtcaggagtttgagaccagcccggccaacatggcgaaaccccgtctctactaaaaatacaaaaattagctgggtgtggtggtgctcacctgtagtcccagctactcagaaggcttgaggcaggagaatcgcttgaacccaggaggcggaggctgcagtaagttggagattgcaccactacacaccagcctgggcaacagaataagactctgtctcaaaaaaaaaaaaaaaaaaaagaaagaaagctgggcatggtggctcatgcctgtaatcccagtactttgggaggctgagacgggcagatcatgagttcaagagctcgagaccatcctggccaacatggtgaaaccccgtctctactaaaamcagaaaaattagctgggcatggtggcgccctcctgtagtcccagttactcaggaggctgaggcaggagaatcgcttgaacccgggaggcggaggytgcagtgagccgagattgctccactgtactccagcctggcgaaagagcgagactctgtctcaaaaacaaaaacaaaaacatgctcgggaaggaggtgctgtcattggaggactgctggtgtgtgtgtcacctagaaatggaaggacagagtaggtgctgaggaggtcaggtcattcctagggccagaggtagggacgggaggcagcggccaaggcagaagagtggggtggtgtctctgctgggatggacggagttggtggaaagagaacccgtggaggtgcagagtagccgtggggtcctcggtctccctcgtgtgagccgacattagcgagtagctgtagggtcctcggtatccctcgtgtgagccgacatcggagagtagcagtggggtcctcggtctccctcgtgtgagctgacgtcggagagtagtggtggggtcctcggtctccctcttacgagccgacattagtgagtagcagtggggtcctcggtctcccttgtgtgagccgacstcggagagyagcggtggggtcctcggtctccctcgtgtgagccgacctcggagagtagcggtggggtcctcggtctccctcgtgtgagctgatgtcggcgagtagctgtgggatccttggtctccctcgtgtgagccgacgtcggagagtggcggtggggtcctctgtctcccttgtgtgagcagatgctggaaagtaatggtggggtcctcggtctccctcgtgtgagctgacaccggagagtagtggtggggcccccgtccccttggtgtgagctgatgatttagactgtgttcttctgcctaaaagaggaggcggatcctcctcctctctgaggagtgtggcatgctgggcgccctcgtgtgtcggcatttgtagccacaagcatggaacctgrttggctcttctatgttgaaggactgctgggggcccagtcatggggtcctgaagccgcctggcaaggacagccctgctggcgcctggaacacacccctgacgtggcctcgaccacacatccacatggacgcatggcagggtgtgtgtgcggttgctgctctgggctgatctggtgaggatggggtgggccggaagagggacacaatacctactcctccttgcaggggcgttggcacccagaaggggaattttttattcaaagtaattttttggaatagtatagggggagatttaggaataaaaaagccaaaaggtaaatggtacaggtagtcyctatacccttttctgccttccatgtggggcagcagattccagctgattctgttaagcgcttggagaagagactggccctttttcagctgtgcctccacagcgtccaccccagggtccctgttgccttcccagctgcttagcagaatctggtggcaggagggcgaagggggataagcggagcatggaacacgtctgtgccctggacaagcatgtyggcagcagagcaggagagccatggccggctcccttcccaccgtgtctgyagggacccgaagccctttgctccaggggcaagggcatgtgtggcccagcccactgttcagggyggggcgtggtggggtgagggtgggcgtggggcaggggaagatcatcaagcagatgtggagctccatggcggtgcagggccctccaagcatttctgttgtgattgtggattattaagttgtaacaacaacaacaagaaagctattgttcaaacaacaaatgagcaatgtgagctgcatgtggtcggctggtggttttggtggtgagaaggttggcagggagacctttggagcagggcccatgtatgctgagaacactgctgctgccccctaggcggcctcggcaggcggccctgagtgctgtcttggcccctgcgccagccccacccccgcgtctcctgctggctctgggggggtgctcygtgcagctctgcgctgtcttcagcctgttgcsagtgactcttgacgtctgtctttcagagacactatggacagcgtgaagcagagcgcggccctgtgcttgctgcgcctgtacaggacgtcccccgatcttgtccccatgggcgactggacatcccgagtggtgcacctgctcaatgaccagcacttggtaagcacccttggctttggttctccccgctcccccaggtgacctttgggatggccgttgtgaagacaccatggtgcgccttctcgggatgcccaggwgaggctgtcacaggggctgctgtggctgcgtgctgaggccacgggggcccttcctggggctggrtgagtaagactccgcctctgctcatcctgtggccaggcattggctgaagccctcgggtagcacagaggctctgcagacacccccagctgagacacgtgtctcctggaaacacctatctagtatgsggagctcctgcctggtgtcccggctgcctgtgccctcatctaggctctaacgtgcagtcttactaatcctcgtgcctactccacgggccaggcccccatggtataggcatacaccaagggtggaggtttccagcgatttggtgatgtgtgttcaggtgctgtgagaggcasgtrtgggggaggggctgtgctagtgtgtgagcstcaggggcttgagggtcacagagccgtccaccgcatccagcaggggtggatgtgggcagaatgtgcttgtcctgcctgaactctgctctatgaatgagagggtgagagttggcaggagtggaagtatttcctgctgcgtggagaggcatgtgggccggtcacgcgttcacaaggatccaggatagagggccgagaatgccactttcccatgttgccgtgagccccatcctggcgggggagcctttcagacggtgctgctggaggctgtcgtccaccatcccgtggaccgtgggaggtcatgggattttcccgctttgcagtcaaggaggccgaagctgggaaagaggaaatgccctctgacagccccaggcytgtacccagagttggcgtgttggggtcttgggcgtcagagagtgtgcgggtgaagcagctatgtgggagctgtgagtcggcagggcctggtcagggaggcaggccccgggctcctgctgcacatggcagccsgtcactgggctgctgagggaccggggctgcctgctttcccctgggccttctgcagacaggatctgtgcacgctctgtgggactggccgggactgctgtcattgctcctgccttggcaggaagtttccatggccatgcagccgcagggtcaccctgagtgcttttcagggtggcagggccttgcctcagatggccacaagggcacctctccttggatactttatgattctgtgacgccagctacttggtttgctttttgtatttttatgcatctggctttatttcaccaggcacttgagtcagcatattcttggttataggcaacggaaactcatcctgaagggacgccacagccaaccccagggtgggctccctgctgcccagtactttccctccttagctctcccagcttgcgcacctgcacccctggcagctgtcttttgtgtggccatggcttttgtcaaatgccttccacctctgacagcgaaggcctgaggcttggcttctctggtctcaagtcaggagcccccaagaaaggtgtcatttgctcacctagagtgagtgagctcccccatgtgtccttcagggaggtcttgtggagtgggacaggaagcgtgggcgggaccaggtgggtgagggtcagaaggtcggcggtcaggcctgcgcccggagttgggtggtggggagggaggtgatttggcccgagtgctgcatgggcaccgtgccgagccttgggtctgtagcctgagggtggcctgatggagcagacaggttggagtggacaaggacaggagacaccatggggagaagggttggggggctgggccaagggctggaggccactgaggagacacggaggtcgctttggcaccagctgccaccacaggggtggggccacgtgtcgcgggcctgagtgtgcccctcgagaggcctcttacagtctcagtgcagggggaggacgtcctaaatgagaggctgagctccgcgcctgtcagcctgttgcagggggcattctagatgcgtgtttcctgggggaacacaccgtgaacattcaggagccccgtggggaatgactctgccctcatggaagttacagacctgcagtttcttacaagttctttattggacatggcaaaatccgttagcactttgctcaccgagaaatacaggaagaagaccaatcagaccaatttctttcttacagctttcacattttccttggaaagctgagggcacaggcacagcaggtctctggggagagtgccgtgctatagtaggtgcaccccagcctggctgaggagccgtggcacagggcgagtggtggggggattgcatcagtcattcaagtagacatttcctttcagacagaggcttgctctgtcacccaggctggagtgcagtggcgcgatctcagctcactgcaacctctgcctcctgggttcaggcgattgtcctgcctcagcttcccgagtagctgggattacaggcgaggcgagtgccaccacgcctggataatatttgtatttttagtagagatggggtttcaccgtgttggccaggctggtcttgagctcctgacctcaggkgatccgcctgcttcggcctcccaaagtgctgggattacagcataagccaccgtgcccacgcaagtagacacttcctgagctcactgtttacatcttcagagtgaataggtatcatttattttatattttttaaaaaaatttatgggagaatgtctttatataattaaagtcttttttcaagaggtctgagtgactgattccctagtggctgtcctggagcggtgacaggctgcccggtgccgtgtcctggagcggtgacaggctgcccggtgccgtgtcctggagcggtgacagcctgcccggtgccgtgtcatggagcggtgacaggctgcccggtcccgtgtctggaggcggtgacaggctgcccggtgcggtgtcctggagcggtgacaggctgcccggtcccgtgtcctggagcggtgacagggtgcccggtgccgtgtcctggagcggtgacaggctgcccggtgccgtgccctggagcggtgacaggctgcccggtgccgtgtcctggagcggtgacaggctgcccggtgccgtgtcctggagcggtgacaggctgcccggtgccgtgtcctggagcggtgacaggctgcccggtgccgtgtcctggagcggtgacagggtgcccggtgccgtgtcctggagcggtgacaggctgcccggtgccgtgtcctggagcggtgacaggctrcccggtgctttggggaggactgcttgtgccctgggatctgaatctgttctcactgagggccaggaggagcggggagggaggactcgcgtgctgggcctagtggcctcatccagcctatggtggttsagtgactgccagggccactttccaaaaaggagaatggaaaaggacttctccagttgctcttttctatagtctcacttctgggttgtaaagattcagatcagtgtaaaggtagcgtctccctctacagtgaacatgcgttattaaaccagaggcagcaagtgcagatgacggtggaggccaggccaggagagggcagcaggcaaggtggcgtgtgcagcccacatgcttgacctgcatggctggacgtggccctctggctcttcgatgctggcagggatctgggctaagcatgacggaacttcccagtttttaaggagaagctggaaaaagaaaatctgcatgtgccatctgggagaacattgtaggtttctcggagtaggcctgaggccgaggtggctgtgggctgccactgtgctgctrgttggtttaaggttttctttggaagatgagtgaacacaagtggttagcttcaagtgttctgactcttgtgtgtgtgttttctttcagggtgtggtaactgcagccacaagtctgatcaccactttagcacagaagaacccagaagagtttaaaacctccgtgtctctggctgtctctaggctaagcagagtaagtctgttcgtgggggagcagaagtcagggtgggttttgtcttagttatttatttattagcttatttgtagaatgcaaggtatttgatcagtttataaattcagggatgaaaaccaacttggcttctctgtcagccttcttgttgagaactgtcctgtctgtacagaagcacagctccctgttcccatggtgtgagtgagcacccaacaccatgtgggtggaggaggggcacccagtggccccgtgtcccccactggggaagcgtggctggtgcttcgtggacccaccatctggcgtgcacgctaaagcctgccattcagcttcctgttctgagtttgatgcagatggacctgcagcacacattcttttgttttgctcaacatggtaaaatttttgttttgtgtgcagctgttatacattcatgtttgatgcttcatagaattggttgtgtgaattgtccgctgcagtttacctgctgtcctgttgaacacttagctccttgccctctgaggctgctgtgaatcctccagcatgagcagtcttggatgtcccttggtttccatgtgcacgagatggctcagctggggccgcggctcctgaacctgaggagactggcgttgccagaccagcttcccctgccgtgcacacggctctcacagcggcagcaggaggcgcgggcgcggcacgcgtagtgctagtctcttgggttttagtcatctgggtgtatagtgggagctctgtgatttattttttatttttttcttttgagacagagtctcactttgtcgcccaggctagagtgcagtggtgcagtctcagctcactgccacctctgtctcctggattcaagggattctcctgcctcagcctccagagtagctgggattacaggcacccaccaccaagcctggctaatttttgtatttttagcagagatgaggtttcaccatgttggccaggctggtcttgaactcctgacctcaagcaatctwcctgctttggcctcccaaactgctggaattataggcgtgagccaccgcacccggcctctttgagatttaaatctacattttccagattatcaatgaggttgagcaactttgcaygttgattggctgtttgggtgtcttgttttgtgaagtgcctgagtcttttacccatttttaccctgggttgtccgttttttgtgttgaatatttcaccattaagtatgatgtctgctttagaattttgttgttgtcgttggtactcttcacattaaagaagttcctttctctatctagtttgtcaaacagtttttatcattaactggtaaaaacatttgaacttgcagttttctttgtgggaaactttttttttttttttgagatagggtctcgctcttggtgcccaggttggagtgcagtggtacgatctcggctcaccataayctctgcctcccaggttcaagcggttctcctgcctcagcctcccgagtagctgggattaacaggcgcccgccagcacgcctggctaattttgtatttttagtagagatggggtttttccatgttggtcaggctggtctcgaactcctgacctcaggtgatctgcccaccttggcctcccaaagtgctgggattacaggtgtgagcccctgcgcctggctgtgaaactttctaattatgaattcaatttattttataagttgtggaactgtgcatattttctttttctttttttttttttttttttttgagtcggagtcgcactctgttgcccaggttggagtgcaatggcacgatctcggtttaccacaacctctgcttgtgttcaagcgattctcctacctcagcctcccgagtagctgggactacaggccgtcgccaccacgcccagttaatttttgtatatttttgatggagatggggtttcaccacaatggccaggctggttgcgaactcccgacctcaagtgattgattgcacctgccttggcctcccacagtgctggcattataggcatgagacaccgcacctggactcctttcctctactttctttgggttaatttgctagtctctttttattatttatttatttatttatttattttgagatggagtctcactctgtcgcccaggctggagtgcagtggcacgatcttggctcactrcaagctccgcctcctgggttcacgccattctcctgcctcagcctcycgagtagctgggactacaggcgcccgccaccatgcctggctaattttttgtattttttagtagagatggggtttcactgtgttagccaggatggtctcgatctcctgaccttgtgatccgcccgccttggcctctcaaagtgctgggattacaggcgkgagccaccgcacccggcctagtctctttttaaacgcttgagatgaatttttgttgcttttctctttatatttgtttcaaatatatacagttaaggctgtacatttctctctgagcccggccttaggtgcgtacttgtttgagagacagctcatgttggccgtgtctgtgtgtcacggaagtgctgtgattcttgccttttcctgctttgtgtttgtgcctttcagccttgtctttgacagcctagagcttgcctccttgcagcaggagtccgtgacccaagtctgggctggcatcttgcagyttagggtaggagtcagggtgaacttttctgaatgggttcacttacggcctaaaagtgtcacatgtgagctttgtaggaagggaggaactaccctgacctccgggaaacaggagacatcgggctgtatgtcagtggaaatgcgaggtagtcgtgattgtcacttgttcaggaggttgacggaggatctgccaagccaaaggccgcattgracacagagatgggatgtgagtgaggtgggcagtctccctgcctccgtgagctcaccatctgggttggcctgtggtcggggggccctgtggggttgtggggtagggtcagaatgccggcttctgggggtgggggtgcttcttccttctgaggaggctaaagctctctctctgatttcattcacgtgccggtccacaaaggaaagactgtagtttcaaatccaggtgctatggtgtcttgtaccgagcgagggctgccactcagctgcggcagcgtgttgccgagtgacagtgcagccctctcacggcgaacccagggggtaccaagcagtgtcagacactcttggcacatgaaacaaaaccatttttccagctcaggcgtgacccgaggagtgagtatggcttttctttgggtcsccgcagtaggggctcgtgtccggcagcrtgtctcattgcctgtgctgtcttacagatcgtgacgtctgcatccacagatctccaggattacacttactattttgtcccggctccctggctgtctgtcaaactgctgagactgctgcagtgctacccacccccaggtaacgcgcaggccgcggctcctgaagctgcaccagtgccagtctgattccctgtctcagatttaagtggtttgtttgttattttaagaagtgtgttactagccctgtctcttgattcatggacctttctgccagtgctgctgtatgcgctggctttcgtggagcagttattgcagagcctacagttttgttagtgtttgggtctatttgtgcttttatagtatcagatttgtgcaggttttctttttgagayggagtctccctttgttgcccaggctggagtgcagtgacgcgacctcagctcactgcaacctctgcctcccgggttcaagcgattctcccacctcatcttcctgagtagctgggattacaggcacctgccatcatacccggctaacttttgcgtttttgtagagacggggtttcaccatgttggccagtctgttcttgaactcctgacctcaggtgactggcctgcctcggcctcccaaagtgctgggattacagaagtgagccaccgtgcccggcctgtctcagttttgtaaatgcttccagctgggtacacaaatgtgaatgaactatattaaaaatgctctcatgatgtatgggtgcagccgggaggggcagggtgggctgcgggccactggagactggtgagcaccgttctgtcttgcccagaagaccctgcagtgcgaggccgcctgactgagtgcctggagaccatcctgaacaaagcccaagaaccgcccaagtcgaagaaggtccagcactccaacgcgaagaatgccgtgctyttcgaggccatcagcttaatcattcaccatgacaggtgtgtcggctgcctgtggagaggcttcgtctcgcgcacacacacacgttccttctcgttggcacgagactgggcrgatcatgtctggtttgtccactccatgggcctccccttcgtcctgcctctgtgctccctgccggatgctttttttctttctgtgcagcccggcccctcctgctctgagctcaccgtggattgctttggtgactgtggtctcatcccacacgagggccttttcctccttcccctgagcatccccactcctgactggcttctcatgtagtggaacagagaggagacgggtggggtggggggtgtgcgcgcatgtcccgtggctttgctggatgtggagccgcacttggtgggtccagggtcgcagggcagtgctggaaacgtctgtgcccatccacgaagcgcagaggcgcagggtggcggtygctccacacagcctggagggtctgcctcctctgctcccacgccttctctgctcagcagttgcggcgcaccacatgtggtctggcgtgggtcttgcgtgtggggccatgctttagggtcctgtgagaatgagatcgcagttctcaccaggctcccaataatgagggmacgtgccaggctgtgggcagacgctctctacagctwgtgaacaccacccatttgctactacagcatttttacaaatgatgaaaactcagtctgagagtcacacttcagaactgagagttattaaaactgaaatttcccattttggagaaagctctgttgttatgtgaggagaagccacatcctgaggagacagtagagtcagtggggcagcagccgcgctcccggccttctcggccttctccctgccctgggctggtgcctctggctgagaccccattgccggtcacagcttgaccggcctcccgcgggcctgatgcagattgaggctcaggaggtgctgggaaggctccagtggacacacgggctgctgactcactgtggggatgcacaggatggacacaaaatggatgtcaggggtgggggtcgggcgtcatctgcatctggggaggcccccgagttcccacttgagcagtgtggtggcggtgagtgccgtgtgactttgctgtctgccatctggacccgtcggggaacgcagactctgtccagtttgtgttgcacttgctgaggaaaccccacccacttcccctccctccacacagtgagccgaacctgctcgtccgtgcctgcaaccagttgggccagtttctgcagcaccgcgagaccaacctgcgctacctggccctggagagcatgtgcacgctggccagctctgagttctcccatgaggctgtcaagacgcacatcgagacggtcatcaacgccctgaaggcgagtgccctgtccttgggttctgctcactccctgagcaggtgccgtgggtcttcctgtgaaggctgggggtacgcagtgcctcctgactccccgcagagatggaggtggtgctgrtgctgctggcctccgcctgtcacctactcttgggaggtcacaccactgttgagggccatgctgcctggagatggccgggttggccctgctgtcctggttaggctgagcagaggagtctctggcagccctttccctgctgggggcagcccccgtgtgccatcctgcgcgtgcatagtgctgacaagtagaaatggttcttcttggtagaaagatgaaatttttttcccttatctccaagaaaatcccccttttacaaaggaaactcactttgttcggggattaaaatttcagagttggggccgggcgcggtggctgacgcctgtaatcccagcactttgggaggccgaggcgggtggatcacaaggtcaggagatcgagaccatcccggctaacacggtgaaaccccgtctttactaaaaatgcaaaaaaaaattagccgggcgtggtggcggccggtgcctgtagtcccagctactcaggaggctcaggcagaagaatggcttgaacccaagaggcggagcttgcagtgagccgagatcgcgccactgcactccagcgtgggcgacagagcgagactccgtctcaaaaaaaaaaaaaaatttcagarttggaagagcccagttgaggttggccattgccagcctttgcgagtctccagagcgaccccgagggttcgttccacataggggaccctgcggtgtgtccaccaagtccctagtcaccggtgcacatgcgttagggagtgggaggcggggagctgcatgtcccccatctggctcagcctcaggctgtggcagggctgctcccagtcccccgcacgtctgcgtgcagctcacagatattccgggtggtgtgcaaggggctcgtggtgggcatttggtattctggattcttcttggtcctggttttggtgtttrttttagtcaatccctattgtcagaagggctggacactcatttgcacacggccagtgctagcgctggtggtgcccactctcctgcctttgttgggagcagagctcgggctttctsgtgctgcagagcctcctgggggcccatcagcacgggctctggggtggggcgtgaggacctgccttggggcagctccgtgtccgaggcagtggggtctttggctgcatggaagggagtccttgatggcctgcaccaggcagtgcgctcagtcctagcgaagctggcccttgtggagggcaagggaggcatggacgagcgggcagaatccaggcagtgcgctgggtcctagcgaagctggcctgtgcgggagggccgggccagcaggcggaactctattccgggctgtccagacacacgtggcccgagtgcaggtcggctccctggacctggatgtgcatgtgagggaaactcagagtgggtgttgagatgcgggtgccgagcctgtccccagcctgtccccaagcttgtgccttgctcctgcgacctcttactctgtgcmttgttccccagactgagcgggacgtgagcgtgcggcagcgggccgtggacctcctctacgccatgtgcgaccgcagcaacgccccacagatcgtggcygagatgctgagctatctggagacagctgactactccatccgagaagagattgtgagttctggtggcctctgagtcctctcctgccacaggcgtgaatctcagcggcaggatttccttcgtgctctgcgattccgtccagcaggacttgattgagaacccatgagatgctgaatacaaggctcctctgcctctgtgttttcatccacattttcaagctgggtgtggtggcacctgtggtccccgctactcctgaggtggaggcgggaggatcacctgaggccaggaggttgaggctgcagtgagtcgagatcatgtcactgcactctagcctgggcaacacagcgagaccctgtcttaaaaaaaaatcagcatttttggtagagtcgtttggtcttgaaaataactattggccgggtgtggtggctcacgcctgtacaccttgggaggccaaggcgggcggatcacctgaggtcaggagttcaagaccagcctgacaaacatggggaaaccctgaccccgtctctactgaaaatacaaaattagccgggcgtagtggcgcatgcctgtaatgccagctactccggaggctgaggcaggagaatcgcttgaacctgggaggcggaggcggaggttgtggtgagccgagattgcgccattgcactccagcctgagcaacaagagcgaaactctgtctcaaaaaaaaaaaaactaaaatgcccgtcctgcgcggcttctgtggcctgcctgtccttgcagtggtggcactgtagccccaggtctgagtgaggctccagccgtctgcgctggggctgcacaaatccagactcctgtgggcaaaattcttttaattgtgttgcattttgagcccttgaattaatcctttgtggcttggcttttttgggtgtccctcttgatctctgggaaggacgggatctaggccatagcttaatgtcccgtgttgtttttattcacaaagtaggtgtgcacacttgccagatagctgaagctcatcaaacctgtacgtgtgaaagactgagcatgaaccaaaacctgagggaagaaacccttgtggaggccacatggtcagcagagaagagggcctgaggcctccaccacactcacaggcctctcaggctcaccgtgtctgtggatggtggggtttaagggggaggcccggtgtcctcgcgtggggttcgccactgtgaccagccaggaccacagcctcttgttgaggctgagacagcgcctccgttgtatagaaagcgctttgttatttgttttttttgggcgaagtgcggctcaaggcctccttgggagctttgccgagagccagtgttggagctagtggcaggtgacagggttgctctgggcaggtgttgtgtggtcatgcccaggtgagagactcgggttttcaggggtcttttagtgaacggaggagcccaggtgctggggcttcaatgctgaggggtgaaattaccatggactgagcttcagtgaggcactgcagacctgcagagagcaggggccaggaggcggctctcacgctggactgtccaccctccaggacagtgggcctgggaagttgagggggacagggacggggtgggctgaytcccggcaggaggccccaagggcaggcaccgtggtgtagggcagggctgtctgtagaggggccaggcaggtgctcgttgactgtagccagtggtccctctctggcctggctggggcagtgtggcctggtgtcagcacttgtggtggggtggggctggctctggggacggccgtcacgggagcctcgttcctgattgttgttctgggtgttttgaacagagacagaagcagtgtgcttctgagtgcagttgtgcagattttgaggtcctgggcattcgtcagcccggtgtctgctctcgcccctctgcgtgatgagcggcaatcctcagccagctcctgctgtgaggagtaagacaggtgctgtgtcttggcctgcatgatgctccccccagcccgtcctttcagccggacatgatgctcccctcaccccatcctttcagctgggcatggtgctcccccaccccatcctttcagccgggcatggtgctccccccaccccatcctttcagccgggcagggtgctccccccaccccgtcctttcatctgggcatggtgctcccctcaccccatcctttcagctgggcatggtgctccccccaccccatcctttcagctgggcatggtgctccccccaccccatcctttcagctgggcatggtgctccccccaccccatcctttcagtcgggtatggtgctccccccaccccatcctttcagtcgggtatggtgctcccctccgtccttttagccgggcatggtgctcccctccatcctttcagccgggcacgatgctccccccaccccgtcctttcagccgggtatggtgctcccctccgtcctttcagccrggtatggtgstcccctctgtcctttcagccgggtatggtgctcccctccatcctttcagccgggcatggtgtttccctctgtcctttcagtcgagcatggcagggcgtgttctctggctgtgctaggtgctaagtgtccaaactggacatggcccactccctgcctactcggcaccttgccatccatggagggggacggattgagagcaggaccgtgggttgctgtgctgtgggtgggatggctggaggaagtgcctcatgttctgggggcctcaggaggcattacactcctggggggctgtgtggacttctgcagaaggtgatagtggcctggtctggagaggatgatggtgcagaggctactgggagggcagagcatccgttcgtggaggggtgggaggtaccttagcacaggctggggagcagggcaygcgaggcaggggtggaagcagacatggggaccctgccagtgaggcctgagggcccctggtgcacagccgtgagctgagggtagggctcagaggcagtacattttggaatgatgccctggaagtgtcacggagtcaggttggggtttgggggtccaggctccaggcagggacttggggtgggggggcacagtcaccagcacctgagaggccagtggcagggtgtggagagggggcggcagggtgtggggaggggcggcagggtattaggggtgccctcgggaggtgcgcggtcttgatgcctgctggcgttggtgttggcagctggcgctgttcgaagggggcttggttccaggcgaggtgactttggggagatgagtttggtgttgtacagcctggcagagctccatgtgggtggctgccacgtgggtgtgggctgggcaggtgcctccggggggcacccgtgagagtgagccagagaggggaagaaggggaacccccaggtgaggctcgcaggaaagactggccagagccggaagaaaccagcagagaagtggccgccgggagcccagggtggcgcagtcactggccgccgggagcccagggtggcgcagtcagaggtcagaggagtgctgccaccgggagcctagggtgatgaggtcagaggagtgctgccgccaggtgctggggctttgggagagaagggcccaggtgggaggtggcctggctgtggccgtggccttctgtgcactggtctccgcctcttcctggctttctttgcttaagtcagggcatcttaaactttctgggctcgtgggcttttttgagaatcgagttcaagcttcctccatgtcccaaacttttgtagacacattgaggtgcttctgaaactctcactttgactttggacgacagtttggtcttgggattgccatggcctgcaggtgccggccctcagcagcctgtcccccacaggtgctgaaggtcgccatcctggctgagaagtacgcggtggactacacctggtatgtggataccatcttgaacttgatccgaattgctggtgattacgtgagtgaagaggtgtggtaccgagtcattcagatcgtcatcaaccgggacgacgtgcagggctacgcggccaagactgtgttcgaggtatgkccsgcaggatggcaggaaggatggggtggagggcagttgcagaaggtgagcagtgagtggttccagcctgcctgcgtggaggtgccgagggccgttgctgacccctcttgcccctcagctcttccctgaggctctagctcctccactgttggtgccccttgctgagtcccagtttcttctcaccctaactctcaaacttctggctctctgggggccacctgagaaagccggcctctgtgtgtgtgagagcatgctggggcatgccgtggtggggcctgccctgtccgtcggagagggttaggccaccggcaaggggtgtgccatgaggacgctggcagaacctccccagccagagcctgttgtggatgctgcagctccctccagggcaggtcagcgtgtggcagccttgggttccttgctgctgacacaggtactgagggtgctgaggaaggcagggatgggcacttggactggggtctccaggaagctgaggggctggtgctggtgtagggtgcaccgcgccaggacgtgcccgcctcgccttaactctggcacctggctgccaccccggctcattgtttgtgcttcgcaggctcttcaggctcccgcgtgccacgagaacctggtcaaagtgggcggctacatcctgggggagtttggaaacttgatagctggagacccgagatccaggtgagaggccctttgcgagtcggggctgtgtgcgctccggcgggcctctyggtggtcggtgscaagargcgaggcaccagctggccctgccgtgaggcctcgcagagccgcttctgctccccatcggcgtctttttgttttccttcagttgatagaaaaagcagggattctagtagaaaatggagacgtggggttgatggctgacttagtgaaaggggcgtctttgcggtgggatctggagctggaagagggtcccgaccagcggcctctggtgcaggccagggggtctcgccgccgtcccccccccgcgggrgcgtgctgcagcctgcgaggggacgacggtgtccctgtgttgtgcctcccsgtccccagcccgctgatccagttccacctgctgcactccaagttccacctgtgcagcgtccccacccgcgcgctgctcctgtccacctacatcaagttcgtgaacctcttcccggaggtgaagcccaccatccaggacgtgctgcgcagcgacagccagctsaggaacgcagacgtggagctgcagcagcgtgctgtggagtacctgcggctcagcacygtggccagcaccgacattctggtaggaggcccccgcccttcgggctggcttggctgagggttggaggccaggagctctgaccagtcccaccctgtgttctttccaaggcgaccgtgctggaggagatgcccccattcccggagcgggagtcctccatcttggcaaagctcaagaagaagaagggccccagcacggtgacagacctggaggacaccaagcgggacaggagtgtggacgtgaacgggggtcctgagcctgccccagccagtaccagcgccgtggtgggtccctcacctactgtgcacccagacctgtcagggcctcacccccaagacttgggaccagcagagcatttgcctgtcagggaggagcatgtactgagaacccaggctctggctgtggctctggacaccccgctgtcctgtcctgggggccactgtccctgctggacacgctgctgtcctgtcctgggggccactgtccctgctggacgccacgctgtcctgtcccgggggccactgtccctgctggacgccccgctgtctgtcccgggggccactgtccctgctggacgcccccctggcctgtcccgggggccactgtccctgctggacgccccgttgtcctgtcccgggggccactgtccctgctgcacaccctgctggcctgtcccgggggccactgtccctgctggatgcccccctggcctgtcccgggggccactgtccctgctggacgccccgttgtcctgtcccgggggccactgtccctgctggacgcccccctggcctgtccygggggccactgtccctgctgcacaccctgctggcctgtcccgggggccactgtccctgctggacgcccccctggcctgtcccgggggccactgtccctgctgcacaccctgctggcctgtcccgggggccactgtccctgctggacgcccccctggcctgtcctgggggccactgtccctgctgcacaccccgctggcttgtcccgggggccactgtccctgctggacgcccctctggcctgtcccgggggccactgtccctgctgcacaccccgctgtcctctcccgggggccactgtgcctgctgggcaaggcacttccttcagaccgtcgtcttgtccagctcagctcacacatcctctgtggtgccttgttttaggggaagtggccgtcccctctcctacaggactgcctcacccaggcagctgtcctcacatgctttgttgatttagagaggacctgtcctgccctgctcttcgaggttttatgtagtgagttgggttaggtctggttttccttgtatgtgtgatgcgatgagaataatcctgtaacagaatgtgtcctgtggtatttgtcaggtgagaagtgtcgttttgagagttgcgtttttgcttggctctgcttgccagctgttcccctctgcactgtcagggagggctcctgtcggggtcaggcgggctttctgtttgtccagttagaggacctgtctctccaggacgcaggtccagtggtggcaaccagtgctgctacccagtatcggcagggctttgtggggtgagctcctgtggtggtgcctgccctggcagtgtgctggttgggagggtgctcatgtcggagtcctggcactccttggcggggacctgcttatgtgccccggctgaccatgtgtcctgcccctctggccgacagtgcagggcctgccatggggctggtatccaggctgagcctgacatcttgcccagtggcttctcnnnnnnnnnnnnnnnnnnnnnnnnnnnnnnnnnnnnnnnnnnnnnnnnnnnnnnnnnnnnnnnnnnnnnnnnnnnnnnnnnnnnnnnnnnnnnnnnnnnnnnnnnnnnnnnnnnnnnnnnnnnnnnnnnnnnnnnnnnnnnnnnnnnnnnnnnnnnnnnnnnnnnnnnnnnnnnnnnnnnnnnnnnnnnnnnnnnnnnnnnnnnnnnnnnnnnnnnnnnnnnnnnnnnnnnnnnnnnnnnnnnnnnnnnnnnnnnnnnnnnnnnnnnnnnnnnnnnnnnnnnnnnnnnnnnnnnnnnnnnnnnnnnnnnnnnnnnnnnnnnnnnnnnnnnnnnnnnnnnnnnnnnnnnnnnnnnnnnnnnnnnnnnnnnnnnnnnnnnnnnnnnnnnnnnnnnnnnnnnnnnnnnnnnnnnnnnnnnnnnnnnnnnnnnnnnnnnnnnnnnnnnnnnnnnnnnnnnnnnnnnnnnnnnnnnnnnnnnnnnnnnnnnnnnnnnnnnnnnnnnnnnnnnnnnnnnnnnnnnnnnnnnnnnnnnnnnnnnnnnnnnnnnnnnnnnnnnnnnnnnnnnnnnnnnnnnnnnnnnnnnnnnnnnnnnnnnnnnnnnnnnnnnnnnnnnnnnnnnnnnnnnnnnnnnnnnnnnnnnnnnnnnnnnnnnnnnnnnnnnnnnnnnnnnnnnnnnnnnnnnnnnnnnnnnnnnnnnnnnnnnnnnnnnnnnnnnnnnnnnnnnnnnnnnnnnnnnnnnnnnnnnnnnnnnnnnnnnnnnnnnnnnnnnnnnnnnnnnnnnnnnnnnnnnnnnnnnnnnnnnnnnnnnnnnnnnnnnnnnnnnnnnnnnnnnnnnnnnnnnnnnnnnnnnnnnnnnnnnnnnnnnnnnnnnnnnnnnnnnnnnnnnnnnnnnnnnnnnnnnnnnnnnnnnnnnnnnnnnnnnnnnnnnnnnnnnnnnnnnnnnnnnnnnnnnnnnnnnnnnnnnnnnnnnnnnnnnnnnnnnnnnnnnnnnnnnnnnnnnnnnnnnnnnnnnnnnnnnnnnnnnnnnnnnnnnnnnnnnnnnnnnnnnnnnnnnnnnnnnnnnnnnnnnnnnnnnnnnnnnnnnnnnnnnnnnnnnnnnnnnnnnnnnnnnnnnnnnnnnnnnnnnnnnnnnnnnnnnnnnnnnnnnnnnnnnnnnnnnnnnnnnnnnnnnnnnnnnnnnnnnnnnnnnnnnnnnnnnnnnnnnnnnnnnnnnnnnnnnnnnnnnnnnnnntccccctcctcctccccctcctggctgagcctgacatctcaatgagcagtcttccctccccctcttcctccctctcccctccctccacctagtgtcctctgtgcagcccctgtccccccgtgccctctctctgtgttgtttgtggcacgctgctgtgcccgccatctggaggcttgaattgcctgtgagctcatcctggagtgaatgaaatgaatgaaagatgtgactctttctcccaaggtgggcgtcttcccttcacgcctgagcaccttcatgcttatgtttctcatgtgctctgtagagctggtgacctgcttttgaccctgtctcctcccgtgggacgtcactagccaggcgcctagtgcagcaggcctctgtcactcctctaatccatctctccctctcctttggacatcttgacataggtttctggaggcagaaacttgcttgtggagatttgtctgtgagctgccggagcaggggccttcccgtgggtgctgggccggcagcggctccgccctgcagagaggaggacgcggccccagttgggtgaggaggcgagggcaggatgacgtgatccaggggaggctggtgtgcagggattcctggaggccggctttcagcaagggcactgtgaagtcttccacggaaacctgggattgcctgttggaagctgggaaggcaccaggtgctctcgctcccctccagctgctttgacgttaagaggaactcgctgagggagcatggaaaggggctgtaggattgtcttcagtctctctttggttcttatttgatgtttctttttaatgtgggtcctgagaagtgaggtgtgcccataccccaggyctttgatcacacccaggtttgtccggctaggctcagggtggactttggagggcctggccttgactgtgtggcttagggatcagatggaagcttctggaccctgggagtgagagcagtgtgctgccctctgaaaaggaggatgagggtccagtgaggttcagcatttctgtaaggtgccttcttggagggagttcccccttcagggctcattcagtggattttctgagtgtggcttcactcctgatggtcagtggtgcctggcgggtgggttccttagggaggtgtctgtggccgaggcacgcagctctgttctgagctgagagctgtggtgtgtgggcacctccgtcctgactgagagctgtggtgtgtgggcgcctccgtcctgaccgagagctgtggtgtgtgggcccctctgttctgaccgagagctatggtgtgtgggtgtcattgctatcctgtgctttccaatctgttcccattgctcacgggagccccagtgagaggcccctccctatggggagacactcctggcgaagttttcttgctcagggtcttctgtatgggccgtgaaggggcctcagggtggcatcagcacatgtgcctttcccacragagacagtggctttatcttggtgtcacattggccaaaatgtcttttatttaacatcatagatgaggccaggacattttacttcttccgagcatcctctttctgcacacagctccttgggggaggctgtggtgtgcgtgtccccgggtgtgctggggagcacaggggtgtggggatcagaggctgcctggcttcacatgcaggagcctggggcccttgtaggcaaaaccttcacccctcaagttgtcctgctattggagggaggaggtgaactggtgtggcccaggagccaggcctgctcyctgaggagggtctcccaggcctgagaggataaggaagatgaagaacctgaagtgggtgttaggaccctactgtcctggggccttgcatctggcctcgctgttacaatctgtggtaacgtttcaggtacaaatgcctttactagggcaaagggctttcctactttagaaagcagttaaaagccatagatggctgggcatggtggctcacacctgtaatcccagcactttgggaggctgaggtgggcggatcacttgaggtcaggagtttgagaccagcctggccaacatggtgaaacccygtctcttctaaaaatacaaaaattagccaggtgtggtggtgtgtgcctgtaatcccagctgctcgggaagctgaggcaggagaattgcttgaacccagaaggcggaggttgcagtgagctgagattgcaccactgcactccagcctgggtaacagagtgagactcggtctcaaaaaaataaaataaaataaaataaaagccatagatgtatttgaatcagtgcaggaaccagggtaacatctgtgatgagatgcagaggagaaactgtctccatttgggctgcaggtgcatggccatggccaaggccgatggcttcccacgcagctcacagctttgtcaggctgtggaggccacagtgttggcgggcgctgtccccggcgtagggagcaaagcgccgccttcagatggtctcatcgagacacgccttggatatttttgggactcttctctgccagctcctctgtgacctcccacccttggagcacatgagacccgtgtcgtcttctcttgcagaggtgctccgtcacaagagcagagcctgggagcctgccccgtttctgactgccccccaatccccattctgactctcacccgcccccattctgaccccccgcccccattctgacctgcaccttttttgcataacacactttgtgatgcctcatttatctttgagtaaaattcatatatcacaaacccacacatgtagtttttttgaaagtacagtgtgacaccttaactttgcattaatgtaaaatggcattcaggtggagtctcagataattacaaactaattttttaccttcttagatgtccagtggaacattctaaagttactcaagacgaatcttcaagttagggtgtcttgtgtctctgttttttgcctgtgaaatgccaatatccttgtgatagtcagagccctccacatctccagaacgctcttagctgggtggggggtttctccaccaagagcccctggtgtatagtgtcaaagtgtgagtgttgccaggctgtagttcagtggtacgatcttggctcactgcaatctccgcctcctggtttcaattctcctgcctccacctcctgagtagctgggattacaggcgtgtgccaccacacccagctaatttttgtatttttagtagagacggggtttcaccatgttggccaggatggtctcaatcttctgaccttgggatctgcccccctcggcctcccaaagtgctgggattacaggtgtgagccaccgtgccaggctgggtgtcctttttatagggagcatctgagtccctctggtgcacaggctgctgtggggcaggacccgtggagcccagagcaggtmtgagctcccaaagtcaggctgctggggcattgctggggagcctgctgccctgttggatgggtgagcatgcgatggactgagctgctgcttgtgccctgttgtgagagtttaatcatgagatcataggcgctctttccttgtgcctttgccccaggatcaaagagcaattactggggccgggtgcggtggctcatgggaggccgaggtgaacgtatcacctgaggtcaagagttcgagaccaacctggccaacatggtgaaaccctgtctccactgaaaatacaaaaattaactgggcgtgatggcggccacctgtaatcccagctacttgggaggctgaggcaggagaatcgcttgaggtggaggttgcagtgagcccacaccagtgcactccagcctgggcaatagagtgagactgtctcaaaaaaaacaaaaacagagacagtctcttgctatgttgcccaggctagttttaaactcctggactcaagcagtctttctgtctcaacccttccaaagtgctgggattacaggtgtggggcaccatgcccagccaaaaagcaattattttttaaaagtatccgttctgtagacttttaatgattaataatgatttagtaataatttaatgattaataatgcacccgagtaagttatttgctttttcatctttggaagcttactttcttattggacagttggcagtaacatgcatgatcttagttctttcttttttttttttttttttgagatggagtctcgctctgtcgcccaggctggagtgccgtggtgcgatctcggctcactgcaagctccgcctcccgggttcacaccattctcctgcctcagcctcccgagtagctgggactacaggcgcccaccaccacgcccggctaattttttttgtattttttagtagagatggggtttcaccgtgttagccagggtggtctcgatctcctgacctcgtgatccgcccacctcggcctcccaaagtgctgggatgacaggtgtgagccaccgcgtctggcctttttttatgtctttcatggcaaaatttttttgagaatttttttcattcaaatagcatttgtgaaaaaatgtagggtgccttagtgaaattatgactgatgttttaagtgcagttatctttaggctggagtctgggatatactcaggaagtggctgttagccctcactctctggtcactcactgagttgtgtgccacctgccccagccactgggagtgcatggatgccaagggggtgccatgggggaggacgtgcaggcgtgagctgcctggggttggccaggccagggaggctctctgctgatgctctccttccttctcttccagtctacgccttctccgtcggcagacctgctgggtctcggggctgccccccctgcccccgcgggccccccaccctcctccggcggcagcgggctgctcgtggacgtgttctcagactcggcctctgtggtcgcgcctctcgctcctggctccgaagacaactttgccaggtagtcaggtttcctgagtcctgcagacaggcacggggctgccgtgccccctgacttctggtgtggccgcggccagctggacagaggtgggcagcggagtttacctcccagattactgcctgggggagagagcgggagctgctgtgttgtgggtgggtttgctgtgtcattcctctcacaaccttgatttatatggactgcagtgttcattactctcaggaggaaaaggaggacatgaaagaaacacactgtctgggtggtggttgtgtcctgtctgcacggtgatgtccgatcatgtttcagctgctgtttgagtgttgataaacactctttgtagctacacgtctcctctcttcgcctctttcctgtctagttgggctgcttttcattctgacttaagccgtcttgtctgtgtctgtcctggaggcccggtctcttgtccttgagttgctcacttgctaagtccttctgtgaggcccaccctgctcacgccttcggcctccaccctgtggttccccctgagggcagcctgtctttgctgcttgtcctgctctaatttctgtccggtgcctgggcacctcccggctccctgtgtgcagtggtctctgccagtgtctccgtggtcttcagatcgtcggtgctgaccactttcccccgcacgtgctctccccagccctctctgctgggctcatcagctgtgcattccgcttactggctgctctcagccatctgcttgttttcatgtctggccggaggtctgaggtgccccctttcctggagttgacgcctctcccctgctgccctgtggggtgggagcgcaggtgccggtttctgtcccagatggaggttagagagcctttgaggaatggccttttggccccccattttgaagactgtaatagagttctggtgtttttcagttctttgtattcatgttgcacgtgagttctgtttcctgttacrtgttgggaaaggacttaggagaggcaggccggcgtggtggtgggtgcaggtcgccgcttgggctgaaaacagtcttactgctcttagagtcgctgtgtttgagattgagaatccaggttgcagggctctggtggtggctgctcctcagtgtcttggtggcaggaagggaccaggggctgggcagtccgtggcagccgtggcccttccctgctgggcgctgcctgccctgtctccatacggctgtgctgggagctgcacatggcccttgtgcacgcctcacattgggtggcgctgtctgcagctggccaggcytcggggctcttgtgcatgcggccgtcttggctttgatctggctacagagggtcatcaggtgtctgcgtgtgtttggtgtaggatggaggcacagagtgcctcagggcgagccggctgtggtggctgctggcacacggctcacaggacagggcggctgcattctcatggccttgcagagtggtttgcattttccccaaagattcctccaggccaggttgtagttgggatgaaccaagcagagatactgaccacaagggcctctctgtcacgtcatgggtggtccgtcagagcccctcccgtgttcttgacagattttactttaaagtggcttagtccacaccctgagtgtaaactccgtggcccctcgcgtggagtgcccgctggctgtgggcggagcagcgacccgggggtgcggtgagcacgtggacctccgcctcggccggctcctcctgttaagcgatctctgctttgttagccgcctgctgtgagcagtcccaggtgaagcccagtagacatgttccaggctgtgttgtggatcgctgtcctgtgttgtgtgttgcttagaccacacttgactttttgaagcttcgcatgtggctgcagccggaccagcagcctgccgggctgtgcagggggcggctgtggcctccagaggtgtgcgcagggactgctgcctcagcggctctcgtggccgtggcaggctggagtggggcattgcgtggcgagcagcgccctcctggccccaagagcgagccaagggccgcctgtcactgccccttgccgtctgttgctgcttcctctgtcttcctggcctggtctccatacagcaggatgccgatgagaaggttggcagcactcagaccttccagggtggcagctgtggtgcagttagtggagactggctgcaggagtggctgaccttgatcgccgccatgtcagcacaggtggaggtggagatttcagaattaggctgctgccgtgcagcatttgcttcttaggcactggggtgggttggagggagggggcggtgccatgacctcctgcctccccaccctgtggtttgaatcagtgccacatccatctctgtgctgggttcacccaggagccctgtgccactgccccgcctccctctcctctcttttggatctaggtcactgtggagttacagtttcctagaggaggtcagaaaacttgaagctcttctgagagaaacacaaatgaaagctaaccaacgctattttattttcccctaattctgtgtagtgtagataggtgccctgtggtgagcaaaaccctgggctccctgtgcggtgtagacactaaccacgcatggggcgagaggagaggccagaggggagatgggggcgcccagggccctgcagggctgtgctgctggtgggtggatggctgggtgcccgtgcatgcgtgtgcatcagcggggagcagccaggctctgatggcgaggccctcgctgggtggaagctcagcacccgtgttggatggagtctgtggtggggccagaagctgtgtgcgtgcctcacgcccgtgtcccttctggggccgtgagaggccgttacatgtggaccagcatgttcctgaaaagcagctgcaccaaccaacttcacaggtcttgccggggctgtgtccgcgtccctgcgtcctgctcaccgtcctcctccagtggctgtttgtcaggatagtccttggaatagtttccacttttttcttcccttgtgtgccatagaggtttttctggcctcctcgtgctgtgagtttttttccagaacaaacccttgtgttttctgcaggtggctttgagtgacacatatactgtcccttttcccctaggtttgtttgtaaaaacaatggtgtgttgtttgaaaaccagctgcttcaaattggacttaagtctgaatttcggcagaatttaggtatgtgttttaattacttaatgaaactgtctcttagaaatatgggaaattaagagaaaatatttgcaaatcatatacttataagggatagatatccagaatataaaaagaactcccataactcagtaagaaagcagcccaattaaaaaatgggcaaaagaacagcctgggcaaacacatcaagaccccatctctacaaccagagggggtggcggggaggtgggggtgggtgcaaagttgttgaaaagacgacattctccagggaaaatacaggaatgctcaataagcacctgaaaagatggacaaagtcacgagggaagtgccaatcaaaaccacagtgagctaccacctcacccctccaggatggctgttagaaaacaaacaagcagcctgtgcagtggctcacgcttgtaaccccagcatgttgggaggccgaggcaggcagatcacttgaggccaggagttcgagacyggcctggctaacatggtgaaaccctgtctctaataaaaatacaaaaattagctgggtgtagtggtgtgtgcctgtggtcccagctacttgggaggctgaggcaggagaatcacttgaacctgggaggcggaggttgcagtgagccaagatcatgcsactgcactacagcctgggcaacagagtgagactctgtaaataaataaataaacagactggcctggtggcctggtgacttaggcctataattccagcactttgggaggccgaggtgggagggtcacttgagcccaggtgtttgagaccagcctgcacaacattgtgagaccccatctctacaaaaaatacaaaaattaggtagacgtgctggtgcacacctgtggtcccagctacttgggaggcaaaggtgggaggatcgcttgagcccaggtgtttgaggctgcagtgagctgagatcttgccactgcactgcagcctgggcaacagagcgagaccctgtcgttcattcattcattcataaataatgcatacatcattatttatgtatgcataaataaccaaaaaggaaaaagagtgtctgcagggcgtggtgacgttggagccttgtacgccgctggtgggaatgtacagtagtgcgggcactgtgggaagttcctcaaaacacaaaagaagatggaattactctgtgacccagcagttccacgtctgggtacagaccccagagaattgaaagctgggtcttaaagaggtacctgtccacccatgtccaatggcagcactattcacaatcaccgaaagttagaaacagcccagatgttcatgggtggatgcctaattaaacgaaatgtggtctgtcgacgcagtggaatattattcagccatcaaacggcagaaaggaatgaaattctgatgcataaagcagcacacatgcaccttgaggacatggtgctcagtgacacgggccagacacctggacaaatcctgtgtggctccactcatgcggtccctagagcagtgacttcgtagagacagaaygtagctgggggatgccagggcctaggccagggggatggggaattggtgtttaatggggacagagttccgtttgggaagatgagaacgttctggagatggtggtggtggcagcagctgcacagtgtggatgcacttcctgtgcccttgtgtgcacctaaatatggctaggaaggtgaatgttagtgtattttaccacaatttaggagaaagacataaaaaagcctttgagtgtaaaaaaatgctgtgcacggaaccctgtggctgcaggggccctggctgcggacctgcctcctctcagcgcctgccttgagcctcctcaggactgctctctctctcatctgtgaaaaacacagaaagaatgtgaaaaaagagaattagtcctctgcccgccaggggtctgttagaaaagtgagggttgtcagagtgattcctgtgggaaacgctgcattgaaaacaggtggtgcctttagtcctggtttaagtttttaagctctgggccgtgatagcttcacgaggtgttggttttgggtttttaaattgtgggaggagtgatgccaaactgtttactgttttcaaaatatttgagatttcctttctgaattcaaggggtatacagatgttcacaaagattttttactgtgatataaataaaaacagcgacacatcctaaatgtgcacctgtgccgtggctgagccgctgcagtgagggytagtgtgcaacaccgatgctgtgctggacgcgtgcccagccgggtcccctgacaggaggcagccggggccggtgcgtgtgtttgcatgttgcagtcatggggcggggccggcagaggcctgtgtgattgtggcgtccctggaaaagatgcttggcaggcccctccagctgtagcccagcctgcagacggggcgttctgtgggtccttccccgtgcatatgcgtgtgatctcacccatcccgtgtgggtgcgcaggaggggccgagggaggagggtgctggagggcggaagttacctctgactggaggagatacccggcccgtgttaccagcactggtgtgctcgttctaaaactggaaaaaatttgttcttaattttaacaacagtcatacatcacaacagtgaacttaaattcagctgaagattgtggggggctcttgtttttcagggtaaatattcagggtaagtgtgaaatggtgtgtgtgaaaaaattgtttttgttccttctaggtcggatgtttatcttttatggtaataagacctccacgcagttcctaaactttaccccaacactaatctgttcagacgaccttcagcctaatatccttggcttcattgccccatgcccgcagacagcataatgtggggcttagaggaggcttttgaggaagttttttggttttcttattttgttaaaatagcgagataattccagatgctatatgaaaatcaggcagtcgtaatctgcctatggtgctgggcaggagaaggaaaacaggcagtcttccatattggagagccagcttttgatcatgcacctaaaaataccgtgtacatgcctcctccccttccatctggccagtgtgagtccctttccttttcacctgctcttactctcctgtgacgtgatctttaaacccctcctctccgaagcctcacagagctgctgcttgcagagtgtgggaggcgccagtggggactggagcgcggtgcgcaccccagcygagcttgtgtgtgcttctggcagagcttttagactgaagattttcccttcgtaatgccagaagcgttcctagaacttccccagctaaaacagggagacgctaacgtctctacctctaaggataggcccgccaaatagagttagcgtgaagaccccagcttgaccagagatggtgacacctggggatttatggtcagcgacctgagtgaagcaacatcctccttgccactggctggtctgttcattttaacatgaacatgttttaatgcagactgttcaagctgtttcaaaacagtcattaaaaatacacatgcaggagcacctgtattaaagactttgtttggaatctggagtggaagctctgactcctactgcgcccttctttaggggtctctccctcggggtccacttggctcgaggcggcagcgagcccagcagctgagtggccggcggcacacgacccagagggaaggagaggcctgcaccccgctgcctcctggacccagctttgctgctgtcactgtttcttcaggagaggctgtaggcaaacccttgttttccagcatgaaaacaaccctggtcccagcagggcaggctcttttctgtgtctcgctgtttcaggagcctgctattcctgggattcttaaagttttcctgccctactaagcaccagtttctgctaacggtgacaaaaattgtgtgtgtaagacccagagccgaggctcagagtgaaaacagacaagtagtatataatctaagtgactttttaaaatggaggagccattctggaagcgtgagaagcagacagtgttttgaggattgtctgggtggaagggcagggccgggtggtgtggctgccctcgacccgtagctggtggtcctagagtgtggtgagtgtgctcgcctccacgggtcctgctggggctctagcccggccygtttccgcttctgccactgggacttgctcagctggattccttaacgcacgcacacctgaacctgcagaccaagcccgtggacccgaccgtggaggggggcgcgcaggtgcagcaggtggtcaacatagagtgcgtgtccgacttcacggaggcgccagtcctcaacattcagttcaggtaagagcygcctgtgcgcccygggccaaggggtgtgtgggygcctgagctgtgtgcctgggctccatgactgtgcctccgtgtccttcctgaggggacccggggcgtgcgggtgctcacggtgcatggatgcggcctgagctattgctgcccccggctctgcagagcgcaggaaacaaggggaggcggagccctgggctccgggacggcaggtggcagctcccacatggggccttgctaggatctttctgggcaccatggggcccacctcatggggtggcagacagccagggcccccgcgccacctgcccggcttggtaccagacgacagctgtggggtgcaggcagctggtttccttcggccccctggcctggggggcgcgttttttgctcagttgagctcagatcgtaccactttgcttattttttaaaagcataggattttcctgttgcgactgttcattactctcacttttcagtgactacaaatagcgtggatacagtcagcccgtcccctgctgggtgtctgcaaggttaggaatgttgagaaaagcacactttctaacattaaaaagacagagaacttaagattgtatactgtagaattcggggacatagacatgcaagtttttgtttcattctttgtgcaaatgcctttgcctttttaaagaaaaaacatcacactatttgcacagacttggagttctgggaaacagatgaatggggagaagtgaggcacagggacgtcctgcctgagtatgcggccctggcctgtcctcctgtctgtgggtgacactggacactgagccacacacgatccgtggggactgaaggctcggccccccgacccgctctggtgggtggcagtagatcgggacgcttctcactccaggctctttcccggtccctggggctctcagaggagtagctgactgtctctttctgctgctgctgctgctggcaggtatgggggcaccttccagaacgtgtctgtgcagctgcccatcactctcaacaaattcttccagccgacagaaatggcttctcaggatttctttcaacgttggaagcagttgagcaagtragaaacctgtttcctgtaggggtcaggggtggggacggggctcatttgaaaaggtgggttttggtctctggcctggctgagaacactygcctttgctgtttctcacagtccacagcaggaagtgcagaacatcttcaaagcaaagcacccaatggacacagaagtcaccaaagccaaggtaacacgtctggagggayggccccgggggacacgcakcccgtgaccccgcgccagggtctggagggacggccccggggaacacgcagcccatgaccccgcgccagggtctggagggacggccccgggggacacgcagcccgcgacccagcgccagggtctggaggggcggccccgggggacacgcagcccacgacccagcgccagggtctggaggggmggcccygggggacacgctgcccgcgaccccgcgccagggtcctcattctcctgtttctttggacagatcattggatttggttctgcacttcttgaagaagttgatcctaatcctgcgaatttygtgggagctggaatcatccacacgaaaaccacccagattggatgcctgctgcgcttggagccgaacctgcaagcccaggtcaggccctcaggaaatggtggaacacacttgagttgctttttattctggcacaatgtacgtggtgagatgygtagctctttagtgcagttcagtcagttttgacagatgttgtttaaccaccaccctgtcaatacatggttgcctcccagcctccccgcagctggccaccgtggagcatcatccctagtgcagttcagtcagttgtgacagatgttgtgtgcctgtttaaccaccaccctgtcaatacatggttgcatcccagcctccccacagctggccaccgtggagcatcgtcccaccatggagcagcctggccctgggcggtggctctcccagctgttcctctctgtcaccgcgttgttccttctcaccacgtcccgttctggcgacggacacctgtctccgtttcacttgggtggcacccaggagtgctgctgtcgcccagggcctgtgtgtggttagtgctgcaagaacatcccacagcttctccaggtggccgtgccactttgcactcccgccagctacgtacgagacgccaggcgctcccatgccagccctcagttttcatgctgacagtgtgtgtggtgctcaggcctctgccgagttgtgggtgcctccagagagtggtccctgggcatggcccacagggttctgcatggcggatcctggacccgagggctgtgtgagcctcggcgtgcccgttgacctgctgtgctctctgtttcagatgtaccggctcacgctgcgcacaagtaaggaagccgtttctcagagattatgtgaattgctctcagcgcagttttagtcctgaggatggaagaccaggctygtgtgtcttgtgttgtcttcgtctgtgccgtttgtcttygtggcyatcctgcagatgagcaccgtgtccagtgccacagcacaaggcgcctccccgccccvccgccccacacctctcccctttgggctggacgggaacacacgtgtgtggctcaggaggaaaagctcagcctggactgtggcagccacggcagaaggtggatcttgggatcaatttttataaaaayygagacagttctgtggttaaatctacaaattaaagggaaattagaagttggcgtgaacgtggcgtttgtgggagtgtcactgagatggcccgtgctgccgcccaccccgcctcggagcctctgggagcagcagtgccactgtgcatggcgtgggctgagccttggtgtgtggccgtcctggtggctgcacacctggcgtcgtcctgggcccttgggaggagcacagctgaccctggttttgctgcagtcccagctggactgttttcccaggcaggattttaatctagaatttagaaacatttgtatttgtaatgacttctggcaaaagcacgtgtcctggccggatgtaactgttctcctttcccagctcctgtttgtgaagggcgtctgttatgctcctgcagtcgccgaggccttggatgtgcagccaggggaggagcgtcctgccggccccgcagggcccccaggactccagggtaaagtgtgggccggtggcgcaagactcagaggtgtgctcgtctctttcctgtcagagtgggcgtccccaggccacggtgcaggcctgagtccttccaccggccccgtccagtcgtccctggaggggctgtggaggagggacgcctctgtgtggtcaggaagtgaaggggccattggccgcatgccatgtgccacctgcggcttgtgtctcacctgtcatctggactcagcacccaggctgcacgtctgacacctgagaggcgagagagtggggccggcctaggagccaaggctggggccttgcgctctgtccccaggatggtggccttgtttgtcctaaacacacccagcacaggttctggcttcctgacatgctgtggaggcagggagggtgggtggccacatgtgcttgagggttttcaccctggccctcagttgcctgctgtgcgggtccctggggcagctgcaggggctcayggacccatcagggtctccacagctcccctgcagtgtgtgcaccccacaatgtctgcggctcttcttccggcgtgtcgggctttgatcacagcatagccacgtcagtggcgtgcgcctctcgcacaggccattctgggtctggtggtgccaggtgccgtgacacgccgtgctgggcttgtgctgcagctgggtggtgtggccctcattctcatgttccagctgctgggcagtgctctgcctgtgtgctgcgcctgcaggctgcgtgtgctgccgtggatctcctgcatcccttgacccctcccgccatcagaggaaaggctgctccccgaggcaccgcttccctgtgcggcgctgcagaggggccctcagtgtggcactcctcgtcaaagaaaaataaaggctagaactgcaccccggatcacgcgctttctttggggggaaagcatcccatgtaaccctcatagctccccgggggtcgcgtgaggcacagaccccaaggtccccgacctgtccttcagcagtgggctcacgggcagcgggcatcagaaagtgacctgccctttgctccgccggtttgattctgggtgtgtggtggagctttttgggactcaggtcatgcgggaacccctccagcctggccgcagggctccccactgtacagtgtgttgaggtgcagcccagggctccttcctggggaacgggaggccccgtggggatcctccagttgatcctaccacagatggtgcagaaggggctctcgggcagatgggggtggcccccggaggacggtgggcttcgccagagacggaacagtcctaatggagggagggcaggggcccaaagccagaggcagcttctcttaccagcccagaccctgctgggggcagccctgcccaactgcagatcccaggggcccacagggtgcagatgtgggtcgggtgcctactaagggactggggagaggcaaaagcagtgctcagggaccagcctctgtgccttgacaagaaccggtttatttggagtctctgaccgggtgacgccctctcccaaggacaggctgctggggatgggtgtggtgctggtgggggccttctgcctggctgggagcgggggcggctgccctgccctcgctgccaccctctgccctccctgactctggggatctcctcttctctgtgctggtggctgcctgggcctcttgcccccatctcggcacaggtttccgtgccctcctcgcccctgatgggtctggtcgagcgcctgctctgtggcttcatctgcagggttctgggcccagcagggctggggccaagttcaggggctgggaggtgttggacggtgggcaggggtggtcgggagtgccctgtgtgcctgggaggtccgtgaccactgtccgcctcagtccctctctgctggctcagggtctgcaggagtgtggtagtctgagcccctgcttggcagcccctctccaaccggtgccccagggagccacggcccagggcacttgggggccaggcctggtgaccaggaaagcagctgctggcacaagcgggaagggggctggtgggtgttttcctgtctgtcatctgcagtccttcagccccaggagagcaggcagcgaccctgctagtctccacaggccacagagctgcacacgcagtggctgaacacctgcagggtgagtacgagccgccggccaggcgtgctgggatcggggcagggcagctccagctgctgctcataggagtggagggggcggcagcagctgcagcgggcatccacctgctgggtgatgatgttgaagctgccgagaagtcaagacagagcagggtcatgactgctgcaggggcataaggcccctccctccccagggcagctgctccgcagaggcctggacctccccgctgagctcccggctcacaggggccagggcggtgttgggcagatggagcgcagagtggctcacctgatggggcagcaggcgcctgggtggggtgcccgaacctctctggggtggggttgtgagcaccttggtggacgtggggcaggcctcccacctgtggactcacctggcagcggaaatgcaggcgccctcacagcgggttaccgtcacgttcgccatgcaccccttgaacgtgatctcctcctgctgctcccgcacactgcagacccctggtagccgagtggacggtcagcagcgcccagggtgggcatggagcgaggagggagggaaaccctggctagagaccggggtccccacctgtctctggactctcctgcccaaggtgtggtctccccttgtggagccccacagagctcagacctcagccatacacaaaggcaaaggccagccgcatcctagtttgttttttcccctcaaagtcgctctgctggagtccataaggtagagaattttctcagcggactcagcagatactgagccctgggcctgtgtgagccacccttgggccccagcttccctgatgaccaaccccaggcctcaacactgacctgtgggcatgggcctctctggttggccagacccaggacctgcaggggggccgaggacaccgtgccagtgaccccagagcgggacatatggtgttgcaggagctccgtgtgccccagctggggaggagggaagtggagcaggccccgtggtctgggctcctggaaggggcggggtgggggcccgcggggaaggcccagagacagccagcctcagcgagaggcctgggtacgtggcaggcagcacagagcagggtggaccgatgcaggcagtggcagcgttggcattagaaaccgccactggagagcgtgggtttaaaagtggaaaaggagtcctggggtaaaggctggactctgctgcccgtgtgccctcccctggctgctcccagcttcgtttcctggctgcagagaagacaggtcacctggagcctacctgcccgctgcagagggctttctccgggagggtcaggactctgggtgcttccataggccctgccttccccagctgccctcccctcccagctggttcctgctccctcgcctctgcttcttggggtcacctccctggttacaccttgcacccaagtcccggtctcagggagggacccgaaccaagattccctcagcttgcagcaacgagctgccacccacgtgagagaccacgaaggcaactgtggcgttgtcgcctggtggaggtcgatgcatgcgagggacccagtccctgggtggttgctgtgagaggaacacccaggagggaagggagggacatccctggaacgcgaggtgaggtgaggtggacatggataaggcctgaggtgtgctctgtccccaggcatcccatggcctggggagcagtggactcgctcacaggcatgggccgggaagagccgtggcccagagaattggcatgagcacgaaggagcaggtgccctggttgccaggtccagctccaccttcaacaggtcctttggggcgaggcaggggatgtgccagacttttgtgtctctctctgcacttggaggaagggctgtgctgcttgaaccctggggttgggccagccctgacatcctctgagcaaccaaaggggcagccagggaaggcttttggcaggtaacactctgaggggaggccaggagtgcagcagtgaccgggcatgagtgagccagtgcagggaaaggtcaaggttagctggggaacaaggcccaacggggaggccaggcacttgcttggccaggacagcgttggcatagagggtgcccaggagaggagagtggaaacgcctggcaggtgtgtagggaaggcagggaacaggcgtgtggtcctgggatcacaggaccatgaggggtaagctgaggcaggggctgcctgggagtcatgagcacagaggtgaggccaggagaagggccacagagatgccacttaccgggtgaggtgggcgtaggtgtcccgagagaagataccggggcagaagcaggggtgcttccatgggcagtgagggagctggtcaggaaccgtgtggtaggcgacaaggtgggaccagggtgcctggtggtaaggttggtgactggagaggtggggatacccgtcacccccgaggtgagtgacacaaagcctgatgtgggaactcgggtggtgagagaagtggaccgcgaggtggtggactgagaggagaaggcaggggcggtgtgggtgctggccgtggtcctgggcgtggacggaaatgcaatggtgctggaggctaggtggctggatggggtgggagacacggtaacagtggatatggggagtagagcagagagggtgaaaggagaggagatagtgtgggggagagtggccctaatggtagtagaggcagctggagaagaaggaaaaagaggagatgcagacactgatgcagtcgtgggatgagtggacaatgaggagtgtgaccccgagctcagggttgtggagtgcacgggggcggacacgaaagaggaagatgtgccaacagaaggcgatgaagtctggggagaggagtgggaggagggcacataagaagaaacagtagagggggcagaaggactgggagaaaatgaggaggacagctgattagttgtggaaacaggagtggttgcagaactcaagtgggggagttgtgtggtgataggtgatgacggtggccttgagctagagttctgaggcagccaagacgaggaggatatgaaggaagaagaggctgtagctgtgctgaatgagctgtgggtttggctggtcccactggtggtcactgtcattggtggggctgtgtgggtggaccctgtggccttgagcgttgttggtggaggaacggtgcctgttggcgttgagtggatggaggcagaagtggccatctgtgtgtgggtagtgatgatgactgtgtgagtacttggagtcaccaaggaggtggagaaaggtggaacgtgagtgggaagtgtggtctgagggtgtgatggggttggataggtagtggtggtctggaaggatgttgcagtcataggacctgtggaagagaagggactgctccctgtaggtggggagtgtgtggtgaagggtgtgggtagcctgctgctgctggccgaggtggtgtgggccacaggggttctggtgcctgtactggtgtgtttgggggtgatgttggtggtagaagttggggtgacttcaggatggtgtgttgaggaagtgtggtaaggtagggatgtagaagttttggccgtgctaaatgagcttggggattggctggtcccactggtggtcggtgtcattggtggggctgtgtgggtggaccctgtggccttgatcgtggtcggtggaggaatggtgcctgttggcattgagtggatggaggcagaagtggccatctgtgcgtgggtaggggtgatgactatgtgagtacttggagtcaccaaggaggtggagaaagatggaacgtgagtgggaagtgtggtctgagggtgtgatggtgttggataggtagtggtggcatggaaggatgttgcagtgacaggacctgtggaagagatgggagtggtccctgtaggtggggagtgtgtggtgaagggtgtggttagcctgctgctggtggctgaggtggtgtgggccacgggtgtccaggttcctatactggtggggttgagggtgatgttggtgatagaagttggggtgacttcaggatggtgtgtggaggaagtgtgtgaatgtagggatgtagaggttttggctgtgttgaatgagcttgaggcttggctggtcccactggtggttggcatcattggtggggctgtgtgggtggaccctgtggccttcagcgttgtcggtggaggaatggtgcctgttggcattgagtggatggaggcagaagtggtcatctgtgcgtgggtaggggtgatgactgtgtgagtacttggagtcaccaaggaggtggagaaagatggaacgtgagtgggaagtgtggtgtgagggtgtgatggggttggataggtagtggtggtctggaaggatgttgcagtgacaggacctgtggaagagatgggagtggtccctgtaggtggggagtgtgtggtgaagggtgtgggtagcctgctgctggtggccgacgtggtgtgggccacaggggttctggtgcctgtactggtgtggttgggggtgatgctggtggtagaagttgaggtgacttcaggatggtgtgtggaggaagtgtgtgaatgtagggatgtagaggttttggccgtgctaaatgagcttcgggattggctggtcccactggtggtcactgtcattggtggggttcctgtactggtggggttgggggtgatgttggtggtagaagttgaggtggcttcagcatggtgtgtggaggaagtgtgtgaatgtagggatgtagaggtt

SEQ ID NO: 97966 - DNA, 33446 bp, Homo sapiens
cctcccgaggtgccgggattgcagacggagtctcgttaactcagtgctcagtggtgcccaggctggagtgcagtggcgtgatctcggctcgctacaacctccacctcccagccgcctgccttggccccccaaagtgccgagattgcagcctctgcccggacgccaccccgtctgggaagtgaggagcgtctctgcctggccgcccatcgtctgggatgtgaggagcccctctgcctggctgcccagtctggaaggtgaggagcgtctctgcccggccgccatcccacctaggaagtgaggagcacctcttcccggccaccatcccatctaggaagtgaggagcgtctctgcccggctgcccatcgtctgagatgtggggagcgcctctgccccgccgccccgtctgggatgtgaggagcgccttggcccggccgtgaccccgtctgggaggtgaggagcgtctctgcccggccaccccgtctgagaagtgaggagaccctccgcccggcaactgccccgtctgagaagtgaggagcccctccgcccggcagccgccccgtctgagaagtgaggagcccctccgcccggctgccaccccgtctgggaagtgaggagcgtctccgcccagcagccaccccgtccgggagggaggtgggggtcagcccccgccaggccagctgccccatccgggagggaggtggggtgtcagccccctgcccggccagccgccccgtccgggaggtgaggggcgcctctgcccggctgcccctactgggaagtgaggagcccctctgcccggccagccgccccgtccgggagggaggtgggggagtcagccccccgcccggccagccgccccttccaggagggaggtggggggttcagcccaccgcccggccagccgccccgtccgggagggaggtgggggggtcagccccccgcccggccagccgccccgtctgggaggtgaggggcgcctctgcccggctgcccctgctgggaagtgaggagcccctctgctgggccaccaccccgtctgggaggtgtacccagcagctcattgagaacgggccatgatgacaatggcggttttgtggaatagaaaggggggaaaggtggggaaaagattgagaaatcggatggttgctgtgtctgtgtagagggaggtagacatgggagacttttcattttgttctgtactaagaaaaattcttctgccttgggatcctgttgatctatgaccttacccccaaccctgtgctctctaaaacatgtgctgtgtccactcagggttaaatggattaagggcggtgcaagatgtgctttgttaaacagatgcttgaaggcagcatgcttgttaagagtcatcaccactccctaatcgcaagtacccagggacacaaacactctgcctaggaaaaccagagacctttgttcacttgtttatctgctgaccttccttccactattgtcctatgaccctgccaaatccccctctgcgagaaacacccaagaatgatcaataaaaaataaaataaaattaaattaaaaaaaaaaaaaagagaggaacccacaaaaaaaaaaaaaagaaagtatataaaataaaatattgaagtcctttcccattaaaaaaaaaaaaaaagaaaaagcacggactctttcatccagttctgatgtgattatctctggaaggcattttctcctcctcttccctccacctccattcagagtcactgacttataccttttacatattcacatgaaattcacttaatatatacacctatatactcacaaaaattaaaaattaaaattaaaaaaattcctggcccggcgcagtggctcacgcctgtaaatcctagcactttgggaggccgaggtgggcggatcacgaggtcaggagatcaagaccagcctggccaacatagtgaaaccctgtctctactaaaaatacaaaaattagccaggtgtggtgcacgtgcctgtagtcccagggaggtggaggtgggagaatcgcttgaacacgggaggcggaggttgcagtgagccgagaccacgccattgcactccagcagccagggtgacagtgagagtccgtctcaaaaagaaaaaaaaaaaattcccttaggcccagtgcagtggcttatgcctgtaatcccagcactttgggaggccaaggtgggtggatcacttgaggccaagagtttgagaccaccctggccaacatggtgaaaccctgtctctactaaaaatataaaaattagctgggcatggtggtgtgtacctgtaatcccagtactcaggaggctgaggcgcaagaatagcttgggcctgggaggcagaggttgaagcgagccgagattgtgccactgcactccagcctgggtgacagagtgagactgtctcaaaaaaaaaaaaatttttttttttcatttttttcaatatacaatctgaaatgatcttttaagtttatatgctctgatttttttttttaatctaaaagaaatcaggaccaggtgcaatggctcatgcctataatccctacactttgggaggctgaggaggattacttgagcccaggaggtcgaggctacagtgacctataatcagctttgggcagtggcagtatcatagccagtaaggtttatccgaggcacaattattactgattattgccaattgaaacagtgagttatgatcatgccactgcactccagcttgggtgacagagaccttgcttcaaaaaaagaaagaggtcaggtgtggtggcccacgcctttaatcccagcacttcgggaggctgaggcaggtggattacttgaggtcaggagtttgagatcagcctggccaacgtggtaaaaccctgtttctactaaagaaatataaaaattagccaggtgtggtggcacgtgcctttaatcctagcctgggtgacaaagcgaggcaagactccgtctcaaaaaaaagaaatctgatagacttcacttgtaatggatatttaattctatatttcatgttatcttttgtaagaatttaagattagtcaacaccaatcctatactcctctagaaaagtatctttgtagctctactcattatttcttatctctaacctaagttactttattacatattaatctgttcatttgttcacttgctcattgatgtaataaattagtaatctcaatttattggttacttgtttgatagagtcttcaatgtagaaatgttgtcaaagcttttttaaaaaaatttaaataggccaggtgcagtggctcacgtctgtaatcctagcactttcagaggccgaggcgggcaggcagcttgagctcaggagttggagaccagcttgggcaacatggtgaaaccccgtctctaccaaaaacacaaaaagttagctgggcatggtggcatgcacctatggtctcagctactcaagagactgaggtgggaggattgcttaagcctgggaggcagaggtttcagtgagccaagatcagccaaaccactgtgcctggcccacataagtaatttttaatttgctagtatccacattcaaaaagtaaaaagaggggccgggtagagtggctcatgtctgtaatcccagcactttgggaggctgaggcgggtggatctcctgagctcaggagttcaagactagcctggctaacatggtgaaacctgtctctactaaaaatacaaaaattagccaggcgtggtggcacatgcctgtaatcccagctccttgggaggctgaggcagaaggatcgcttgagcctaggaggtggaggttgcagggaggtgagatcgtgccactgcactccagcctgggcaacagcgccagaccatgtttcaaaaaaaaaaaaaattagattaaaaaaaaaagtttaaaaaggctgggtggggtcgttcatgactgtactcccaacactttgggaggctgagatgggaggatcgcttgagcctaggaattcaataccagcctgggcaatatggcaagagactgtctttataaaaaattagccaggcgtggtggcacatgccggtagtcccagctactcaggaggctgaggcaggaggattgcttgaacctaggagttcaaggctgcagtgagccatgattgcaccactgcactcctgcctgggtgataaagcaagaccctgtctcaaaagaaaattaattttaatgtattttatttaacccaatattcctaaaatatttcaatatgtaaacagtattaaaaaaaaaaaatatatatatatatatttttttttttttttgagacaaggtcttgctttgtcgcccaggctagagtgcagtgggatgatcatagctcacagcagccttgaactaggttcaagcgatcctcccaagctgggattataggtgtgtgcccccaaccctgccacccctggcttaacttttttttttttttgagacggagtctagctctgtcacccaggctggagtgtagtggtgccatctcagctcactgcaacctccgcctcccaggttcaagagattcttcctgcctcagcctcccaagtagctgggattacaggcgtgtgccaccacacctggctaatttttgtatttttagtagaaacggggtttcgccgtgttgggcaggctggtctcgaactcctgacctcaggtgatccgcctgcctcggcctcccgaagtgcgggattataggcgtgagccaccgtgcccggcccaaattttttttttgtagacataggtctcactatattgccgaggcaggtctcgaactcctgggcttaaaggatcctcctgcctctgtctcctccgtgctgggattacaggcatgagccaccgcacctggcgatattttgcattctttttttcatacgacgtgtttgaaatccagtttgtacagtgttttacatttatagcacattcccactgggactagtcacatctgaagtgctcaaaagccactatggctagggctaacgtactggacaacacaatgctagaggagcccgtccctgaggacgctgcagtttataacatcatagttcctcctctttggactgctgctttccccctatgtattaagacttgcagagtgtaaacagggcgccgtgagtgtgcaaagcacacacaccttcgcaaacggctcactctgaatactgacctttcggctgtcctaccttcaacaggtttcccgtgcataggagatccaagacagcagaaggcaggagctggcgggacagggaggaagagcggctctgccgtttactatctgtgtgacgctgagcaaattacacacggtctctctgactcagctccttcctgtcacaaatggggatatttatagtatttctcactacgtaggtccttatgcgcattaaatgagctactacacggcattcggcatagcgccaggcacacactcaatgttcaatacatgtaggcggttagcccagtaaactggtagccggcctgagtaagtcccaggaaaagcccagaaactctggagacattacagcccaggtcgagaaccacggcccgggccgtcccggacgcgggcccaccaagcctagggaagccgctcggcaccgcttcggcttctagactccctggccggctctttcccgtcaaggctgcggctggagaggactgagggagacctagggagaggattcctcttctccatccacggagacaacttggatatgaacaccatggatgtgaggaggtccgctggaagcaggagggatggactcctggactctccagctacctgcgtggtcctccccggtgtgaggacagaagaccggtcctgggccgggcccgcatccagccctaccgccggtgtctgaggtgagggctccgtcagcggaaaacgctcgacaacggaggggcaggcagggccgggggcgtggtcaacgcgggccccgccccccgggctctacccccgagcgtacgcgcgcgcctgaagcagccaaccaggaagcgcagagcaggttcaaacacagacggcgggtgaacatggcgtcctcgacttggtctgagacgtgataggcctgccttctggttgaagatgtggcgagtgaaaaaactgagcctcagcctgtcgccttcgccccagacggtaagcgggagatctctggcggagagaactgggccgggctgctgtcgcgggggcaccggccgtgtctactgtcctggaaagttgggtcgagcccggggttgggggcttgtggagtctttgttcgccttgctgctcctrcgcgactagggtgcgagcgtactcttctaatcgcattttgggcttcttagggagggaggaggggcgggctggcagaacccaggcttcctcacactcgccctctttcttggtttctttctcagggaaaaccatctatgagaactcctctccgtgaacttaccctgcagcccggtgccctcaccaactctggaaaaagatcccccgcttgctcctcgctgaccccatcactgtgcaagctggggctgcaggtgagattcgcctggacagcttctcgactgggctgtttgcccagggtgagagctcaggggaacagagggccagggctacaataattaataacgataatgaagtcttctacgtcggtgacatccatttacagctattcaggccaacagagaggtgccctagggtggttaaaggaaatccagtgagaacttgaatctctgtttagctgttagtttttattacctcctcctcctcccttcgacctttatcaaactattgagaaatcctaccaccctgattagtgctcttcctccaacatggggtcacttacggaaaggtcagtcacctgcaagattgaggcaatatccatttactctaggaggtagttagaactctcctgggatcaagttacaccactggaaggtagggtacttgaatcaccttagtttaaactagctccttgcagaattgccctcactgatttgtacttttgttaaacgttttgagagacgtagccatgtagaaactgcatttcagttgctgtcaaaacttgtcaaggaagcagcttgactcctgtataagattcctccaagaaaggctttaggactaactgcctggaaaaattgtcttcctgaagaaattgctatccttttctttctgataatgagaactatgtagtttaccatattttccctcttgctctgccttctagaaagctcaaggccaaactggatcatcacatacagctactgttatagctgtataggaagttttgcttcctcttttttgaccatgactttgttatttcattaatcgtatctattcattttcatgcatatgaattatttttggaaggagatgggatatcaataaaataggtatgaggaggaaagaagagtgtatagacagatgacatcctgagtaacagaagtatgatgatagcatagcagtctttcttgaaagagttgcaaaatacctactgtccaatagaactttctgggatgagggaaatatttgataatctgtgctgtccagcatggtaactactagtcacatggttattgagcacttaaaacgtggctgaggtgactgaagaattgaatttttttgtttttgagacggagtcttgctctgtcacccaggctggagtgcagtggcgtgatcttggctcactgcaatctccgcctccagggctcaagcgattctcctgcctcaggctcctgagtaactgggattacaggtgcacaccaccacgcctggctaattttttgtatttttagtagagacagggtttcacaatgttggccaggctggtctcaaactcctgacctcaagtggtccgcccgcctcggcctcccaaagtgctgggattacaggtgtgagccactgtgcctggcctgaataattgaatatttaatttaatttaatttaattaatttttttttgagatggagtttcgctcttgttgcccaggttggagtccaatggcgcgatctcggctcaccgcaacctctgcctcccgggttcaagcgattcttctgtctcagcctccggcatgtgccaccacacccagctaatttttgtattttcagtaaagacgggtttctccatgttggtcaggctggtctcgaactcctgacctcaggtgatctgcccgcctccgccttccaaagtgctgggattataggcgtgagccactgtgcccggcctgaatttttaattttaatttcaatagctacatgtggctagtggctatcatattagacagtacagcttaagatgaaaaataaataagtactaggtggaaattagctctatagagcttatagaatttattatgattattaattaattaattaattttgagatgcagttttgctcttgttccctaggctggagtgcaatggcacgatcttggctcgttgcaacctctgcctcctgggttcaagcgatcctcctgcctcagcctccctagtagctgggattataggcacgtgccaccatgcctggctaatttttgtatttttaatagagacggggtttcgccatattggccaggcttgtctcgaattcctgacctcaggtgatccgcccacctcagcctcccaaagtgctgggattacaggtgtgagctatggcgcccagcctgaacttatagaatttaaccataattatttaatcacaatagcagaatactagattgaaatcgaattctccttccctcttaactgctgggcttactacctccagatgcagtcagctacacaatgaaaagggtttttccccaataaaatagcaattatttttgttttgtaaaaatttttttttttttgagagtctcactctgttgcccaggctggagtgcagtrgcacaatcttggctcactgcaacctctgcctcccggattcaagcaattttcctgcctcaccctcccaagtagctgggattacggtgtgtgccaccacgcctggcagattttttttttgagacggagtcttgctctgtcacccaggctggagtgcagtggtgccatctagggtcactgcaacctccgcctcccaggttcatgcaattctcttgcctcagcctcctgagtagctgggattacaggcatgtatcactacgcccaggtaatttttgtatttttagtagagacagggtttcaccatgttgggggtcaggctggtcttgaactcctgacctcgtgatctgcctgcctcagcctcccaaagtgctgggattacgggcgtgagccaccgcgcccggcctaattttttttttttgagacaggatctcactccttcatccaggctagagtgcagtggtgtgatctcggctcactgcaacctctgcttcccgggttcaagcaattctcctgcttcagcctccccagtagctgggattacaggcgcgtgccaccatgcctggctaattttttgtatttttagtagaggcggggtttcaccacattggccaggctggtctcaaactcttgacctcaagtgatccaccctccttggcctcccaaagtgctgggattacaggcgtgggccactgcacctggcctgttttgtaaatttttgattattaatagatattaattgtttgaagcatttgaatatataaatgtataaggaagaaatatttctggtatcttagataaatgtcatatttgacagttctttcatacatctctttatgtgtgtctattttgtatatatgcacacacacacacacacactcatctttatattgtctttttttttttttttttgagaaggagtcttgttgtatcgcccagattggagtgcagtgccgcgatcttggctcactgcaacctctgcttcccagattcaagcgattctcctgcctcagcctcccgagtagctgggactacaggcacccgccaccatgcccagctaatttttgtattttgagtagagatggggtttcaccatgttggcccagctgcactcgaactcctgaccttgtgatctgaccgcctcagcctcccaaagtgctgggattacaggtgtaagccaccatgccctgtcttttttatttttttttttgagacagggtcttgctctgttacccaggctagagtgcagtggtgtgatcttggcttattgcaaccttgaactcctgagctctagcagtcctcccacctcagcctcctgaatagctgggactacaggtgtgagccatcataccttttaataatttcaaaattaaagtaagatacatgaaattacaataaaacataacagcataacaaattactataaagtacacatccatgtaactaatacccaggtcagtaagtaggacagtaccagaatatcagaagccctttttaacctaaccttggttttgtttcatccactaatataaatgagaaatttcatatgtttgattattattattattattttttgagacggagtctcgctctgttgcccaggctggagtgcagtgtcacgatcttggctcactgcaagctccacctcccgggttcacgccattctcctgcctcagcctcccaaatagctgggactacaggtgcccgccaccacagccagctaattttttgtatttttagtagagacggggtttcatcgtgttagccaggatggtctcgatytcctgacctcgtgatccgcccgcctcagcctcccaaagtgctgggattacaggcgtgagccactgcgcccggtctgtttgattatttttttaataaataattggactttctatctaaagcttccagaatagttttttcttcattgtagcacagaaattttataattatgtgtctagcatgtatcttttctagtcagtcctgcttagaaactggtgagccattttaatgtgcaaactcaggtctttcattagggtagttttcttctaatatttgttaatcagcgcctcatgtatatatgttctcttctggaatttcttttatttaactgttaggtatcctgggtttatcttctaattctcttagctttttcttcagatttacatttctttatatttttatctttgctttaagatatttcttccacttgtccaggccagtaattctagtttcaactctaataatttactctttcaattcattttactgacattttttatttaaaataatatttattatttctaaaatgtctttgtgtgtgtatttatgttgtagttaaagcttaagtactcgttttttttgttgttgttcagattatcatctgtgtcttccagcagctctgttttgttagggtctaccttttttatttatttatttatttttttttgagacagggttttgctctgtcacccaggctggagtgcagtggcacgattttggctcactgcaacctctgccccctgagcttcagtgatcctcccacctcagcttcctgagtagctgggactacaggcacacatcagcaccaccatgcccggctaatgtttgtatttttagtagagatgaggtttgaactcaagcgatccacctgcttgtggcctcccaaatgctgagattacaggcgtgagccactgcgcccagccgagagggagaagaacttgtaccaactctagattctgacagagcttaagccttcactcacaccctatggacccctcctatctgttcatctagaagtgcgttagagttcagaatggagatgagtggggtcactttcaagctaccatctgcccacgatatggatctatattctcagcctgtttataatgtaggctggttcacttggaaggacccaaaatggcttagcagcttttctttccctactattgggtctctatatgagcaacaaagattagccaagttcttacctaagcagaggtagtaagaattcttttcttttttgagtgcactatcttgcacctgtaattgtatgtcgggaactgaattgactgccttagacaactacttttgtttcctttggcaggaaggcagcaacaactcatctccagtggattttgtaaataacaagaggacagacttatcttcagaacatttcagtcattcctcaaagtggctagaaacttgtcagcatgaatcagatgagcagcctctagatccaattccccaaattagctctactcctaaaacgtctgaggaagcagtagacccactggrcaattatatggttaaaaccatcgtccttgtaccatctccactggggcagcaacaagacatgatatttgaggcccgtttagataccatggcagagacaaacagcatatctttaaatggacctttgagaacagacgatctggtgagagaggaggtggcaccctgcatgggagacaggttttcagaagttgctgctgtatctgagaaacctatctttcaggaatctccgtcccatctcttagaggagtctccaccaaatccctgttctgaacaactacattgctccaaggaaagcctgagcagtagaactgaggctgtgcgtgaggacttagtaccttctgaaagtaacgccttcttgccttcctctgttctctggctttccccttcaactgccttggcagcagatttccgtgtcaatcatgtggacccagaggaggaaattgtagagcatggagctatggaggaaagagaaatgaggtttcccacacatcctaaggagtctgaaacagaagatcaagcacttgtctcaagtgtggaagatattctgtccacatgcctgacaccaaatctagtagaaatggaatcccaagaagctccaggcccagcagtagaagatgttggtaggattcttggctctgatacagagtcttggatgtccccactggcctggctggaaaaaggtgtaaatacctccgtcatgctggaaaatctccgccaaagcttatcccttccctcgatgcttygggatgctgcaattggcactacccctttctctacttgctcggtggggacttggtttactccttcagcaccacaggaaaagagtacaaacacatcccagacaggcctggttggcaccaagcacagtacttctgagacagagcagctcctgtgtgggtaagcgcccctatgtccttgcacctcgtgagttccattaccctggaccttcccctcccatcccttcccctccttttcttttcgtcatgttcttctctttctgctgcagccggcctccagatctgactgccttgtctcgacatgacttggaagataacctgctgagctctcttgtcattctggaggttctctcccgccagcttcgggactggaagagccagctggctgtccctcacccagaaacccaggacagtagcacacagactgacacatctcacagtggggtaagaaggttcctctcaaagcttgagggatcccagtggggatccttggaatttaagctgagaagctgccagagggcaaaggggactcctatcacaggcttatacttagaacatttgcaaaagctgagaatctgggcagtcacaatggctgatgcctgtaatcccactgctttgggaggccaaggtgggaggactgcttgaggccaggcatttgaaaccagcttgggcaacacagcgagatcccatccctacaaaagatttttaaaaaatcagctggatatggttttgcatgcctcactactcaggaggctgaggcaggaggatcatttgagcccaggaggctaaggctgcagtgagctatgatcatgggcaagacagtgaaaccctgtctcttaaaacaaaaaagctgaggatctggaaaatccccttaaagctgtgggtagtcactctacccctggggtacatcagaactttccaaaggagtgcaagcaaggaaacttttaaaggaattggtttttagatcatcatcttccacaagtattctttttcttcgttttttgcattggtagactatatttaatattttaagaaaaattatgaataagcctaaaacattttttaaaataatttttaatttttgtggttacagagttaggtaaatatattcatggagtccatgagatgttttgatataggcatgtgatggtcaataatcacatcatggaaaatggaaaatggagtatctgtatctgtcccctcaagcatttatcctttgtgttacaagcaatccaattatacttttagtttttttttttttttttttttttttgagacggagtctcactctgtcacccaggctggagtgcaatggcctggtctcggctcactgcaacctctgcctcccaggttcaagcgattctcctgcctcagcctcctgagtagctgggactacaagcgcatgccaccccacccggctaatttttgtatttttagtagagacagggtttcactatgttggccaggctggtctcgaactcctgccctcatgatccacctgcctcagcctcccaaagtgctgggattacaggcgtgagccactgcgcctggcccctgttgtttatgtgaagaagatttctcagtgtttacatctgtcagaatggaaaggagtcagctggcatagtggctcacccctgtaatctcagtactttgggagggtgaggtgggaggatcgcttgagctcaggagttcaagaccagcctgagaagtatggtgaaacctcatctctacaaaaaaatacaaaaattagctgggtgtggtggtgtgtgcctgtagtcccagctacttggaaggctgaggtggaggatcacttgaggctaggagttcaaggctgcagtgaactgagatcttgacactgcactccagcctgggcaacagagccagaccctgcctcaaaaaacagagtcacgaattgttgctgaactatttcttattgctggaattatagtaatccacagatatacgaactaataaggggaaggaatctccatcgatttcattaataggtgattcccaattaaattttgccgagcatgtttattttattagaaattatattacagtgactaatatacaactgattaaaagatttctctatcctaaagaaagctttttcactttaaagccttccggtcaaaggaatttaaaggaaattttaatttaaatttagatgaactttcattgttgttgcagagatgatggttaataacagattttatttttattttttgagatagtttcttggtctgtcacccaggctagagtaccatgttgcgatcagggctcactgaagcctcagcttccttggctcaggtgatcctcccacctcagcctcctgggtagctaggactgtaggtgtatgccaccacacctacctaatttttttgtatttttagtagagatggggttttgctatgttggccaggctgttctcaaacccctgggctcaagtgatctgctagcctttgcctcccaaagcactgggattacaggtgtgagccactgtgcccagctaataacatactttaaagcataaaaatatattacattaggctgaaattctgagaaaaataaaaaatatatgttcaaagagaaaaagggatgacataataaaatttctgactgctaagaagagctttttcttgtatttttaaaagatagcaactaggtatctcatcattttggtgtatgtagtatttatgccactggatatatttaagagtaatctaataattttattttaggctgggcatggtggctcatacctgtaatcccaacactttgggaggccgaggcgggaggatcacctgaggtcaggagttcaagaccagcctggccaacatggcgaaaccccgtctttactaaaaatacaaaaattagctgggtgtggtggagggcacctgtaattccagctacttgggaggctgaggcatgagaatcgcttgaacccgggaggcagaggttgcagtgagccaagatcgcgccactgcactccagcctggaggatagagtaagactctgtctcaaaaaaaaaaaaaattattttaaattgtcaatattggtaatatgctggacattacagcctttgcaacaatttaaacttaagggtacttagtttttgcaggaaatattagaggaaagtagctaaaagaccactgttggcccaatgtggtggctcacgcttataatcccagcactttgggaggctgaggccggcagatcacttgaggccaggagtttgagaccagcctggctaacatagtgaaaccccatctctattaaaaatacaaaagttagctgggtatggtagtgcactcctgtaatcccagctacttgggtggctgaggcatgagaattgcttgaacctaggaggtagaggttgcagtgagccgagatcacccagtgtactctagcctgggcaacagagtgaggctgtctcaaacaacaacaacaacaatgttctagaggattgtattacaacacaggcctaagaaggaagggaatggtggcaggtgaaggaattgatagcacctcaccattgtggctgttgagataataggtggctgctgctaagaagagatggtccccaaatgtgcagagacctcctttgagttgaaaatatcctcaaagtaatgaccttaccatttgccaaaaatcctggaaaccataagctccatgttcctccagctgttcaatttccctcctgttttcttatctttgtgtcctttcctcttgttcttgaccttgtttcccatccctgaatctgccatgcatcctcttcccctgaaggttgccaggtccctttgtaggccactgaagcagaaccaaagaggggaaatgacatacctttagccattctccatcagcatgccatgtccttgctgcctggctgcctccttcacattaatctcatcacctgcctgactgtccagctgagcacgatgtgagccctatccaagctcatgtgctactctgtgccttatttcacgatgcagcagtgaatgataactgctttgctggggaagggagccatgaactccaagaaatcagcagtgctgctccagtagtaacttttcccccagatgatggctgccttgcctcagtaatgaagactcccacttttctcttagaacttgtcttctggggttctactgcctttgagatcatacctacttactctatgcatactatgagttttatctatctgacccaggataatgagcagacaattaagaaagtaaaaatgatgaataaatacctaagaaggttagcattattggcaataaaaaatgcaaattgaacagtgagatgccattttcttgtgactcaatagcaaagaataaaataggtaatgctggtaagcatactctatttatctgcaggatataaattggttcatcctttttttttttttttttttttttgagacgaggtctcactctgttacccacactggagtgcagtggcacgaacatggctcactgcagcctctacctcctgggctcaagggatcctcccacctcaatccagctgagtagctgggaatataggcatgtgccaccatgcctggctaatgaaaaaaaattttttttttttgagacggagttttactcttgttgcccaggctggggtgcagtggcgtaatctcggctcactgcaaccttgcctcccggtttcaagtgattctcctgcctcagcctccggagtagctgggattacaggcacgtgccaccacgcctggctaattttgtagttttagtagacatggggtttctccatgttggtcaggctggtctcgaactcccgacctcaggtgatccgcccgccttgacctcccaaagtgctgggattacaggtgtgcgccaccgcgcccagccttttttttttttttttagagatggggtttcactgtgttgcccaggctggtcttgaactcccggacccaagtgatcctcctgcctcagcctctgaaggtgctgggattacaggcatgagtcactgtgcctggctaaacaaagaaattttttacctacctgtggatttttctttctgacttggcttcattgaattgagtactttgcttctgcttttaataggaaaggtggctgggtgtggcaggagcactttggaagtccgaggcaggaggactgtttgaggccaggagtttgagaccagccagggcaacatagcaagacctcatctctacagaaaataaaaaataaataaaataggaaaggctcctataactcactgggtgggaggaagaatgaggtgctggtggtacatgttgcctactcaaaaggaacaacttgrctggtcatggtggctcacccctgtaatcccagcactttgggaggccgagtcggtggatcacttgaggccaggagttcaagaccagcctggccaacatggtgaaaccccgactctactaaaaatatacaaattagctgggtgtggtagtgcatgcctgtaatcccagctacttgggaggctgaggcatgagaattgcttgaacctgggaggtggaggttgcagtgagctgagattgtgccactgcactccagtctggatgatagagcaagactctgtctcaaaaacaaacaaacaaacaaaacaaggaacaactctgtttttctggctagataactaataaacttcagcatcttaaggagagccatgagatgggacaggccctacagcaggccagaaatgtcatggtaagtgatgattgaccttacaccaccactgggtctcctgtgaagatgaagaatggagaatcctgggtggttagtagatggtgatactaagtcgtggtggtgaagggaggtttccaaacatttgtaaagtacatctccttatgcggagcttggaattggggttagcggttttcctccccagtgcccctgtttcctgcttagtgactttatttgatctcacctacccatttttttctctacagcaatcatgggtgcttatctctaaagagctgatatccttgcttcacctatccctgttgcatttagaagaagataagactactgtgagtcaggaggtaagcagcctgaagatggaggtggaggcctgtggtgggactaaaagccataaagaggaaccagacacattaactgattcttaccatatagtctcggcgtgcagaaacattggtctgttgctgttttgatttgctgaagaaattgagggcaaagctccagagcctcaaagcagaaagggaggaggcaaggcacagagaggaaatggctctcagaggcaaggatgcggtaaggtgacaggcatttgttcttggatgtgggaggtttccacctcaaggttcctgcaggaacacaaatgcactttagacacagatgggtggcctaagaactgcctgccctgggcagtaaagaactgatctattgaggtgtcatggttacatctttttgtgctggctcccctgttgcccactgtgkccttgcaaccacttccctcaataggcagagatagtgttggaggctttctgtgcacacgccagccagcgcatcagccagctggaacaggacctagcatccatgcgggaattcagaggccttctgaaggatgcccagacccaactggtaatttaagggcattttctttcctggggtctgtgctgacagactgggagggtagttgcatactcccactttgctgtatccaaagggaaggggttcccgcctaggcaatctttcttttgtaggtagggcttcatgccaagcaagaagagctggttcagcagacagtgagtcttacttctaccttgcaacaagactggaggtccatgcaactggatgtgagtatttgggaccatcataactaattccttactcacatcaagtcctgttgtgagctttgcctcaagtgtgctctactgacctgcttgcttcccctggtagtatacaacatggacagctttgctgagtcggtcccgacaactcacagagaaactcacagtcaagagccagcaagccctgcaggaacgtgatgtggcaattgaggaaaagcaggaggtacaaaccaagagtggggactgcttaggcttggtttccttcctaatgtgtgataccattagcctcttaccctggatctgttttcttttcaccctgtgggtttggaggccagccagtaaggtctcttagctgtaagatggccttaagcgcagttttttcctttgcccttcagcatctttacttcagcaacttttctcctgtctctactttttcctgaggatcaaccttattttctgcaatgttgatgcccaggagcaaggtagttttctgtcttgtccagaaagagaagctggaccaagtcctgggattattgattcaggaggaactataggaggaaaaccatctgttcttcctaggtttctagggtgctggaacaagtctctgcccagttagaggagtgcaaaggccaaacagaacaactggagttggaaaacagtcgtctagcaacaggtgtttgtgtgtgtgtgtgtgtatgcatgcatgtaagcatttgagccctgttaaggcttggagtgtggcactagagcaaggaagtactcaggagcacttgctttggagcagaagtttggggagtttctagcctgctgacckcatggtgtcattaggatacttttgttctagatctccgggctcagttgcagattctggccaacatggacagccagctaaaagagctacagagtcagcatacccattgtgcccaggacctggctatgaaggatgagttactctgccagcttacccagagcaatgaggagcaggctgctcagtgagttcctaacggggtactgtggcagtaggcatccaggatttaggaccaaatgggatctaatatgttgtctctggcagatggcaaaaggaagagatggcactaaaacacatgcaggcagaactgcagcagcaacaagctgtcctggccaaagaggtgcgggacctgaaagagaccttggaggtaaggaatatggcttgggccaagggagctggtaagcctcaggagtgtgattcttgcctgatagtgttgaggtaaggtttgagactgtgaactagaaaaagcctctgtacccagggcactaaaattctccctccctgtcttgctccttctcttgtcttcccagtttgcagaccaggagaatcaggttgctcacctggagctgggtcaggttgagtgtcaattgaaaaccacactggaagtgctccgggagcgcagcttgcagtgtgagaacctcaaggacactgtagagaacctaacgtaagttctctaactttctgtacttccccctaagtgcttatttttttctcaggaacacttctagaagccaaaatctccaagaagagaactgtgagtgttgagcctcttgtttctctcctttaatgcagctctgtggggatttgggataggcgttcagagaaggtaatttggtctttggtcatcttccctgttccttatttcagggctaaactggccagcaccatagcagataaccaggagcaagatctggagaaaacacggcagtactctcaaaagctagggctgctgactgagcaactacagagcctgactctctttctacagacaaaactaaaggagaaggtaggatcctggggttccttctcttctcttccaattgtatctttattttacagatagtcttcctaaaacattactctttttctaactgtgaccttttatgatttcagttacctacaggacctcattagcctgttgctcaaacctttcttcccctgtctcctatctccctattatgaacactttgccccagctagactgcctgtatgctacacacatgtccccatttttatccccagaacccagactctggctgttcccacattcattctattctttcttcaaactggaaatgccttttctattaaaatcctcccttccgacctgggcaacgtggtgaaaaccatctctacaaaaaaatacagaaattagcccaggtgtagtgttgtgaacctgtagtcccagctatctgggaggctgaggtgagaggatcacctgagcctgggaagttgaggctgcagtgagccatgatcatacctggctaatttttttgtatcactgcactccaaactgggtgagagtgaaaccctttcccccacaaaaaaagaaatcttccctggtttaccttytttgaactgttcccaaatcaaatcatgtggacccggtgatcttttcttctgccatatttctcatgaacttactcttcttttgtatttgtattaattttccttggatacctggtctcttcaaccagactatgtttcaagaaagcagaaatatagccttctttggcctccctgcagtgtgcactaaacaataaatggttgacatcattcagaatacaaaggtaattagcttattcagcagataaggcacaacaaatatcctaaaatctggcaattgcttatgacctgatcctcttccccaactgggtaccgagcacaggaaatgccatcaaatctacagtttagcatggaagacaaacagatgtaaacttgtcatcttgacttatgatcatggtagaggtctgcatggaccactgtgagagatagagaggggagcaccacttcagccttcgagaattaggatgccttctcaaagcagctgaccttgggtacagtcttgaggtttagacgtttgtggggcaggggagggtatttaggaagtcccactaggcagagggaacggtgtatgaaagtttcatctgactacatatgagagtcgtacgtagaaagtcatgcacatagtacatgatgtgttcttttttatagtgtctaccttataaaacctgggttaggtgctgggactagaggatgaacaaggcaagatgctgctcatatggaatgcagcaagtctgaggaatgggaagcagctcttcatggctgcagcgtgagagctctgtggggcaaggcaggagacaacactggagaagtaggcaggaggccagattttgaaggcttgaaataatggcagttttataggcagtagaaaggagaggatggagtgaatggattcaatagatatttaggaagcagaggcagtagaaccaatttgatgtaagagtgaccaatttgatgtgagagtaagttagaagagtgaatgatgatccttagattgctaggaaagagggcccagcgggtcagctgtgttagtgtgtggagactagggctagtgacacctccgggtcagctctgtgcccaggaagcacttcaacctgtktggcaggagggatagcaataggaagcacttcaattccccacaactcagacacccagacgggagggcagaggaccaaggctgaaaggagtagagagcctgagagagagatgagactgaggggagctagtggtgactcaggctaaccagtcagcgggagagacctagaccggggggcagagaaggcgggagaactggagagaggacctagcctaggaggagagggagcaggctgagaaggaaatgctctgggtaggagagacagactccaaggaaaaatccaacaagtagaggaggatttgggattggaaaagctgaggtccagctgggagagctgaagagggatagaacagaagaggttgagccatggggtttcaagtacgcggaaaggagcaaagatgttaggaaagggtcgaaagggcacatcccggagtcccaggtagcaggacgaggatggcaggggaagagccaaggaaatgaagcggagatgttgagtggctcccgccttgcctggccttacctgtgcgcagccagttagcagccgcagccacaagcacagctacttcaggactgaggccagcaagcttttcctataaatggccatataataagtatttttggctttttgggccatatggtctctgtctcaactactcaattctgcctttgtagttcaagagcagccatagatgatacagccattaatgggtctggctgtgttccaataaaactttatttacaaaaatagttggcaggctagatttgacctgtaggccacaatttgctagccttccctctccctgctctagaatagtaaatacaggagtaggaacagacttttgatagggtgttccctatcagggcacagggaaaatggtgaactcagcttcatacatactaagttgacagattgactgtggaaccttctggtagattcttcacaggcagttagcctttgagtctgcagactgggaaaaagactgggaaaaagttgagagagggatggaagagtcattcatgtggaagggaagtttgaagtagatgtttttgtgatgctcccaaggcaaggccaccctgggaatgaattagagtaaatttagggccaaggacttaacccagaggatccagcagttaaggaaggacctgtgaatagagaagaaataaccagaaaggtgtggggcctgcctttaaaggagagagactcatgtcytggaagctaagaaaaggaagtttctaaaagaacaatgtggtcatcaatatcaaataggtcaggtaaaacaagagctgaaatatatgcattgcatttgaaagtaaggctgccattggtgaaccaaatgacaagaatttaggtggaatgacaggggagaagcctgagtgtagtgggctggggagtcaatagatggtgagagttataaacaagaagtataggctctttttttctttcttttttctttctttcctttctttctagaaaaggcagtagctaaaaggggatttaaggtaagaagaagggttttgttttgttttgtttaggtttgtttttaaaatactgctgtttttgttggagaggcttaagaatataaacatgttcagagaaaggcactaatggagaagttgaagatagagaattgagataataggtggaacagcattttggaggagatggctgggagttacctggaagcccaggagttcactagacctgaacagcagctattttttcttctttgcccttagactgaacaagagacccttctgctgagtacagcctgtcctcccacccaggaacaccctctgcctaatgacaggaccttcctgggaagcatcttgacagcagtggcagatgaaggttaaaggccctgggatttgggggtgggaaagttgtgacgctgctcctgatatcttctgctgttgaagatgtccaccagcggrcttgtctatcttaccctggcttccattatggtagacccctgcctggatcatcagaggggccctctcccattattggtttttctcttagagccagaatcaactcctgtgcccttgcttggaagtgacaagagtgctttcacccgagtagcatcaatggtttcccttcagcccgcaggttaggaggggctccagggatcctgcctcatttctagaaaatctggtggtgatgagtaaagacgaaagcagtgagaagtgctttgctctaaaaacctcaattctacttgggctcattttatttctgccttctgggatctgtaatgttccagacattcaaatcctgtgggtggggaacacggataagagttgtggaaatgatggctatacactccttccttccagggctggaaggctagacctctatctgggactttctctttcagagaccccaggcatggaggagagcctggcagaaatgagtattatgactactgagcttcagagtctttgttccctgctacaagagtctaaagaagaagccatcaggactctgcagcgaaaaatgtgagtgggatgcagttttggtgacagagggacagtgagacatcctcttatgccaagggtccaactgatccctgagaggacaggaatgttgctaaattcttccttccttcagttgtgagctgcaagctaggctgcaggcccaggaagaacagcatcaggaagtccagaaggcaaaagaagcagacatagagaagctgaaccaggccttgtgcttgcgctacaaggtgaaggagggacctagaagtggggcgatgaagaactggggcagctctactggcccactgggagccattatctctccaggaatctgggtggtggggattttccaaccactgccctagttttgcccttcctggggtcagacatttcacatgtcagctatgggctgacctgtcttcccaggctgactcaggagagaagtcaggaactctagcagagctctcccaacactgaaaygtgccttgcctggcttggccctggggaaagaattggcgtgatatcaattggtcccatgtgggctaagcatgggtcaggcactctctcctacctcctggcaagggctgtgaagagaccagctcttcatgtgtcttctcacctccctttccctcacagaatgaaaaggagctccaggaagtgatacagcagcagaatgagaagatcctagaacagatagacaagagtggcgagctcatagtatgttcaccatcatgcccaggcctttgccttctgtgttactggtcagccaggatcccaagtatgagaaatggtttgcttttgttcaccacatgttgtctatccttatgtcctattggacacctctccattctcattcccagagccttagagaggaggtgacccaccttacccgctcacttcggcgtgcggagacagagaccaaagtgctccaggaggccctggcaggccagctggactccaactgccagcctatggccaccaattggatccaggagaaagtgtggctctctcaggaggtgactcagagttaacagaggagctggacagcaggtggggaccccaggctgtacccctgttgatctggacatatttctaggtggacaaactgagagtgatgttcctggagatgaaaaatgagaaggaaaaactcatgatcaagttccagagccatgtaagaatgtccatgccattccagggccatttcctaccatcgttaacaaatgcccygccatgtttcccctgtcctaccaagtttgctcttttatgcataggacttataaaatctgtttgctttctagagaaatatcctagaggagaaccttcggcgctctgacaaggagttagaaaaactagatgacattgttcagcatatttataaggtataggcaggagggaggtgatatcactaatgaacctggtacaaggcctggccccaggaggtactaatgagcacagatctggttcccagcctgtgctgagagcygggcctgaatcactattgcaggcttctctgtggtgtctgttttctcccctctaattcagcggctgcctcctggggctgggagccctgggccttaagtctgtggtcctgagctgcgttttctgcctctcttcccagaccctgctctctattccagaggtggtgaggggatgcaaagaactacagggattgctggaatttctgagctaagaaactgaaagccagaatctgcttcacctctttttacctgcaatacccccttaccccaataccaagaccaactggcatagagccaactgagataaatgctatttaaataaagtgtatttaatgaatttctccaagcttacggaatcttactttttgggtgagagggggcggatgatgaagtcagggaagaagcagcttgggcctcctgcctgggcaccctccatagatccctctccacctcctgctgcatccaaagccaaggctgcctgcccttcctcccttcctctgctttcaccaaaactctgggcactggactgcttgttccctggctcaccgcctggaggaaacagaaaggcttcattctcttactttccccagccccctcgggggtataccctggcaaatatgggggtgaggacagagaagctcagttcattacttcctgccctgaacttgggcaccttgaagatgcttctgccccacctactcaacctgttgttactgttctggtgcctcctcttcaccagactaagcttaatccccagcatccagcaagtgcccggcacgtggtaaagggattgtggcagaaatgaacgcaaggtcatggccaggctccccgaggtgggagggcagtccctaacagccacggatgcctggcggggcgctcactccacctcgccgccccgcctctgagggcgtggtcttgccccggacaccagtcctggggagggggtgtggtcagggcggggcatgcaggccacgcccccggaggagtcacgtagctctgcgacatccgcagcctcatttaccagagggagccagggctgcagcctcatctgtttgcggatcagaacccgagctgtgcttgtggctgcggctgctaactggctgcgcacaggtaaggccaggcaaggcgggagccactcaacatctccgcttcatttccttggctcttcccctgccatcctcgtcctgctacctgggactccgggatgtgccctttcgaccctttcctaacatctttgctcctttccgcgtacttgaaaccccatggctcaacctcttctgttctatccctcttcagctctcccagctggacctcagcttttccaatcccaaatcctcctctacttgttggatttttccttggagtctgtctctcctacccagagcatttccttctcagcctgctccctctcctcctaggctaggtcctctctccagttctcccgccttctctgccccccggtctaggtctctcccgctgactggttagcctgcatcaccactagctcccctcagtctcatctctctctcaggctctctactcctttcagccttggtcctctgccctcccgtctgggtgtctgagttgtggggaattgaagtgcttcctattgctatcctcctgccaaacaggtgaagtgcttcctgggcacagagatgacccggaggtgtcactagccctagtctccacacactaacacagctgacccgctgggccctctttcctacatcactgcagccccactggggccaacctctggtactgggtgggaataggcaataggcataggcaggcaggtttggagtacagaaaaggagaagctgcaggagcctgtgactggtatttgtgccactcctactccctacctgttcttccaaccttttcctctagaagctgagagaagagggtggcaataagtacttttgcctcattctgaagccttggaagtaagtacactttccctaggggtcctgtggaggatgagaaaagggaagctggaaaggccaggacttttgcctacctcaacaagggaccaagttcagtgaaagaagggttggcatccttgattgggcagcagatttatcagaagagctgtggcttcagggctgctcacctccccacccccaccctgcatctttccccagggctgggaaggatgcctaccagggacaaaaggagatgtgggaactggagccctaagcttgctagctgtcagaaggactggtgccacttgatgcccaggactcatgccaaggactgctgccctgttcccagccccttgcttgatggggaggccatttggcccatctggccaggagaggcagcagagggtgaggtctggcttttttatcttgtctccactccagggagctgtcaccatgcctcactcgtacccagccctttctgctgagcagaagaaggagttgtctgacattgccctgcggattgtagccccgggcaaaggcattctggctgcggatgagtctgtaggtaagtggacatctgtagccaggtagggtacaggtggctaggggaccctggggatgttctcactgcctctctttgtttgcccctaggcagcatggccaagcggctgagccaaattggggtggaaaacacagaggagaaccgccggctgtaccgccaggtcctgttcagtgctgatgaccgtgtgaaaaagtgcattggaggcgtcattttcttccatgagaccctctaccagaaagatgataatggtgttcccttcgtccgaaccatccaggataagggcatcgtcgtgggcatcaaggtgcagcccctggccctgctctgaatggaagctgggtgtgaaaataagcttgtgtaggaggggtagcaaggagaatcctgcctggattcaaccctctgcttgtacttcctctacaggttgacaagggtgtggtgcctctagctgggactgatggagaaaccaccactcaaggtataggatgggtgggcttgaggaccaaagaggtgttagatagttgatgctggtaaaagaggggcagagtaatgaggttggcactgtgcttgcagggctggatgggctctcagaacgctgtgcccaatacaagaaggatggtgctgactttgccaagtggcgctgtgtgctgaaaatcagtgagcgtacaccctctgcacttgccattctggagaacgccaacgtgctggcccgttatgccagtatctgccagcaggtgtgtgtgttgggagggtggtgagctaggtgccctgtatgcctggtggggagagagtcacaaggctttcttcatctcccctactgcccctcccaagcatctctgctcttgcctgcagaatggcattgtgcctattgtggaacctgaaatattgcctgatggagaccacgacctcaaacgttgtcagtatgttacagagaaggtgagtccacacctgggcacacaaacatactgcagggacagctcggcaggagtgtctgttccccagaacccccagcttagatccaggcacactttcccctagcactttttcacttcatcccggcacaggcctgtgatctgagcctgtactgagccctcacagtctgtgcccatctacccctacatagggagcatcgagcagtaaccagtgggggcccagacccttagtaaacctcctctaatccccacccaggtcttggctgctgtgtacaaggccctgagtgaccatcatgtatacctggaggggaccctgctcaagcccaacatggtgaccccgggccatgcctgtcccatcaagtataccccagaggagattgccatggcaactgtcactgccctgcgtcgcactgtgcccccagctgtcccaggtactacccagctccctaacctgctcctatccctaaggcccatcttcaggtccttcttgtggccttcaggggttccctatcctggaaaaattgggagtgaccagtcagtttgtcttctctcctccacactaggagtgaccttcctgtctgggggtcagagcgaagaagaggcatcattcaacctcaatgccatcaaccgctgcccccttccccgaccctgggcgcttaccttctcctatgggcgtgccctgcaagcctctgcactcaatgcctggcgagggcaacgggacaatgctggggctgccactgaggagttcatcaagcgggctgaggttgggagctacaggtggtggtgggtgggggcagcacccagaggctatagcctgggcagggcttggcacctgtgggctggctcagcctgcttactccacgctcccttttgcaggtgaatgggcttgcagcccagggcaagtatgaaggcagtggagaagatggtggagcagcagcacagtcactctacattgccaaccatgcctactgagtatccactccataccacagcccttggcccagccatctgcacccacttttgcttgtagtcatggccagggccaaatagctatgcagagcagagatgccttcacctggcaccaacttgtcttcctttctctcttcccttcccctctctcattgctgcacctgggaccataggatgggaggatagggagcccctcatgactgagggcagaagaaattgctagaagtcagaacaggatggctgggtctccccctacctcttccagctcccacaattttcccatgatgaggtagcttctccctgggctctccttcttgcctgccctgtctcctgggatcagagggtagtacagaagccctgactcatgccttgagtacataccatacagcaaataaatggtagcaaaacattctactttgcctgtctgttttacacatcaaattcccacctcccagtttctgatctctgctaattctatctctgggccctctgactctggaggtggagagggtgggatttgagtcttactgggcttcaagttatggaggaagggcacatgcagtcaccatccccagctcaggctcttgctctcttgatgtccaagtctggagtggggcaatgaggaagactgcaagtcttctagggactgccacatcagtggcactgggctgcagctacagaagtatggagtgaggccaaactggcaactcctgaaggcagatttgtgcaaggctcaaagcagggaggcagcaagacaggctgggataagagtgggtgggagtctctcccatctcgcagtgttaagcccagctgggacctggtaccttccactagggtgagccacaccagtaagggcaagcgagcacctggactcccgcccaaagaggaaaaccaaggctctgcgggctgccagggctgagcagggcatctaggaggttgccaagggctatggcccattttcatttggggtagaagtgggcacaaagggagccaattggagggtctgggtaaggacagctctggtgaggcctgatgctgaactttaaccactgggctgggttgtgaggtaggctgagaacctgggtctaagcagataaaaagaagagataacaagctgcgtgtgttctgtgtcaactggggaggctacaaatgctccaccctgtgtggcctgactttataataacaaaaatagcttgcacatagcaccaaccctgttctaatcactttatatgtactgacacatttcatacaactctataaagtaggtactattactatcatccctattttaatagagaaaacaggcacagataggcacagaacgatcttctcacgatcactcacctaataagtgatgaagccaggatttgaaccgcagtgatcagcatctagagtctgggctcatgacttttcaagatttttaagtgaagtattctgagttttccaagttggaaatgaattaaaacgtattttaaaatagcgagagagccaattgtgctaaaacatactagcttgctacctccgtgtttgaggctttgaggagagggcaccctaagaggagttctacgataaggataataagaccgtgacagttgacgttgagggctttccgtgtgccaggctccttacaagaacggcctcatttatgtaaatatctccattttcagatgagcctcggagctgcctgtagttgcccagctagtatttaaggactgcagaggttgcgctcttgattgcggggctagaagtgtgttctacagggaagcggggaacttcgttccagcagcgccgaaacccgcacggcccctaggctgtccctccgcgcccgggtgacttcctttcagatccccagcgaagctcccagcggagccctcccacccctcgcccgcttgctcccgtctgcgggtctggagtagcgctcgcgattggccccgatcaccgccgcggtcctgccccct

SEQ ID NO: 97967 - DNA, 39303 bp, Homo sapiens
gacggccacccggctgctctgggacgagtaagtgggacctggccgaggtggggtgcggggagggacctctgaactgagctcctcatctgccccagccccgagtgcgagatcgagcgtcctgagcgcctgaccgcagccctggatcgcctgcggcagcgcggcctggaacagaggtgtctgcggttgtcagcccgcgaggcctcggaagaggagctgggcctggtgcacaggtcaggacgggggcaggccccacgatggggggcggggcgggcagcccagctagaaacctaagaacctgggcctaccccgagcctgccagcctcgaatacagagcctctccctatgcacctcgggtgggctcacaggcttgaggaagtgacagggtggccactcccaccacgaatcccaggtccccgcctcccgcccccctgctcctgctggtgaccctgcctctcctgcctgcccatctgcatgcagcccagagtatgtatccctggtcagggagacccaggtcctaggcaaggaggagctgcaggcgctgtccggacagttcgacgccatctacttccacccggtgcgtgtccccggacacactcacctgtgcagacacacatgcacgtgcctttgagcgttcacagccacggccgccaaccccagccagtgtcccctggtccatacacatgacattgccctgcacacctgcctgctggcactgccagagcctggggctggcctgttctgctcagcagctggtgtcttgcagcctggcacaagtgtgggtatggcctgcaaagggcagcagggaaggcagggggctcatctgcgcccctgcgcccacagagtacctttcactgcgcgcggctggccgcaggggctggactgcagctggtggacgctgtgctcactggagctgtgcaaaatgggcttgccctggtgaggtgagagctgccccttcccctggctgctcctccgtgggtggccctgtgaggggccagggcgaccctgacgtgacccaaatcctactctcacgccgtaggcctcccgggcaccatggccagagggcggctgccaacgggttctgcgtgttcaacaacgtggccatagcagctgcacatgccaagcagaaacacgggctacacaggtgtgtgccaggctggctgcaggggggtgggcccaggccacacagcaaggggcggcgcaggaggcgagagaacccagccagcaccttcccatccctggccgggctcctggaggtgggaggccctgcccctttgccaccagcgctgtctgtacccaggatcctcgtcgtggactgggatgtgcaccatggccaggggatccagtatctctttgaggatgaccccaggtgagcaggggtgcggaaaccacccttccctgcagccccagtttttgggtgcacagcctggcctgggaaaatccaggggtgagatacagacatgtgctcaggggtcagcgttctacagggagctgtagagctgttgagggtcctgacctttgacctctggccctggctggctgttggcagcgtcctttacttctcctggcaccgctatgagcatgggcgcttctggcctttcctgcgagagtcagatgcagacgcagtggggcggggacagggcctcggcttcactgtcaacctgccctggaaccaggtgcccaccctcaagccccaggtccccacccagccccctccccctgggcccctcccctcccccacagttcaccctcaagccccaggtccccacccaccccctcccccgggcccctcccctgccccacagttcaggatgtagcctgggatgtcctgccaggttgggatgggaaacgctgactacgtggctgccttcctgcacctgctgctcccactggcctttgaggtgactgcacggagggctcccccagggcagccgggtgggagggggaccttgtgcctggagtgcgccagtgaaggcaggaggagggttatgagctgtcccactcctgtgtggctggggaaggtgctcaggaggggatgggatgggcctggctcgccctcacctgggctccagcccctctctgtcgaccctccccactccggcctggcctgtagtttgaccctgagctggtgctggtctcggcaggatttgactcagccatcggggaccctgaggtgagggccttgccttgccagggagggcttctggggtcctggggcccaggtcccccatcacacatggctctggttccaggggcaaatgcaggccacgccagagtgcttcgcccacctcacacagctgctgcaggtgctggccggcggccgggtctgtgccgtgctggaggtgactggggagggcacacagggagggtctctgggccagaggcctgggggtcaggagcatgggagccaggtgcccacggggtatttgggaggggcgtcctgcccgggatagagccaggcaggggctctcccggtgacatcccatcccagtgatatctctgccccaatcatgtctccaccctcctcccagggcggctaccacctggagtcactggcggagtcagtgtgcatgacagtacagacgctgctgggtgacccggccccacccctgtcagggccaatggcgccatgtcagaggtgcgaggggaggtagggcgggcagggccggggtgtgagaccaggtgtcacgactgttgtgtctccctcacagtgccctagagtccatccagagtgcccgtgctgcccaggccccgcactggaagagcctccagcagcaaggtcagtgtggccgggtgctaggctgcaggatcccacctcgggctcctgtgcagtggctatgactccgaactgtccctagatgtgaccgctgtgccgatgagccccagcagccactccccagaggggaggcctccacctctgctgcctgggggtccagtgtgtaaggcagctgcatctgcaccgagctccctcctggaccagccgtgcctctgccccgcaccctctgtccgcaccgctgttgccctgacaacgccggatatcacattggttctgccccctgacgtcatccaacaggaagcgtcagccctgagggaggagacagaagcctgggccaggtgggcagggctggcctggggagaaggatggggccgcatctacacctgtgcctgtgtgtgcctgacctgcggtcactccgtgtctgtgtgtccctctggtctgtccaccacaggccacacgagtccctggcccgggaggaggccctcactgcacttgggaagctcctgtacctcttagatgggatgctggatgggcaggtgggagcacctgggaggggttggggatgctgtggacctaggggcagggaccaggacctgccaacgagatgtggcctgtccagaggagggctgggtggtgcagaaccacatggatgtgaacattgccttgtgccaggaactgttcccagaacagccccaggggtggggatcactagtgtgtctgacctctgacctcagcttcttcagttaaatgctctttggcagagaggtgaagggggtgatttaaagtatacatttaggcagggtgcagtggctcatgcctgtaataacggcagtttggggggccaaggtgggagaaacgcttgagcccaggagttcaagaccagcctagagaacatatggagaccctgtcttcacaaaaaataaaaaagtcagccaagcgtggtggtgtgtgcctgtagttacttaggaggctgaggcaggacgatcgcttaagcccaggagtttgaggctgtggtgagctacaattgcgccactgcacgccagcctggctacagaacgagaccctgcctctctaaaaaaaaaaaaaaaaaattatagacgtaagcatcttatttacagaaatggagtgattgaccttagtgtaagaagacgtgtggctgacagtagccgcagagacacaccgaatgaagggaactgtggatctgtttacctggcttgggagttggttggtgcctcattctccactgtttattcatcccacaggtgaacagtggtatagcagccactccagcctctgctgcagcagccaccctggatgtggctgttcggagaggcctgtcccacggagcccagaggtaagcctcacttggccatcctgagcctctgacggcaggacctgtgggcacccctatcctggctggccaagcacagagagttctgggaatggactctggacaacatgaacacctgtcctgaggccagctcttcttccaggctgctgtgcgtggccctgggacagctggaccggcctccagacctcgcccatgacgggtaggactctcaggtcttgcatatgtccagccatgcatgtggacgggcatgtgatggacgtgtgcctgggccccagggtgacgggtgggtggggcactgtgtggtactgaatggagccttcctcagctggggtgtgggagaagggctgctggaggcaatgccaggtgggtctccagcacagaggctcagcagtcacagcacccctgcccatggccccgtgaatgctcttccacctctgcctctgcggtttgggctcaggagggtgagcagggccttacacttatgcacctgtgtcctggaaggaggagtctgtggctgaacatcaggggcaaggaggcggctgccctatccatgttccatgtctccacgccactgccagtggtgagtgaccatgccacgcggcaaggcaggtgctggggagcccatggatgtgtacagctgctgtttgctggcattgtcatgatagcaggcctctggtccttcctgtctccctgctcctactccaggggccctgagattgggaggttgggaggccagagccagcaggtgtccgtagatgaggagctgggctctgctgtccccacagatgaccggtggtttcctgagctgcatcttgggcttggtgctgcccctggcctatggcttccagcctgacctggtgctggtggcgctggggcctggccatggcctgcagggcccccacgctgcactcctggctgcaatgcttcgggggctggcagggggccgagtcctggccctcctggaggaggtaagctgggcagggtggaggtgctgcggggtgggacgagggaaaggaccagtgactgcttccgtcttcgcccctggtccagaactccacaccccagctagcagggatcctggcccgggtgctgaatggagaggcacctcctagcctaggcccttcctctgtggcctccccagaggacgtccaggccctgatgtacctgagagggcagctggagcctcagtggaagatgttgcaggtgaggctgactgcggaggcatggccctgccctggggcctggctctgccgcacagatcggtggggagggcagggcaggggagtgccctgaaccagctccagcgccggaggccaactgcgcgcctcttctcggctcctcctgtagtgccatcctcacctggtggcttgaaatcggccaaggtgggagcatttacaccgcagaaatgacaccgcacgccagcgccccgcggccgcgatccggaccccaagcccacggctccctcgactctggggcacggaaccccgcccactcccaatccccgcgccccgccccctcccacccgtgcttcccccgctccacccctcacctcacctcgcccccgccccacccatcgcgccccggcccgtcccatcgaggcccatgcaacccacgctcggtcccgttccggcccctgcgccccgctgcgcttcgctccccgcccttgcgccgttagtaaacatcgctcaaacgaaacgctggctctgcctcctttactgagcacgctcggcctcggtctctcacccgcggtgccggactcaggccggaagtatgccgcggcccaggcctcaccaacttcacgcgctgccggcgttcccgtgacgtatttccggcgcgcccgccctagtgctcttcacactggcgcggctgtgacgcgacggaggcggcgagagcggcagccgtgggcactttccacgggtgaggcctggagaacgggtggacgtgcaggccagaacccgggacccacccggctgagcccccagactctccgctgcccacgaccctcggagtggcaccctctcctggccgtctcctctcgtgggtcccgaagaacgggtgcaaagccgagttcgtccgctgtactgcgcgggcgcgcgtttcgttcttcggttttgccacggttctgtgactccctaaaggttgagggctactgaattagaagaaacgccgagctggcttctggtgggctgccgggcgccgggcagcgtgcttggactggggagggcagggcgtgtttactctgagtagagcaaccgcaagacctcctttaaaaaataccagttctgagcttcggcattggagaggccgcctgtcattcagcctcttcggaccctctctcactccctgtcttccggagcgtgagtgaagcccgggtgaggtgttttcccacacgccgggggcccggagctgagaaggggcatggccagcrtcacgcagctgttygacgacctgtgtgaggccctcctgccggctgccaagactcacctgggccagcgcagtgtgaaccggaagagggcaaagcggagcctcaagaaggtggcstacaatgctcttttcacaaatctttttcaagatgagactcaacagctgcagcctgacatgtcaaaactaccagcgagaaacaagatcctcatgttgtcctttgacttgagagtgggtggcctgggccccaaggccgaccgtttggaggagcttgtggaggagctggaagcagccccttgctgtccgcytttggaggtggggtctgttttggacctcctggttcagctggcagggagtggtccccctcaagttctgccgagaaaacgagactacttccttaacaacaagcatgtggggagaaacgttccgtacagcggctatgattgcgacgacctgagtgtgtttgagatggacgttcagtctctgatctccagagaagagtgtttgtgtcacagcatgatccaggaaacacttcaggttatggaggctgctccaggcactggcctgcccaccgtcgggctcttctcatttggtgacccttgtggtgacaggttcgagagagacacccgggtctcgctcttcggggcccttgtgcacagccgcacttatgacatggacgtccgactgggcctgccccccgtgccagacaatgcggacctctctgggctggctattaaggtagaatgtttagtttttcctctttcatctctctcggggtttggaaaatgcttcctgtgacctttcttcttcttcttcttctttttttttttttttttttttttgagacagtgtctcactctgtcacccaggctggagtgcagtggcgcgatcttggctcaccttaacctccactttctgggctcaagcaattctcgtacctcagcctcccgagtagctgaaattacaggcacctgccaccacgcccggcttaatttttttttttttttgagatggagtcttgctctgttgcccaggctggagtgccgtggcgcgatctcggctcactgtaaccgccgcctcccggggtcaagtgattctcctacctcagcctcccgagtagctgtagctgggatttaggtgcatgccaccacgcccagctaagttttgtatttttagtagagatggggtttcaccatgctggctaggctggtcttgaactcctgacctcttgatccgcctgcctcggcctcccaaagtgctgggattacaggcgtgagccaccatgcccaactaatttttgtatttttagtagaggcggggtttcaccatgttggccaggctggtctccaactcctgacctcaaatgatccacccgtctcggcctcccaaagtgctgggattacaggcatgagccactgtgcccggcccggtgaccttccttttatcatggtaaaaggggggatagtctggtggctgcattgtcctgaggtggggctgctggagtgggcttactggcggccaccctcctctgcagcgacagtgctgcccacctgccggccaaagcaacatgctgcttttcatctttacctaatggggtatatcgttaagccacctctgccttctagagctgccgtttaaattgaagttaattaaaacaaaataaaatactcagttcctcagccccacaagccacatttcaagtgctcagtagccacgtgtggcaaaagtgttcatgttctgtaattcgtgcaattggatatgtttttgctgtctgtcgcctgaggctttaccatggtacgctgtagctcctcatttgagttttgtattttattgctttatcagtgttgccaaaaggatacrttgttactagtcgttctattcttatgcgatagctagatgatttagaaacatacataatgctacagcaaatgtcttggtgtacagcagttttgttttttgtttttgagacaagtcttgctctgtcgcccaggctggagtgcagtggtgtggtctcggctcactgcaacctccatctcctgggttcaagcgattctcctgcctcagcctcctaagtatctgggactacaggtgtgcgtcaccacacacagctaatttttgtattttatatgtttgtatttttatttttttattttatttgatttttttttttgacacagtctcgctctgtcgcccaggctcgagtgcggtggcacaatcttggctcactgcaagctctgcctcccaggttcacgccattctcccgcctcagcctcctgagtagctgggactacaggtgcctgccaccacgccctgcgaattttttgtatatttagtagagacggggtttcaccgtgttagccaggatggtctctatctcctcacctcgtgatctgcccgcctcggcctcccaaagtgctgggattacaggcgtgagcccggcctgattgttcttttttttttttttttttttttttttgagatggagtcttgtgtagggaccagccctacagggtctgtgggtttttctctccatatgcggagaccagagatggtagaaataaagacacaagacagagatagaagaaaaaacagctgggcccgggggatcactaccaccaacacgtggagaccagtagtggccccaaatgccaggctgcgctgttatttattggatacaaggcaaaaggggcagggtaaggagtgtgagtcatctccaatgataggtaaggtcacgtgggtcacgtgtcaactggacrgggggcccttccctgtttggcagccgaagcagagagagaggagacagcttacaccattatttctgcatttcagagacttttagtactttcactaatttgctactgctatctagaaggcagagccaggtgtacaggatggaacatgaaagtggactaggagtgtgactgctgaagcacagcatcacagggagacgtttaggcctctggataactgcgggtgggcctgagtcatgtcaggccctccacaagaggtggtggagcagagtcttctctaactcccccagggaaagggagactccctttcctggtctgctaagtagtgggtgcttttcctaggcactgacgctaccgctagaccaaggtccgctaggtaacgggcgtcttcccaggtgctgccattaccactagactaaggagccctctagtggccctgtctgggcatgacagaaggctcacactcttgtcttctggtcacttctcaccttgccccttcagctcctgtctctgtatggcctggtttctcgtaagttacaattgtagagcgaagattattataatcttggaataaagagcaattgctacaaactaatgattaataacgttcatatataatcatatttatgatctatagtgtaactattcttgttctatatattttattatactagaacagctcgtgccctcggtctcttgcctcggcacctgggtggcttgctgcccacagtcttgctctgtcgcccagactggagtgtggtggcgcaatctcggctcactgcaacctccgcttcccgggttcaagcaattcttctgcctcagcctcccgagtagctgggaccacaggtgcccaccaccacgcctggccgatttttatatttttagtagagacggggtttcacatgctggccaggctggtctcaaactcctgacctcaggtgatccacctgcctcagcctcccatagtgctgggattacaggcgtgagccactgcgcctggccccggtgtacagtagtgttttaatgttgagtgtgatttttttaattctgggttccccacattggaatttccaggtctgaggcatctcaaaaagtttcactctaagttccactgaggcttatgtgttacatggaattggaaattggcagccttgacgacttattttgtttaattccttaaatggctcattggtgggaaacattgtatggtacacatgcgcttgagaaaaacagaagaaacattttgttaggtctttgcataaagttcctgaaattctcatcgcccttggatgaaacgtggacacagcartaagtggcggtttgcccttccctgtgtctccaggtcccaccgagtgtggatcagtgggaagacgaaggattccagtcagcgtccaacttgactcctgattcccagtctgagcccagcgtgaccccagaygtggacctgtgggaagccgcacttacctatgaggccagcaagcggaggtgctgggagcgagttggctggtgtgtgcccttctttgccttggcatgcagtgcccctacccctgcatgagcgtggccttggrtggggtgtgtggggggcgttgtgtactcaggggtccaggcagttgtgatgggttagtaacctaagctagtgtccaaaattgactgagtcctgggagttaagagagatgcagaggggaaagcactaacagcctttaaggaggcctcacctccccatccagtaaccagatcacacctgtcgggcagaactcccctccctgtgccagtaaccagatcacacctgtcgggcagagctcccctccccgtgccagtaaccagatcacacctgccaggcagagcagttggggcagmtaagttatgtccttaagagcaagagagctgcctggcaggctgtgtgattagtgccaggaagaaatgctcrctgggcatggggtgctgatgaaggagccttttccattcatgtctagaggaattggggtgctgatgaacacggaaccttttccgtccgtgtctggaggagttgggaggggcagtctgggtgatgagaagctccagctgcagcagctttttcctgactggtaccagcagcttgctctctggatgcggtagccactcactccctggctcacctgggtccagaggcctctgcactcagcacctctcagagtctttaatgtggtggtatcttttgataactcccagaacccaggcagagaatatgcatttcgcctgggcgcggtggctcacatctgtaatcccagcactttgggaggctgaggcgggcagatcacttgaagtcaggattttgagactggcctgggcaacatggtgaaaccccgtctctactaaaaatacaaaaattagctgggcgtggtggtgctcgcttataatcccagctactcaggaggttgaggcacaagaatcacttgaacctgggaggtggagtttgcagtgagccgagattgcaccactgcactccagcctgggtgacagagtgagattgtctcaaaaacaaaaaacaaacaaacaaaaaaacacgcacttccccaaatgtttggccatggaatgccccgttcacatccagtccactggtgatcctgtgggtatcggtttggggagtgttgggtgaaagggtcagggctggctgggagctgagtgctctgggatgcagtggctggrctctggcagcctggacaggagcatgtgcccccgggtgggcgagctttcctgacatcatgaagattccctcagggttggctgtctccctgcttcccagcacggtggtggtggctttatcctgactgccagggccttcctgctgtgtcacttcctgctggtgcatcagtcaaagcaaatctcatggtcctgctctctgccaatccctcacacgtttaaaaactggcctttgggaggctgaggcgggtggatcacgaggtcaggagatcgagaccatcctggctaacacagtgaaaccccgtctctactaaaaatacaaaaaattagccaggcgtggtggcgggtgcctgtggtcccagctactggggaggctgaggcaggagaatggcgtgaacccgggaggcggagtttgcagtgagcggatattgcgccactgcactccagcctgggtgacagagcgagactccgtctcaaaaaaaaaaacaaaaaaaaaaactggccctacaagttattgctttattctgtacatgtctgctaatagtatttttttctgttttttttttgtatttatttatttattgaggcggagtcttgttctgttgcccaggctggagtgcagtggcaccatctccagctcactgcaacctccgcctcccgggttcaagtaattctccctgtctcagcctcctgagtagctgggattacaggcacctgccaccatgcccagctaatttttgtaaaaactcagaaccttccaacaccaggttcccttcacctggaacattcttcagctcaccataattaggcaactcctttcatcctaaacaaactaggtcccccaaactctccctcataagtctgtctgtctgtctctctctctctctctctcttttctttttctttctttgtccttgttgcccaggctggagtgcaatggcgcaatcttggctcactgcaacctctgcctcctgggttcaagcgattctcctgcctcagcctcccaagtagctgggattacagtgggattacaggcatgggacaccacgcctggctaattttgtgtttttagtagagatggtgtttctccatgttggtcaggctggtcttgaactcccaccgtcaggtgatccacccgcctcggcctcccaaagtgctgggattacaggcatgagccaccgtgctggctgtatttcatttrttaactcccccttttctaggttcattttttcgggttgctgatgaggagacatggtcactcactctcctcatcaccctgttctgaatacgctggagactgcggagctcccgcacggtggggcccggcggtggttcctaggctgcggagctccggcacggtggggcctggcggtggttcctatagggaggtgctgctgtgtgcctggcagtgtgctgagcacagcctgggcagctcctgtagggactttctctgcccagggccctgcagagtgaaagtgctgtggtcatctcagtgtccagtggctgacctgcacagggccacacagtggctggacctgagtttacgtctcctgggcccctctactccctgatcccacggcccctgacactgcagtcgggtcagcctgatgctgtggttcaagttcctttggcaaatcgtttggtcttgtttcattttaaatcccagccacctgctagtttcctgctgtgatgagctctgaccagcaggtggctaaagaaactgccgcctagccagaaattgagccttctccactctccaagacatcaaccctgctttcccacaggtcccaagaccccacggggggccactctcccctgctgttgcccaccctgagaaccaccattgtccgactgctcacggccctccctgctgctgagctgcaagggctgggttaaggcggagggaggcctttcagaccctggaatggtctctttctctgcatgtgccacccatctgggggaagcattttgctacattttgggttgtgttctctctggggacctgttggggcggggggtgttcactccagagcctgcaggatcctgcgctgtgtctttgtgtttccgctgtgggctttttttccctcagttctgagtcaccaagaggggtgtgcagccatggcagtgctgggggccagtcctggaggagatggggtggaagtggctgcagggggaaacagggttgtgcccacagcctgcacccctgccgaggccatctgcaggaagaaatgcagggggcagacagaggctctgagaggctgtgtctttctcatgctcatctcatcctgagggagcctgggcaggcgtctggggtccagagcggccccacctgctgactggacatctcagggctggtctccttcctcctgccccctccagcccaccctcttcatagcagaggtggccagtaaaagtgtgtttcttggagctgattgttttcgcagggaggacgggggtgtgagtgtgtgtagtgccagtacatgtggtttcacagcctcagcaccagcagaaggcaaatttcctcagagttgcatgtgcccagggctgcctgtaccagcccaccttacctgttactgtcttaaaaatttgtgaacttagccaggtgcagtggctcacgcctgtaatcccagcactttgggaggctgaggtgggcggatcacgaggtcaagagatcgagaccatcctggctaacacggtgaaaccccatctctgctaaaaatacaaaaaattagccaggcatggtggcccgtgcctgtagtcccagctactcgggaggctgaggcaggagaatggtgtgaacccagcaggcagaggttgcaatgggccaagatcgtgccactgcactccagcctgggtgacagagcgagactccgtctcaaaaaaaaaaattgtgaatttttttttctgtatccatctcttacggtttttctgaggtggggcagtaaaatttatataatgtttttaccgtcttaaccagttgtacagctttgtaatgctgtgtgtattttcactgctgcacagcaagtctgcaggaaactctgaacccattaaacagctccccattcactccactttttttttttttttttccgagatggagtcttgctctgttgctcaagctggagtgcagtggcacgatcttggctcactgcaacctccacctcccgggttcaagccattctcctgccttagcctcctgagcagctgggattacagatgcccgccaccacgcccagctaatttttgtgtttttagtagagtcagggtttcaccatgttggccaggctggtcttgaactcctgacctcgtgatctgcctttcttggcctcccaaagtgttgggattataggcatgagccaccgcacctggcctccactttctgtctctaggattttggccactgtagggacctcatgtaagtggagttgcacagtgttttgtgatggctcattttactccacttggcgtcctcgagcgccgtccctgtggagacagtgttttgtgatggctcattgcactccacacggcgtccttgagtgccgtgccttctggagcacgtgtctgagctgccttcctttttaaggctgaatgatgggcaggggtctgcacggacggtctgtgtttatcctcctctgttgggggctcaggctcctctccccctggctgttgtggatgttgttgccgtggacgggggtgtggatgctgctgtggacaggcatgtggatgttgccgtggacaggcatgtggataggcatgtggatgttgccrtggacaggsatgtggataggcatgtggatgttgccgtggacaggcatgtggataggcatgtggatgttgccgtggacagggatgtggatgctgccatggacaggagtgtggatgatgctgccgtggacagggatgtggatgatgctgccgtgaataggggtgtagatgctgccatggactggggtgtggatgctgccatggacacgggtgtggatgatgctgcagtggacagggggtggatgctgccgtggataggggtgtggatgatgctgcggtggacctgggtgtggatgctgccatggacgggagtgtgggcgatgctgccgtggacctgggtgtggatgctgctgtggacaggggtgtggatgatgctgccatgggtgtgtgtgggtgatgctgccagggacaggggtgtgggtgatgctgtcgtggacagggggtgtggatgatgctgctgtggacctggatgtggatgctgctgtggacgggggtgtgggtgctggtaccatgggtgggtgtgggtgatgctgccgtggacagggggtgtggatgatgctgctgtggacctgggtgtagatgctgctgtggacgggggtgtgggtgatgctgccgtgcacagggggtgtggatgatgctgctgtggataggggtgtggatgatgctgccgtggacgggggtgtgggcgatgctgccgtggacctgggtgtggatgatgctgctgtggaactgggtgtggatgctgctgtggacaggggtgtggatgctgctgctgtggacgggggtgtgggcgatgctgctgtggacctggatgtggatgatgctgccgtggacttgggtgtggatgctgctgtggacaggggtgtggatgatgctgccgtggacctgggtgtggatgctgctgtggacaggggtgtggatgctgctgtggacaggggtgtggatgatgctgccatgggtgggtgtgggtgatgctgccatggacaggggtgtgggtgatgcttccgtggacagagggtgtggatgatgctgctgtggacctgggtgtagatgctgctgtggacgggcgtgtggatgatgctgccgtggatgggtgtgggtgatgctgctgtggataggggtgtggatgatgatgctgtggacagggggtgtggatgctgccatggatggggtatggatgatgctgccatggacagggggtgtggatgatgctgcagtggacctggatgtggatgctgctgtggacaggggtgtggatgatgctgccatgaacagggatgtggatgctgccatggacctgggtgtggatgctgccatggacagggtgtagatgctgttgtgtacatgggtgtacaaatcttgttttgtttctaacagaagaatactttatgagtgaatcaccatcttgagggccactggcgtggcctggggtgctcttccagggctgggccagtcggatacccccggccatgcccaggaccccaggaaggtgccctggaacactttccacatgagttgtcctgatagaatcgatcgtgctggtattcacagcagcagcatccacaaaaggctgggtggtgagctgacattcatacctggctatgtttcttagagtttattgttttgaatcacttccattcttctgttcatgcccattcccgagagaaagcaccctggtgctgaggtgcaggtcaccacgtctgctcatggcctctcttctgcacccctcgcagcccccctggccacagagaggagccttacctgacggaggcgggaagggacgctttcgacaagttctgcaggctccaccaaggggagctccagctgcttgctgggggcgtcctacaggccccgcagcccgtgctggtgaaggagtgcgagctggtgaaagacgtgctgaacgtcttgattggggtcgtgtctgccacgttttcgctctgccaggtgagaactgctcactccccgccacagtggtgtggggctggcctgccctccaccacgcagtgcccagccctttatggggcagaacaagccccagtgcagggagtggggagtggcagggaaggccagctcccagggccaccagtgatgacagccagcatcatcccatttcggttctaaaaagtgttaatttattaatgtccttttaaaaaactgcagagaaataacatgtttattgctgtcagcaaagcgatagaaaatgttcctccccgcatttccatttccgtcctgaagtgccaggcgccttccgagccttcccaccgctcgggaggagcatctgcctgccgagagcgtcccgagactggggcctgcgctgctcttctcactggatgcggtgtcatccgggatggggccgggccttactggttctggcaccagctgcagtttagccagccctcttgctgggcactggagaagtgaatggatatattcagaaaaatgaagtcttgctctgcagctttttcatttaagtgctcatccccttcctttgtcttaaatgttcttttatggtggccattcttagacttcagaatggactagaagcacagccagtgactgccccagaaaagtgctcaccagcaagctccagctgctgccggcgctgagggcgcctgttctcaacaccgtgctcacagctcatcttgtctgttgtggggatagccttattgtgtggaaccaaccctgactctcttttttttttttgagacagggtctctctcttgcccaggctggagtgcagtggcaccatcacagctcacagtagcctcgacctcctgggctgaatctcaatcctcccaccttagcctccatgtagctgggactacaggcacgtgccaccacactcagctcatttttttcttttctttttctttttcttttttttttttgagacagagtctcgctctgttgcccattctggagtgtaatggcacggtctcggctcactgcaaactctgcctcccgggttcaagcaattctcctgcctcagcctcccgagtagctgggattacaggtgcatgtcactacggctggctaatttttgtatttttagtagagacggggtttcaccatgttgctcaggctggtctcttgactcctgacctgaggtgatttgcccacctcagcctcccaaagtgctaggattacaggcatgagccaccacgcccggcccacccagctaatttttaaaatgcctgaagagatggggtcttgccgtgttgcccaggctggtgttgaactcctgggctcaagtgatctgcctgcctcagcctcccaaagtcctgggattgcaagtgtgagccgccacgcccggcccctacttttcatttctgattttagtaacttgatttttttctcttgttttcatagtcatcttttctttttttttttttttgagacggagtctcgctctgtggcccaggctggagggcagtggcgcgatctcggctcactccaagctccgcctcccgggttcacaccattctcctgcctcagcctccctgagtagctgggactacaggcacccgccaccgcgcccgtctaattttttgtatttttagtagagacggggtttcaccatgttagccaggatggtcttgatctcctgacattgtgatccgcccgtctcggcctcccaaagtgctgggattacaggcgtgagccatcgtgcctggccctagtcatcttttttcttaattattctagctaagacttgtcaattttgttgatcttttcaaagagccagctttttgtttggttctctctattgtttttctattttgtattttttttttctttttgagacggattctcactctgtcgcccaggctggagtgcagtggtgtgatctcagctcactgcagcctccgcctcctgggttcaagcgattctcctgcctcagcctcccaagtagctgggactacaggcatggactaccacgcctggctaatttttgtatttttagtagagatggggtttcaccatgttgaccaggctggtctcaaactcctgacctcaagtgatttcacccaccttggcctcccaaagtgttggtgttacaggtgtgagccactgtgcttggcctactctgtatttatttctgctctaattattttttgtttccttctgctagttttgggtttaactgcttttttttttttttttttttttttgagatagagtctcgctctgttgcccaggctggagtgcaatggcgtgatctcagctcactgcaacctcttcctcctgggtttaagcaattctcctgcctcagcctcctgagtagctgggattataggcgtgcactacctcgcccagctaatttttgtttttattagagatgggttttcaccatgttggtgaggctggtctcaaacccctgacctcaagtgatccgcttgcttcggcctcccaaagtgctgggattacagatgtgagccactgcgtccagcctgtttttcttttctttctttttttttttttttggagacaggatcacccaggctggagtgcaatggctcaaacatgactcactgcagcctcaacttcctaggctcaaattgatcctcctgcctcagcctcccgagtagctgggaccaacaggcatgcaccaccacggctggctaatttttaatttttttttttttttgagacggagtcttgctctgtctcccaggctggagtgcaaaggcgtgatctcagctcactgcaacctctgcctcccgtattcaacaattctcctgcctcagcctcctgcgtagctgggactacaggtgcacgccaccatgcctggctaatttttgtatttttagtagagacggggctttgccatgttggccaggcttgtcatgaactcctgacctgaagtgatccacccgccttggcctcctgaagtgctgggattacaggcgtgagccaccatgcctggcctaacttttaaaatttttttagagatgggggtcttgctatgttgcccaggctggtctcagacttctgggctcaagtgatcctcctgcctcagcctcccaaagttctgggattataggtgtgagccactgtgcttggcctaacagctctttttaaaatatctctttagggtatacacggtgctgttgtggtttggtatcttgttcctttgtattgcgggatattttttttcctttctaacgtgggtatttgcggctgtaacctcccttctggcttctgctacaccccattcgttttggttgtcatgagccctctattgggggtctccactctctggttataaacatactgtggagaatgtcctgtggcgagtctttgtgcatcttccatcatttctctaattcatcccgaagagtcaaatgagcgggtctcacggccgtcatgttttatagcttctgccccaggaggctgtctgtgtacttgtgtcctgtggaaggtgttctgtttttttctacccttttctacacttggcattttaaacatgtatttttcagtgtggtcagtgaggatttgtgcctcggtttggtccctcggtgtgggagttctgggtatgccttctgggcatttgcttttgggtcctggaggcactctaggtggcgtggggttgggtgcaagggtggagggagacggcaccttactgggggtctgggtgcctggcctctgtgaccagtgtcctctgcccctgtgcagcyggcccaggcctttgtggtgaagcggggcgtccacgtgtcaggagcgtctcccgagagcatcagcagcctgctctcggaagtggccgagtatgggacctgctacacgcgcctgagtcatttctctctgcagcccgtcctggactctytgtacagcaagggcctcgtgttccaggtatggcctttgcctcatggttgtcacacacctttgtgagaacggtgcacacgacctggaagagagaatctcagaggtccttctgcaggaccagagagtctaaaccttttctttccttgctaacatctgaaacccgatagtggctcttgagggatgggtcagtgaggatgttttacctcactagaaacttggggcagatgtgtgtgggccctgggctgtgtgggccctggggtgtgtaggaggcaggtgcagccagcataaggggtgcgcagggcaggaaaggcgtgagtggggctcttgctgcctgctccccagtgggcccggcacattgtggatgactgacagcgcagggccctcctgttgggtgaatttacattgctgggagttctgagccaagtctggctccggaagctgctgtttggtgagtcttgaagctggctcatgtgctgggaagaggcccatgggacaggggctgcaccttgagtgggagagaataggcaggtggatgatggggcatttgggtttgggggattgagaggagggtgttggggaaggtgggcagagagccctggaggagccaggcagcgcagcctcctttgactgttgctgctgcagcaggggctgtcgggtggggtgatgtggtgaggtgtaggttttagatgggctgtggaggtgggcatggtgggagctgcacggggcggggagagcttctaggcagaggctcagccccgggggacttgagagctagagatggtggagaaggggtcagagcaggggacgctgagaagggctggactgtggttcttgttcatctggcaggcatagccaggcggctcctggggtgggtggactgagattggtccagggtgcccctgtcttagtgtgacctgcagggcctgctgctgtggcgttgcccaggatgctggtgccactgagacagctgtggtcggagcagctgcagccctcacagcactagtgtctgtgcacagagcacggccgccatttcccccccagcccctttgccatgcccctggggcagctgggctcagatgagaggaagggttggtggtgggcgcccctggggcagctgggctcagatgagaggaagggttggtggtgggcgcccctggggcagctgggctcagatgagaggaagggttggtggtgggccacagcttctggcttcttgtggatgggccgcatttccacctggcccggtggcggggtgtggctcacagaggcccattgcttggaaatggagcccagagctgaggcaagaaacaaagcgctgttcccagcactggtgcccctcaggccctgggcacrgctgcgtccatgtgcctggccgccctcctcccagcctctttgcccacaggccttcaccagtggcctgaggaggtacctgcagtattaccgggcctgcgtcctttccactccgcccaccctgagcctcctcaccattggttttctcttcaagaaacttggccggcagctcaggtgagcctcagcatggcggctgagcaggggactttgcgggagcggtgtggggcttgctgggtggtggagggtttgccctgctccctggcaaggagggcctgtgagaacagccytcagcaggcgaccggatggcccttggccggccgagttcaccaggtgcccggtgctgagcgggtgtgtctgccgtgggcccaccacagctggccccatccaggccctccaggtccggtggctcctgcctaattggcrcacagggtccctggagatgtggcgtccggtacacacaagctggttagtgagcaaccaggctcgggggctattggcaggtgccatcagagaaggaagagtgaggagctgggcattgggagcagtgggagaggcgaccttccaggctgaggagcagagtgtggcagcgctgaggagacccaagggctgagacactgtggggcaggggagctgggctgtgaagggtgcgrgttgtggcagatgcttggtaccactgtgtggatgggaggggctctcaggtgcagcccccagaagtgggaggatcagggtgattygtgtgttggccagatcctgggagggagggcctgctgggtgtgggtacttcagtggggtgtgtgtggacagcgcaggggcacagggctgcacacgagtcctgcagggagcccgtttctgggtggttggggtgcctgtggtttttaaagcctgcatctaaagttagttgccccagggagcataaagatacgtggagactttgctcacgatctgatccaggcctgggaaccctgagcccggtcacctggtctcatcctgcctctgggtctaggtacctggccgagctctgtggcgttggcgctgtgctcccgggcacctgtggaggaggccccagggccgcgtttcccaccgtgagttgtgcgtccctgccgagtgtgtcagcctggtgggctccaggaaacgggggtggctgagcgtgtccctggagggctgctgccggcagggctgcgcctcactcccagcgctgggtgcrctgagctgccccccaccccctttgcggtctgcagggcgtgaagctgctgtcctacctctaccaggaggctctgcacaactgcagcaacgagcactaccctgtactgctgtccctgctgaagaccagctgcgagccctacacccggtgggcagtgggctggkcaggcgcggcgggcgygcrctcccaccaggcagacacttgagagcggtcccttgtcagacacctgctgaatgtgggggtcacacaggaaggggagggcaggataggtggactgggcaggagcccccaaccccccaccctgcccccactccacaccccccaccctgcccccactccatcccgcccctcatggatggccacaccccactccacctctcacagctacgcccccacttgcccctcactgacagccacgcccctgtcccacccctcactgacagccacgccccacccacctctccgttgaccacatctacccctgcttttcccccactgcaggttcatccacgactgggtgtacagcggggtgttcagagacgcttatggcgagttcatgattcaggtgaaccacgagtacctcagcttccgaggtaggtggcagctgattgcggggcaggggtccgtgcctgtgggcctgggttcagggccatggccatgccggccaccgtggtgttcaccctaccttagataagtygtactggacacatggctacgtgctcatctccaaagaggtggaggactgtgttcccgtgtttctgaagcacattgcccacgacatatacgtctgcggaaagaccattaacctgctgaagctctgctgcccccgggtgaggaggggctcatgtgtggggaagagaggggccggtcttccctggggctgagtatgaggctggggctgagtgctggtggctgtgcttgcatcccctttggcagcattacctctgttggtccgacgtccctgtcccccggatstcggtgattttctcccttgaggagttgaaggagattgagaaggactgtgccgtctacgttgggcgcatggagagggtggcccgccacagctctgtcagcaaggaggagaaggtgcgtggcaccacaggtctcgggggctttcttcgcccctgcctctgcttcctggggtctcaggttggtggggcggacatgagggctgtgcaagatgggggcctcccttctggcattttctgtcctggcggtggcctgggtgggtgccaagggggagttgagatgaagggtgggtgtcaacggggagttgagatgaagggtgggtgccaagggggagctgagatgaatgtccggagccagatgccaggcaggggctctgacttctcctcctgggtctgggtggctcagcctgaagcccaggctttgctggcgtgggaaactccgttggggcctccccgggcccgccagctgtggacagacagtcctggctgcactccagatggccttcgccctttgcaagcccccttcctgctgggaagggacagtgtgtcagggacgggccacgcctctcctgtgtcttctgggaggggctcggtggtacaatcagtgccattcccaggaacaccctttctggcctggtgcctggtgggcagcagggatacttgggcaggggcaggcctaagaggctgagcggggaagccccctcttgaggcctcttggtttccttccagggtgggcacacacagccttggggtcctcagccccagatgtctctgtgagagccggtcagctcccgtccatggcctggaaccagccttgccactgctgagagcctgggggtgggggagggtgggcgggggggcggtgtcctgccatcacctggtccctcctcgaacccttggaccatgtgtctcccctgccggccctgagtccacaggtgtcctgggcatcctaggtgaggggtcagaggattaggttgctttttttttctttgagacagggtctcactgtgtcagccaggaggctggagtgcagcggctcgaacatggctcactgcagcctccacctcccaggctcaagggatcctcctgcctaagctcccctkacccccgccaaatagttgatactacaggcacctgccactacacctggctaatttttgtatttttagtagggatgggtttttgctatgttgtccaggctggtcttgaactcttaagctcatgtgatctacccacctcggcctcccaaagtgccaggattacaggcgtgagccactgcgcccggccaggatgctttgattaccagttgtctttctcaggaattacgtatggaaattgcaaaacaagaattaatcgytcatgcccgggaagcagcatccagggtcctgagtgcactgagtggtgagtggccccaagtcctcccttctgcagttccggggggccttgctggggcctccttgtgacagtgcgccccttactgtcccartgtagaccggcagatgtcagaacggatggccttggatgcccggaagcgtgagcagtttcagaggctgaaagaacaatttgtgaaggaccaggaggtgggtaggacctgtccctgcggggtcacgcctgtcagttctgatttcacaggccaggctctatgtgttttatagcgacgccaggcggccaggcaggaggagctggatgatgacttcagctacgcccgtgaactccgagacagggagagaaggctgaagtccctggaggaggagctggagaggaaggcgaggtagggcagcccgggctccaggcccaggggtgcagtgcggcaggggccccatagctctggcttaatcttactgatgattttactttttgttttgaaaaccttcaaacatacattaaggtagaaagaccaatatgctgaacccagagtggctgtgggcgttctgccttatccaggcatccttagctgttctgcgcgttgtcttgtggtggtttgtatggattagggtccaggcgaggcctgcgtactgtttggggtcctgtctctttatttatcttctttctgaacatccttccttatttatttttaagtctgttattggtctgacagagacagggcgtttttttttttttttttttttttggaaacagagtcttgctctgtcacccaggctggagtgcagtggcacaatctcggctcactgtaacctccgcctcccaggttcaagcaattctcctgcctcagcctcctgagtagctggggttacaggcatccgccaccacatccagctagttttttgtatttttagtacagacggggtttaaccatgttggccaggctggtctcaaactcctgacctcaggtgatccacctgcctcggcctcccaaagtgctgggattacaggcgcgagccaccgcgctcggctgagacagggcatttgtccagcacagcatctgcgtctgtctccctgtgctgttatcaacctgtcctgtgctgtcatcaggctgtcccaggctgagtagtgctggatccttcaaggggctgtttggggttttggagagagcccctcacgggaggggctggccgcttcctgctcagccccacgcgatgctgtaggtcccaaccttagatctctttatggagcgagtgagggatgtgtgtggaggggtgcgcgtgcctgtgtgcacgtgtgtccgtgtatgcatttatgcatgagtacgtgttcatgcatgtatgtcagtcgatactgtcctgttaacacatggagaaaaccaggcctagacactacgtctctggcctgtggcagccaaattagagctggccagtccaggtttgagcccagttgcctgctggtgagaagctcaaaatcatggggcacgatcggtgaagcaggctttgaattcagcaaataaagcgtttgtgttggttttgcttcatgtgcttttttgcattagttttcagttctcaggtttgtacctgtagaaggggaagaggcctaacttcttagaggcctggggccctcggcctcctgctcaccccttgcttcaggccacacaggatctcattctggtatttgtccagcagatgttgctgagccctggctggacgctgactcaccagggtctcccagcctggcaggtagaagggcctgcctggtgctgccctgtaggtgctgtgagggcccagagctatcagcccctggtagggggagacgggggcgggggcccactggggcctctgttatggagaaccatcctggcctgaggggtgccaggtagatggggtggggtgactcttgtggccgtgtcctctctggtgtgtggcttcaggcaggcactggtcgaccactacagcaagctctctgcagaggcagctcgtcgggagcagaaggcactgtggagaatccagaggcaccgactggagagtgcacggcttcgttttctcttagaagatgagaaacacattcaggtatgtctgcggcttcagatggcagctcttcccctgggctttgggggtctggaaaccccctgagactgcacacaaacctacatgctcttctaggagagggctggtggctttygcgtttgcggcagagcactctctctccccgtgtgccaccaaattgcacagatacaggtggtgaggagctcgtggttttggagtactttttgcaggcccagcgtcccactggagcccagcacaagccttgtctggttcagtgcacatggctgccatgggcggtaggggctgtggctttgtgtggggtagggctgtgcttgactccggcttggccagtcacccctctggcttgaatttcaggagatgctgaaagcagtgtctgaggctcaccagccccaggagccgccagacgtcctcttgagcgtgcacccccaggtaagcggcagagtggaacccagggtgccctatggttttcccatagccctcggcacctggtgttggtcatggctgcagagctgaacttgggggacagttcgagggctggggggtcctgagaccagactgggtctgatgtcacctgtgtttcaggtcacgtctccgggccctgagcacccagagggaggccaaggctgtgattctgggtctgcagagcaacactcgcctgcctgggatggctggaacaggccaggcctgctgaccccacagccccttaagcctctagcagtgggggctggtggcagggggctgcagcaggyggagggggccagacccttctctgacagcctcagcattggagacttcctacctgtgggcccaggggctgagccgtccgtgcagactggcatggtccctctcctggaggtggcgctgcagaccattaacttggacctgcccccctcagctcctggggaggcacccgcagcagccagcactcagccctccaggccacaggagtacgactttagtactgtcctgaggccagctgtggccacctcacctgcaccagggcccctgcaggctgcagagtgcagcttgggcagctcagggctacagctgtgggaggacagttgtgggaagatggatgcctgtggctccgcctcgcgggagactctgctcccctcacacccacccaggcgtgctgctctggaggaggggagcagccagcccacagagcggctctttgggcaggtgtcagggggtggtcttcccacaggggactacgcttctgaaatagctcccacccggccacggtggaacacccacgggcacgtgtctgacgccagcatcagggtcggggagaatgtgtcagatgtggctcccacccagccacggtggaacacccacggacacgtatccaatgccagcatcagcttaggggagtctgtgtcagatgtggctcccactcggccayggtggaacatccatggacatgtgtccaacgccagcatcagggtcggggagaatgtgtcagatgtggctcccaccaggccacggtggaatacccacgggcacgtgtccaacgccagcatcagggttggggagaacgtgtcggacgtggctcccacccggccacggtggaacacccatggacacgtgtccratgccagcatcagcttrggggagtctgtgtcagacatggctcccgcccggccacggtggaacacccatggacacgtgtctgatgccagcatcagcttgggggagtctgtgtcagacatggctcccacccggccacggtggaacacccacggacatgtgtctgacaccagcatcagggttggggagaacgtatcggacgtggctcccatccggtcacggtgcaacacccatggacacgtgtccgacgccagcatcagcttgggggagcctgtgtcggatgtggtttccacccggccacggtggaacacccatgtacccatccctccgccccacatggtgctgggggctctctcaccagaagctgagcccaacacacccaggccccaacagagcccccctggccacacgtcccagtcagcgctcagcctgggagcacagagcactgtgctggactgtgggccacggctgcctgtagaagtggggccatctctgtcctcccccagctcgggctgcggggaggggagcatcagcgtgggggagaacgtgtcagacgtggctcccacccaaccatggtggcccaacaccccgggagacwgtgtctctgaagaactaggtcagagtagggtggctggtggtcaggagtgggactgtgggacgcacagagcctgggaggtaggcgggcagtggggttggtggcatgtgaagttcccctcaggcctccttgtcagccaggacctgggctgctgtgggggacatgggaggggctgcttgagccagggccggctcggctcygtaccckccacaggcactcggccctgatgccctcgtgtccacttgtgtccacacaggccctgggaggagcggggacrctgaggacctctctccaaattggcctctcaactcacaggttaggtggatgcagcctgggggtcccacagcaggcagggagggctctgtccctctaggttgtcacgcgggtgggtcccacatgcgattttcctttttttggcacaagctgsttgtggggacagcgtgcagtggggaggtggttctgaggctggtgttttgttaggaagacacagctgcccagagcagcccaggccgtggtgaggaggcggaggcatcggcggcggaggctcagggtggggagcaggcctacctggcaggcctggcagggcagtaccacttggagcggtacccggacagttacgagtccatgtgtgagtgcagcagttgctgytggcaggragccctgggctggctggttcccagcacrtgctccacctcctgtgggttggggcggagccctgrgctagccagttcccagcacgtgctccatctcctgtggatgggggcggagccctgggctggccggttcccagcacgtgcgtgctccatctcccgcagccgagccgcccattgctcatcttttgcgccccgtgcttccccgggccttcgccttccccgtggacccccaggtccagtctgccgctgatgagactgctgtgcagctgagcgagttgctgacgctgcccgtgctcatgaagcgctccatcacggcaccgctggccgcccagtgagtgcccctgcccctgcgccagtctgcccacccagcccgtcctggcccgccctgactccagctccctcctgccagcatctccttggtgaacaaggccgctgtygactacttcttcgtggagctgcacctggaggcgcactatgaggcactgcggcacttcctgctgatggaggacggcgagttcgcccagtccctcagcgacctgctctttgagaaggtggcctccggacacggggtggggccaktggtagaggggaggccgtgggaaaagagagactggctgcacgcccacagccccctgctgctctggcacagccccatggggtgccggcgagtgccaggcatgtgcttgggactcctggggacggtggtcccttttctgcctagcttggagctgggcaaacgcccggagagctgctcaacccgctggtgctgaactctgtgctgagcaaggccctgcagtgcagcctgcatggggacaccccgcaygcctcyaacctctccctcgctctcaagtacctgcccgaggtgtttgcccccaacgccccggatgtgctgagctgcctggagctcaggtacaaggtcagcagcagccytggccrcgggggatgggacaggggcctgcctgcctgtgggatgcctgctgagccacgcctcctggcaggtggactggcctctcaacattgtcatcaccgagggctgcstgagcaagtacagcggcgtcttctccttcctgctgcagctgaagctcatgatgtgggcgctcaaggacgtctgcttccacctcaagcgcacaggtgaggccccgctggagcccggcgccccgcacccctggctggaggctgcgctcacctctgccytctgccttctgccctccgccagccctgctgagccacatggccggctctgtgcagttccgtcagctgcagctgttcaagcacgagatgcagcatttcgtgaaggtcatccagggctacatcgccaaccagatcctgcacgtcacctggtgcgagttcagggccaggttggccaccgtgggcgacctggaggagatccagcgtgcgcacgcagagtacctgcacaaggccgtcttcaggtgaggcctgggcagcggctgcgtccctgtggtcacggctcagcccacccagcagcactgcttccccccaggggcctgctcacrgagaaggcggcgcccgtcatgaacgtcatccacagcatcttcagcctcgtgctcaagttccgcagccagctcatctcccaggcctgggggccccctgggggcccgyggggtgcagagcaccccaactttgcactcatgcagcagtcctacaacaccttcaagtactactcccactttctcttcaaaggtgaggcccaccctggctgggagggctgcgggggggccagggcggggctcacactgtgggcaaaagcctgagctgctcgctggtccccagtggtgaccaagctggtgaaccgcggctaccagccccacctggaggactttctgctgcgcatcaacttcaacaactactaccaggacgcctgaggctgctctgcgggggacgtgcacaataaaggtgttctcggaccctgtctgcagctctctctcctgggcgggggctgaggacagggcagggtgggggaacaatgaccacagagacagactcgagggagttgctggtttatttaggagcctgggtccagcccccagggaccaggctgcactgctgagccggcctcagacagagacgggtcaggtcctgactggatgtctctgccatcatggaaagacgggtgtgcatgggccagggcagaatcccccagtgtatagggcagcctggcatcatcttggccactcagcagcacatgggggcctcgggagactccaggggtgtggagcgtgccgaggccgttacgaagatcatgtcacgcacagttctgctgcccagagcgggggcttactgctgtaggagcgctgcctgccgtccgccccgtcggcttccgtggcctcggcgtctgtggcggcccccgcctcgcagtggtaaggggtctccagtagtttcagcacccgccgcacctggaggatcaggagggtgagaggggtctggggccgacccccctcccagggaccacagggacaggcgtgtgcttgcctctgagaagtccccgcgctcggcagcctcgatggcattctgcgcgatgtagttcctcagcacgtacttcgggttgttggcgtgcatcacgcgcacgtgctcagcctgccaggcggcagcgtccccagcgccttccaggtccttgtccagccgggctctggaatgacatccgggctctggagtcacagccgggctggactttttccagcacgcgacccgccgtcccccggtgaccatggacgcagggctcacctgtacgcctgtagccagtcagcccagtggccctggttcctgctctgcagctctgccgcactcagctgctccagccgagactgctgctccacacgctccagctccctggcgatgcctgcccgggtgcccataagcgcgaacagctgcgggtttgactgcgccagcatcagcatcatggatagctgcctgtggagaggccagggtgtctgggaggtagcccctgaccgtgtccctgccctgcaggcagctgctccgcctgccccagcccgctctcacggctcacctagagtccaagggcccaagcagcccggtccccgaggtccctggaaccccactggcagggatggaccccagtgggcacacaccaggcatgcccatgctcggccaaggccctttgtgggccgaggggcaggaccactctgctgcccagctttctgctggagagtctccacctcccgagtttaatgcttgtgggatgggcactgctgttagcacttccctcatttccagaagggtccaggtgggcaggggccacgccttctccagtggagggggtttatgctcagcagggcctgctggccggtgctcccagccaaccccactggtcttgttttttaagttaaagcaacaatattttccacgtctcatcctgcacgtgggcgggactcttcagacagggcagcccttccctttggaagatggtgtgggaaagcttgacctctgggagcccattctccctagaaacccagaggctttctctgaagcccacccacagcagagaccactgtctgcccccacacctgtgtcagcctcgccactctctactctgtgaccaaccggccccagcatcgcagagatgccctgaagccctgactgaatctgtccctgggagcggagcagccacctgggccccagccagctctgtctctagcttctcccccagcctctgtttctgattatgcttccttttctggaaacaaatccaaagaagtaggaactgagtacccaccggggatccatctggggccggaaggccagcctcagctcctccagggaggcacactgctccatcagcctggccaggaattccgccaggcctggcgactctagctccactgggaaggagctcagcaagtagaaggtgtttgtgaagtcggcacctggaacacaggctgctcagggagctggaagcagaaggcccagggtccctgtcctggtgccacacagacccccccccccccacccccctggcacaggtgctgcatggacccacccacatgctccaccaccgccccccaccgccagcacggatccacacgctccctgacccacaccctccacctggcacagtgccatacagacccacaccctcccccagcacaggtgccacacggacccacacctggcacggatgccacagagacccacacggacccaaatgctgcccccagcacaggtgccacacaagccccgctcagcattggtcctgggactcctgagccctccacaccccactcctcagcctccacccatccaccgcccaggcagctgccatttgctcaccctccaagtcacctgtgaagtggcctaatactgagaaggcagaggctgctgcccggccctcacatcctcacagtcacaactgcctgctttgggagctagcgagtgttgagaagctgctgtaacccgcctgcaaaaggcccaacttgtgacagacactgcgatcctccccctgactctggaaaacactgtctgaaaccacagtgaccctaagactgtcttaaaaacaaaatgagaagggagtcaaagcaacgtactgcaaaaaagtcgactacacacaaaggtagcaagggagaacgtgagcgaccagaaacatggcagaagctccccctcagtaactgctttgaaagcgaatggactgatcgctccaacaaaaggcagattggcaaagtgggtgaaaagacgatttccatgttgtcaccacacgatctgcaagacgttcaaagacacgaacaggctggaagtgaaaggatgaagaaacccaggcaaagagtaacctaaagagagctgaggcgactcttaaactcacagcagataagttttctattttttgagacggagtcttgctctgttgccggggctggagtgcagtggcgcaatctcggctcactgcaacctccgcctcctgggttccagcaattctcctgcctcagcctcccgagtagctgggattacaggcatccgccaccatgcctggctaatttttgttttttgagatggagtcttgctcttgttgcctaggctggagtgcagtggcgtgatctcagctcactgcaacctccgcctctcctgcctcagtctcctgagtagctgagattacaggcacccaccaccatgcctggctaatctttgtatttttagtagagatggagtttcaccatgttggccaaactggtctcgaactcttgacctcaggtgatctgcctgcctcggcctcccaaagtgttgggattacaggcatgagccaccatgcccggccagagaagattttaaataaaaaattgtcagaagggccgggaaaggtgctcacccctgtaatcccagctacttggtaggctgaggcaggaggataactagagcacaagaagtggaggctgcagtgagccgcagctgtgccactgcactccagcctgggcaacaaagtgagacacatccaccctcaacaaaaagtcgttacaagagacagcattatatatggataaaagagtcaattcatcaataaaaatgtaaaaattataaacatgcacccaataagaaagcccaaaaatgtaaacgttggcagaatggaagggacagacaacaaacagttctatctatagtaagagttggagacttaaacacaccacttaataatggatagaccatctagggttgggagcggtggctcatgcctgtaatcccagcactttgggaggccgaggcaggtggatcacgaggtcaggcgatcaagaccatcctggctaacacggtgaaaccccgtctctactaaaaatacaaaaaaattacccgggcgtggtggcaggcgcctgtagtcccagctactcgggaggctgaggcaggaaaatgccgtgaacctgggaggtggagcttgcagtgagctgagatcgcgccactgcactccagcctgggtgacagagcaagactccgtctcaaaaaacaaaaaaaccatccagacagaagatcaatgagaaatggaagacctgaacaacagcctaaaccaacaagaccaaacaggcacatacacggaaccctccacccagcagaagagagcacaccgtcttctccagggcacacgggtacaggacgctctgcccagcaaaagagagcacaccgtcttctccagggcacacagaaagttctccaagataagccacaaaacaagttgtaataaacctcaaaaggctgacatctctagtcacaatggaatgaagctagaaatcacttaaaaacacaacacactggctgggcgcggcggctcatccccagaatcccagcactttgggaggctgaggcagatcacttgcgatcaggtgttggagaccagcctggccaacatggtgaagccccatctctcctaacagtacaaaaattagctaggtgtggtggagcatgccagtagtcccagctacttgggagtctgaaggaggagaaccacttgagcctgggaggcggaggttgcagtgagccaagatcatgccactgcactccagcttgggcgacagagtaagactccgtctaaaaaccaaaaaaacccacaacataccaaaattgatggacacagcaaaagcagtgaccagaaagacatgcacagtgtaaatggctacactgaagaagatctccaatcagttacctcaactcacgcctaaggaactggagaaagaagagccaagattagagggagacaatagactgaagaaacaggcacacgctgcgtaactccacttacacgaagattagagggagacaatagactgaagaaacaggcacacgctgcgtaactccacttaaacgaagattagagggagacaacagactgaagaaacaggcgcacgctgcgtaactccacttacacgaagattagagggagacaacagactgaagaaacaggcacacgctgtgtaactccacttacatgaagggtttagagcagtcaggttcacagactcggagcggagtggttgctaccaggggctgcagggaggggaatggggagctggtaaccggctcacacagggtttgggtggcggatgtgaacaagctccagggctcggctgtacagcactgctcctgcgtcagctgtgatgtgcggtgccctccacaatttaagaggatagatccatgttgtgttcctaccacaatgaaattgtaaaaaactgctacgaacaattatatgccaaaattacctacaagacatggacaaactacctgacacagaaaattcctggaaacataaattaccaaaactgactcaagaagaaaagaaaatctaaattgaggtaaggcaagcaaggagactgatcagtaatcaaaatttttccaacaaagaaaagcccaggaccagatggcttcactggtgatttctaccaaatactcttacgaacaaatggcaatccttctcaaactttgaaggaaaaaaatggaagatgtgcgcatacctcctaactcactctgaggccagcaccaccttgacatcaaagccaaacagacactaaagaaaaagcagaactctaagctagtatcccttacgcatacagatgcaaaaatcctcaaaatactcgcaacattcagcatattaaaataattatacagcatatggctgggtgcggtggctcacgcctataatcccagtactttgggcggctgaggtgggcagatcacctgaggtcgggagttcaagaccagcctgaccaacacggcgaaaccctgtctctactaaaaatacaaaattagccgggtgtggtggcgggtgcctgtaatcccagctacttgagagactgaggcaggagaatcacttgaacccaggaggtggaggttgcagtgagccaagatcgtgccactgcactccagcctgggcaacaagagtgaaactccgtctcaaaaaatattaaaaataataatcatatagca

SEQ ID NO: 97968 - DNA, 38624 bp, Homo sapiens
tgcactgaaacagataatggtggtcaccaatttgcaagcctgggttttatttatttagttccctattttgaggattcacttaggcaaagtcaattaaatgagtgtggaggacaaaattctaagatgatccctccaaagaccctcacctttgtataattccctgccctgggaatatgatggggcatcactcccatgattatgttatacatggcaagaaagattttgtagatataattgagcttactcattagttggttttgagttaataaaaaagagattatcccagtgggcataacctaattatctgagccctttaaaaggaatttttttctgacggataggattcagcacaaggaagattctccactaatgggatggagggggccatagagcaagggcctgagagtggcctctaggagctgagggtgattccctggttgacatccagcaacttggacttccgtcctacaactagaagaaactgaattctgccaacaacccagatgagactggaagtagattcttccccagagcctccaggtaacagctcaacatggctgacaccttgattttacctttaacagattctaagcaaagaacccaggtgagcttccccagacttttaacctaacagaactgtgtgataacaaatgcacattattttaagccagtaagttagtagtaatttgttacatggccatgcaaaattaatacagcaagctgatctaagtgacaggtggagatgataagaaaatgtgaccctttccccttctccacagcctttctgtgagcctcaggaattatgcacctatgctgactaatgttaggcctgatatttccaaaactatccaccccgtgacctagactgagtccagtgctaatcacgttaaattttctaagacagtcttgatttgaaatatcacattagcccacatattattaaaatctgaaagtgtagttactgctgccatggagtatctagttattggttataggatcacagcaatgatttttttcaaaattttatattcataattcactaaaatataatgataacacctatctattattgtcaggcaccttattatactgttaataaccctcacagcctgtatgagaagtagatgtaacttttccaattttgatggcaacaaaactgaagtctggatggagtaagtgatccaaacatacagactagctaaggtaagatttaaacctaggtcagtcctgctccaaagttcagaactctactgggtagtgatgcattgatctgtaaaatgggttatgaagaaagtaaattaatgattactcagggctgggcaggggatgggaagataggggttgtatctagaagatactgaatttattttggggatgttgaaaatatgctacaattcatctgtgtttatagttgcatgactacaaatattttaagaaccattgaattgtacactttaaatgggtgactcgtatggtgtgttgattatatctcaataaaccaggatttttttaaggcagtgaaagtgttttgttggggaaatctagatatatgaggcttgcaaaggaggcaaggaatgggagaaagactcggtcatggagtcttggatatcatactaatttgtttcttgggggaaaaaagggttctccagaaagggttttaaataagggagtgaaagaatctattagtgttttagaaagatctctttagtggctatataacgatggatttaagaaggacacaatagtacagttgaggagattggtgaggagactcttgcatagctcactggaaaagatgaagacttggcaaaagctaatggaatgcaagggtgcctggtgtttgagagacactgctgagaaaaaagacatgcaacttgtaagaacctcagataagggagagaaaggaatgtaagactggggtttctaccttgggagttcagcttcttgagcaggtgctgcctcccctttgtggaatctgggaaactggacccaaggcaatgtggggagagggaggaaagaaggtaggtaccttagaaattctactgagagcctagggctcagccctccagtcaaacacaaatgatactgatacctgggtcttacattcagagattctaattaaacttgtctgtgattgtgacctggaaagatccgaggcactgggatttttaaaagctctcaggtaattgtaatgtgcagccaaggatgtgaacctacaacttggacagttcctttccagctgaggcagtcagaaaaggacacagatgttgctggtgaactgcttacagtccaaccaatcagacagggccctattgaaaaaaggtgaggctttgtcttgagcattggagtctgacaggcccattctagagactgtttcactaatgatagtctttactacaagaaataatatttaagatggtagaggattatttgatgttgttcacatgaagtcgatggaccagctagagcttacctgtgagtatgaagaattcctaattattctggcttagtgattatcaaagtgtggtgctcagtccagcagtatcagctttatctgggaacatgttacacatttaggttttgggccctatccaagtctactgaatcagaaattccggggggagaggcccaaaaatttgtgtgtatgtgttttttaaaaaattcattaaactttttaaaatttttgaaataattgtagattcataggcagttgcaaaaaaaaaaatacagaatgatcccattaccctttgcccaatttagacatcctacaaaactatagtacaatatcacagcccaggtgttgacactgatacaaccaaataaaaaatacagactttccgtcaccacagagatctttcatgttgcccttttctagttacacccacttaacttcacccacctcgtcatgctggcaaccactgacctgttctccattctataattgttgtcatttcaagaatgttatacaaatgaaatcatatagtatataactcttggggactggctctttttttacccagcataattctctgtggagtcattcatattattgtgtgtatcaatagtttgtttctctgcattgctgattagtgttccatggtatgaatgtgccacagtttaaccattctcctgttgcaaagtcactttaacaacctctcagagtaatgcactgatgcactctcaggcttgagaacccctgatctctagaaaaaaagctttaaaggacaggaaagaaatacagcactcttctgggttttcttcccatgcactaacttcatggtcctcctcaaaggcatagggaaatgactttttaaaatttccaccatggccgggtgcggtggctcatgcctgtaatcccagtactttggaaggccaaggcgggtggatcacctgaggtcagaagttagagaccagcctgaccaacatggtgaaaccccatctctatcagaaatacaaaaattagccaggcatggtggtacatgcctgaaatcccagctacttgggaggctgaggcaggagaatcgcttaaacctgggaagtggaggttgcagtgagctgagatcttgccattgcactccagcctgagtgacagagcaagactctgtctcaaaaaaaaaaaaaaattccaccactactgttaccataatattctgtatcctgcttatcactgttaagtaaacgcatttcttaaaagattcatgtatttattcaacaaatatttatggaagtacctcctagtaactattctaggcaagaagaaagcagcagtagaaaagatgtataggtcgcttctcacaagcagttttcgctccagcgggaccagaaaagacaataagcaaataaactcttgtgaaacaaagtcaggttgaaataaatgttatgattgaaaataaagtgacataagggttaaaagatgaaggaaatgaggtatcatttttagtgacagtcagagaagtcctctctgaggagactgcttgagagcagagttaaaaaaataaggaattaaggcacgtgtatatatgggccgctgcagcagatggagcagcaaatttaaaagtcttgcgacaagaacatgcttaacccattacatggcttggatatttgtcccttccaaatcttatgttaaaagatgactcccaatgttggaggtgaggcctagtgtgaggtgtttgggtcatgaaggtcaatccctaatggatggctttgtgccttcccatggtaatgagttacgaggatatctgactgttcaaaagaatctgggacctcctcccttctctcttgctcctgctcttgtcgtgttacacatttgctccttctttgccttctgtcatgattgggaagcttcctgaggcctcgccagaagcacatgccagcactatgcttcctgtatagtctgcagaactgtgagtcacataaacctctgactcaggtcagttcatgcttttgcctaggcttccagactgtggaggaagggactccagcccacagccctagatttgggatgtcaggcttccctaagtgaagtcctacccatgaaacctataacagaagcctctgctctctccctcgaaggagtgctaagaagccataatgagtttataatcctgaatagtagaaataaaacacctaattacaatgagatgaaattcacattagctgctctggccccaaacacagcatactaagaaaataaagatgctcttggtacttaggggtgtgattttaatagaaaaggtaaggttctctgaagttactctgaaacgtatagcacttacaactttgattgtctacataacttatacaaatattacacaataacatcataaccatgcaaaaacaaatgacccctgtacaaattttgggtagaatgctgggggttgggtgtacagtggggagtaggggagagatgaaataacttaaacccaggcactcttacctacagcctgaatgttttactaactaaaagactccttggataacttaaattaaaaccatcaacaacttccgatattcaaccttagctatcaacttgtcccatgaaaacaggctggaaacctgcctcagtccttgatgatttcaccagctcaggttggcatggcacatgtctcctatctaaagcttgggtgaagataaaaggagaaaactaaaatggagaacatgtttagattctgtaaaccagagttaggggctactttttacaaatatcaattctatttgtaactgtatgtttcctgttacttgccaaaatgaatcacaaactcatttgtggacccaatcatttatccatgttcactctcccagactttggggggctttcctcagatctggaaactatttttgacagctgagattttgttctagacatggagtttagacttgagtttgagtttagctttagtgtttaaagggttaaggatggggcagcccagggttaagggttaaggatggggcagcaaaggtaacattctacactgagtctagccatggggaaggggctttgacagtgtcttcctcaacaggttttgccattgaaagaaacatgagacattaaagctaaactcaaactcaagtctaaactccatgtctggaacaaaatcccagctgtcaaaaatagtctctagatctgagaaaagccctccaaagtctgtctggcagaatgaacatggataaatgattggatccacaaatgactttgccattcattttggcagtaccaggaaacagacagtcacaaatgggattaatataatgaatggcagagaaatgcttaaaaagatttaaaaaggaagtggtaatattgatattgctacatattgaacatttgaacaatgtttagacatcaatttctgaaaacaaagacaatggctatgagcagatacactcaaaatgaagaaacatttattttttgttttttaagaaaaggttaatcacatattcatagagtcagtttgttactatggaatcacatatgatgtcataaatttgacattctaaatgcaaagctagactgagcaagggaagtgacaggaaatggagctggggagacaaaaatgtggataacaacaaaagaatttcaacaggtaaaaaaatgagtcaaacatctctcaaacagaaaaaggtgagtgaaccgagtgtcttagaatcttgccatggggctgaagaaatgtggatatcagtccatcatttgcctctgcaaaggctctgcaatgatcaaataatttcagataatggcttcaggtagaggaaaagagaagggagagaataaaggcaatggaaagagtasagaaaagggaagaaggagaaatttaaaagaaattaagacagcaaagaaagagattaaaaaacgtgtagtatataaatgattccaataagtcagtattcatttagcatatactcatatgttagtagtaaaaggtaaaaacagtggctgtctttgaagaatgcatggcctagtaggaaagacaatagacaaaggacaactcattgctccataaaagtatgtacaaaagacacaaggaacacagggcaatatttcactctgggaacttcccccaggtcacactgagctgggtttcgaagaacacaggagagaagaggagaccataaggaaataaggctggtgtatgcaggcaaatacaagtcacttggtattagtagaacatagtgataaagtatagagtgaagggcatgcaagtagcaggtacacaggaaaacatcatgaggctcctggtcaaaccaagtgaagaaagtgtttatccaggaatgaagcattactagatttacatcttgtaaatattactctaaataaatacggtggacagatctagaagtggagaggatttaaggccatgaaacctgtttgaaaggctatattctgaaaatgtagtcccaggatggtcagagacctggaacaaggcaatgataatagagatagaaaaaaggaactggattcaaaatatcatttggaattagaagtaagaggtattatggtgactgctatgtatgtgtataaggtgagtgagggttgatgaaaagattttaaaattagttcaggagtcatacagctatgccattctctcatgcaactaacattctcatgcaactaacattgatgagatttttcctgcatgcaagacacagagcataaacggatgaatatagactgctctagtggatcttggtctaacttagaagttgtgctccttaaacatataaataacactaatcttgatcacattgcagctacttacttagcatgaaacagttcaaataatattccaataagtatctcctccaaatgaaaatgaaaacataaatatttgagtagagttccataaagtgagtcatcttcttgtgctcttttacttggttttccctatctgttgttaatttgttggtaagaaatccctttccactctagatctatgagtaattaaatgataggaacagaagacatgactttcaataaatttgtatgagattaaggtccttatatttagaaatcaaactaatattggtgaggctagagccacaaaaagtttgagctgtagtgatgatgaaaacaagaaaaaattgaattctaaatggcaaggaaaagtaagttccataagtagcaatcttcagagtaatagaaaaaaaaacaaacttattctacataaacaacttcacaattctctaatatttcccatgttatcagtctttaaacaataaatgctttatatctcaaatctatgaaccaacaaatttctatattaaaacttgtttatataattctttttaataaaatatgtgttaccttttactcatgcttgttagaacaggggaaactaaggtctagagtttatacctttttatattggcaaataaataaattttgtgttttctttatccttttattctgaaagccaaagttcctaatgccctgagattaaaaattaataaacattctttgtttccttgtcaagaatgagcctggaatgaggtcctcaaaagagagtctagaagcagaaaaaagaaaggaatctgacaaaacaggagttcgtctgagcaatcaggtgagctgatctctgtagcagaggtgaggaaattaaggagcagaaagcataatggaaaatgttagggggcagggagttctgggagagaagaccaagctgttgagaattgtattaaggcgtccctaatgtcctcatgagaaggttaaggaactaggaaaggttgggccctgccttcccctccatccataccctagtgttcacttcgaatgtgtggaaccacagcaggctcctctgctcagcctacacaggggggagactggtctttgttcaaatcagggaggggagggggtctggccatggcattgaccactttctgcacaatctttcagatgaggcgtgcagtcaatccgaatcactcgctgagatgytgccccttccagggtcactcgtcgtgtagacgctgcctttgtgcagctgagggaacagcccttggcccctgccacacaatacgtatttatattcacatgtgcctgttgtgggagcagggccagcagatcaccatgatgagggtgagcagagatcacactaccgattctggaggggaaccacagacaacctgggtgaggggaagaatatggcaaatagaaactcttttactttgctgttccggggggtccttcattcttgtttctcctaaaagaaaagcttgagggctccattccttttcagcagctgccttagagtccccctgcaacctcagtggggcaccagttgccctcacctttacagtctggtaaaaaatggtggatatattgtttcagcatctgttaacaggcttatcctcgagggaagaagtgaggaaaagggaggaacaatggtgaaccatactaatatccacataagaggagtcacagtgaaaaaatatgtttgcatcttggttttggatgctctttcaagtggacccccacatagatgctccaaacagaagtgaggactagaccagagttagaatagtacagaagagttcaggttgagttaagagtcattgaggccagggatcttctcactgggtgctgctatattcagcctgacatgactattctgcaggcacacgtatagaaggagttggtgatggggttttacaccgttgggtttcttctttccatcacagggatcacaagaatcatcactgcggaagacagactctcgagggtaccttgtgcgcagtcaatggtctagaatatcccggagcccatccaccaaggctccatccatagatgagcctagaagcaggaacaccagtgctaaggtagaggtaaagatgaaagggagtagtagatgatagaataataacaatggttaacatttattgatgctttctacgtgccaggccctgtttatgtgctttacatgtgttagctaatttagcccttgggagaactccmttctgcccgtaaatcccattttgccactgagaaacctgaagtacagagggaacttgtttaaggtttcacattaataagtggtagagctagcattaaaacccaggggctccagatctagaggctgcacacttcctccttccttccttcattcaacaaatagtaattaactgtgattctcagaagagggaaggaaatagtcaccaccagagaaaaagagtgtcagattgtgtggggctttgagtttttaattaggcctgaccacataagcaattaaaaaaaaaagttagttttgagattaagattttggaagcagagcgaatgacccagacccagccactgggaaagcatgcattcctacctaattcatcatctctatcggatttgactcaatcatctaaacaaaaacatgcttttttgagtcatgtgtgaaacaatctgaaatcatatatggatacctaataacttcttgctcaccttagtaaaggagttttttctctagaatggcccttccctatttgggaagatgattctatgtaactgtgcttcaccggcacaaggagctctgaaggccctggggagatgctccagtctccagacaagagactttcccagccatcactacatcattcacatggggagcggggagagacatgccctgaggtgctatgtagagtgttctggtgagaatgtctggcccactttgctcatggagttaactggaagtcgcacactaaggcactggccaagcaagatccattctgcatgccctctgtcctacctgcaggcctctgactgagtaggtatatgccaagcaggggacagaactttgcaaaccatgtgtcagctgcctaagggggaggaagaggactgggtcctatctactccaaacaaataaaaacgtgtgaaatgcttatggggaagctaggggagaatgaaagcagacagtctctgtgtctgtttaacagaaatatcaaacagctgaggcctagaaatgtccgagtcccttaagccctacttaaggagctgagatgaaccagcacccatcaaaggtctaggaatggaataggcagaagggacagatccttgaccggagatgggcaggcaggcctcgacttcagacgcccattgtcttgctgcagctccccagcagctccacgagctcccggactccatccacytccccaagcctgcatgactcctcaccgccgccgctgtccgggcagccctmgctccagccacccgcgtcgccccagctgccccrgtcgctggactcgcggcctcccacgcccccagagcccgatcctggctcccggcgcagcaccaaaatgcaagagaatccggaggcctgggcccaaggcatcgtgcgggaaatccgccagacccgggactcgcagccgctggaatattcgcgcacgtcccccaccgagtggaagtcctccagccagcgcagggggatctaccccgcctccacccagctggaccgcaactctctgtccgagcagcagcagcagcagcgggaggacgaggacgactacgaggctgcctactgggcatccatgaggtcgttctacgagaagaacccgagctgctcgcgcccctggccggtgagccagcccgccgcccctggcagccggggcgcccttccttgcagcctcytccagccgccctcctctccactgcgcagggaggtcctcccgcttctcctccccaaacttcggggagtcccagcctcagctgtctccagcatcccgcttctccaagcaggggcccgctgtcctactctcaccctaccctggaggagccccaaccctgtcctcttcgtggctatgtgactatcctccctttggcgtccctctctgcagcccaaacccaagaacgccatcaccattgctctctcatcctgcgcgctcttcaacatggtggacggcaggaaaatctacgagcaagagggtctggaaaagtacatggartatcagctcaccaatgagaacgtcatcctgaccccgggcccggcgttccgcttcgtcaaggtattctgcaagctgtctttggcccgccaggacactcgatggcgagggagggacccaggccaacccttgggagggcatccaatttcccagatcattcctagcccacccttgtcattcttgtctccttctagctgacccaggtcagtttatgatttcgcacaggcttccagactgtggaggaagggactccagcccacagccctagatttggtatgttagtcttccctaagtgaagtcctaatcatgagacttgtaacagaaacctctctccctcgaaggagtgctaagaagccataatgagtttatgatcctgagtagtagaaataaaacgccatattacagtgaaatgaaattcacgttagctcttctggccccaaacatagcatattaagaaaataaagatgcccttggcacttaggagtgtgactttaatagagaaggtaaggttctctgaacttacactgaaatgtatagcacttacaactttgatctgcttatataaatattacacaataacatcataaccatgcaaaaacaaatgacacctctacaagttgttggtagaatgtacttatgagacacagtaaaagcatgggcaggatacatgttaatacataaagtactctgacagaatatatactaaaattggaacaaaagagagacgatttgcatgacctctgggcaagatgacatgcagattcatgaagcagtccatatttttcaaaataaaaaaaacaatcattagatgatcgataaaagcagattttaaaaatcaaacatagacaaagcataaaagggttagcctgaccctactctctacctgtcccccagagataattctagtgaacccaaagtggaaacaattttcaacaaacattactcatgtattgtgaacattaactgagttcctatgaatgagaggttgataatacagaaatgcatgggataaatcttccttaaaggagccagaatctctcagtgaagattcttcagagcttgaatttgactctgatgagatgcttcctctccggcctccccagatccaccctgcctgcccctctttacacacattcatgtttgtaacctgcaggcactacagtatgtcaatgctagactccgtgatctatatcctgatgaacaggacttatttgatattgtactgatgactaataaccatgcccaagtgggagtgcggcttataaacagcgtcaatcactacggtaagtaaaataaataccatgtggaagaccagctctccgctckgaaagagagaagccatgttattttgctaactgtggcttaaccaaatgcagtgtctttgatactgacacccccttctgcgccaggaatgtttatttgcctatgtcagaacaagagaggccaygttcatttttaacttcagcacagagttgggctcaaagctctggacttaacttgtcaagtgtgaatttcaaagtcttaatcctaggtcctgcaatatatttctctgttgtatgtttttcacttctgaacttgacttcaagaagccgtcaacccaaaggcttttactgtgtgatcaaacttcttgctcaccacagatttgtgttaaaggtttaaaggttttcacctctcctttccactcttaaaatctgattgtccccggctgctctctctccccacacataaaataatttacatagaaaatttgattgattctagtctcttcagtgtttctatcagtgtgttggggactttaagagaaagttccaacttttcctattatggaactacctgaattatttcgggcacaattagcctattttctaaatgggtatgtgaagttaaaataacatttaaattgggcatatttacaaataatcgagatataagttatgagttttactttatattattctaactataaggctggaatcattgaagcacattttaaatttttttgccttttaaaagtgcagtcttcatagtgttatgaagtaaaaagagagaacataaaaatttaacatagatgagtggcatatagcaatcatctagtaaacaacagctagtatttaacaacacatagccttaattgatttagtaggtgattgaggtctatctatccctcaccacgctgacctatcaaggctggaagcataagaaatcagttattcacctgttaattctgctgatgaactgattgtgtacaaccttctcatgcagccttgttcatggaataaaaatcttttgacccagaagagttagttacttccttctctgggtactgaaagcaattcgtatctccgtctgccagggtctttattataacaaatgttttacatgccaggctcctcagtgaactgtgatctccttaagaagagggatgatgctttaatcatttctggagtctcagtgtcaccaaataatttctgggtgatgaaattcatatgatttagggatttgtagaatacacttttgtgccacatatgcccaatattgacataagtgaaaaaatgagagcattttctaataccaaagcagatacttccaccaagacagttaatggacctgacctactctcttggtccatacagatgacaaacaactaactagacacagtattctgctttatatcatgtgcagctacccagtttatcatatatctaaaaaaaaaacctctgaatattttatcatatgaataatcctatactttatataactactgtcacattgttgaacatgttttgcttttataaataaccctaaactgagacctttctgtagaaatcgttatcagaatttcagaatattcctttttttaaaaaaaaggaatcttaggtcaaaaggtacaaacctgttaaaagctcttgatacatattgcatatcatcaaatcactttctagacagcttgtaccaatgtacacttttacccgtagtatatgaaggtgcatattttataaacctcttacaaacagccagtgtttttttgtaattgttactgatttaaaaaagcatttgatgttatattaatgttgaatgaygataattcactgttatatggctaaatcacatgtcatgagggtttggtgtagagattacttcattacctaggtaataagcgtattacccaataggtagtttttcaatcctcatccgcctcccaccctccaccctcaagtaggccctatgtctattgctcccttctttgtgtccatgtgtactcaatgtttagctcccacttataagtgagaacatgtggtatctggttttctgttgctgcattaattcacttaggataatagcctccagctccatccatgttgcttcaaaaaagatgatctcattcttttttatggttgtgttccatggtatatatgcactacattttgtttatccagtctatcatcaatgggcatttaggttgattacatgtctttgctattgtgaatggtcctgcaatgaagatatgtgtgcatatattctttttgttttttttgagacggaattttgctcttgttgcccaggctggagtgcaatagtgctatctcggctcatggcaacctctgcctcccaggttcaagtgattctcctgcctcagcctcccgagtagctgggattacaggcatgtgccaccacgcccgactaattttgtatttttttagtagagacagggtttctccatgttgatctggccagtctcaaactcccgacctcagatgatctgcccgccttggcctcccaaactgctgggattacaggcgtgagccaccatgccctgccatgcatatattcttatggtagaacaatttatattcctctgggtatatacccagcaatgggattgctgggtcaaatgataattctgtttaaaattcgttgagaaatctgcaatctgctttccacaccagctgaactattttacacccccaaaagcagcatataagtgttcgtttttaaccacaacctcaccagcaggtcattttttaactttttaataatagccattctgaccggtatgagatgataatctcattgtggttttgatttgattttctctaatgattagtgaggttaagcatttttttcatacgcttgttggctgcatgtatgtcttcttttgagaagtgtctattcatgtcatttgcccagtttttaatgaggtttgtttctgcttgttaatctgtttaaatacctcacaaattctggatttttgacctttgttaaatgcatagtttgaaaatattttcttccattttataggctgtctgtttactctgttgatagtttcttttgctatgcagaagctctttagtttaattagctcccatttgtcaattttttcttgttgttgcaattgcttttggtgtcttcatcatgaaatctttgccaaagcctgtccagaatggtatttcctaggttttcctctagggcttgggctttgagttttatgtttaagtctttaatccatcttgagttaatttttgtatctggtgaaagaaaggggtcccatttcaatctttggcatatagctagccagttatcccagcaccatttattgaatacagagtcctttccccattgcatgttyttcttgacttggttgaagatcagatggttgtaggtgtgtggctttatttctgggttttctaacctgttccattggtctatgtgtctgtttttataccggcaccatgctgttttagttattgtatctttgtagtatagtttgaagtttggttatataatacttccagctttgttctttttgctaagttttgctttggctattccagctcttttttgattccatgtgaatttccaaatagttttttctaattctgtgaaaaatgtcattggtagtttgataggaatagcattgaatctgtaaattgctttgggcagtatggccattttaacaaaattgattcttcctattcatgatcatgggatgtttttccatttgtttgtgctgtctttgattttttttccgcagtgttttgtaatccttgtagagatttttcacctccatggatagctgtattcctaggtattttatttttgtgtgtggtgattgcaaatgggattgcattcttgatttggcttttagcttgaacattgttggtatatagaaatgctactgattttgcatattaattttgtatcctgaaactgctgaagttattatcagagctaggaactttggggcagaaactatggcattttctaggtgaaaaatcatatcatcttccagtagagataatctgatttcctctctttctattttaatgtcttttgtcattctcttgcctgactgctctggctaggacttcaaggactatgttgaatacaaatggtgagagtgggcatccttgtctgattgcagttcttctagcttttgcccactcagtatgatgttggctctgggtttgtcatagatggctcttattattttgaagtatgttcctttgatgctgagggtttttttggggaggggattaacatgaaaggatgttaaattttattgacagccttttttgcatctattgagattatcatatagtttttacttttagttctgaactaaaagtttaagaacttttagttctttttacttttatttgatgaatcacatttattgatttgtgtatgttgaaccaactatgcatcctaggaataaagcctacttgatcacagtagactagctttttgatgtgctgctggattgggtttggtagtattttgttgaggacttttgcatctgtgttcatcagggatattggcctgaagttttcttttttctgtgtctctgccaggttttggtatcagagttatgttgacctaataaaatgagtcagggaggagtctctcctccataatttttacaatagtttcagtaggattcataccagttcttcttatatgtctggtaaaatttggctgaggatccatctggtccagggctgtttatggttgataggctttttattactgattcaatttagaaacttgttattggtcagttcagggtttcagtttcttcctggttcaatcttgggaggttatatttttctaggaatttatctatttcttctaggttttctagtttctatgcatagaggtgtctgtaacaatctctgaggggtttttgttttgttttactatttctgtggggttggtagtaatgtcacttgtgtcatttctgattgtgtttatttggatttttctctctgtttttctttgttagtctagctagcagtctatcaatcttatttgttctttcaaataacaaacttttggttttttgatcttttgtatattttttcccatctcaatttcattcagttcagctctgattatggttatttcttctgttagctctaaggttagtttttttctttcttttttttttctagtttctctaggtgtgatgttatgttgttaatttgtgatctttctaactttcaatgaaggtgtttcgtgctataaactcccctcttaacagtgttttagctatgtcccagagattctggtatgttgtatctttattatcattagcttcaaatamtttcttgatttctgccttaatttcattgtttacccaaaagtcattcaggagcaggttggttgtttactttccatgtaattgtatggttttgagatagagcctttttttttttttttttttttttgagacagagtcttgctctttcaccaggctggagtgcagtggcgcgatctcgagagccacatcttaatagacctttacagttagtgaggaggctgtagttcaagaaaaagtaccctgttctagcccagacaagagtcaaacacttgggctcaagtctgctctatgcatctaaatcagtgtgttagataagtctttatgtctaactttcctttcctgtaatgaagataataataccttcagtatgtttgtgagaataaaatggcatgatctatgtgaatatactatgcccataaactgtaatgtaccaaatacaaccactattacataaaatagttgaggaattttaaatattggtaccataagatgatttttaaagtttatttctaaggtaactttcctttaggttcacaaataaagccagttgaatttacaaataaactcagttatctctaaggtaacttttacttggatttacggcattttgtctttaatctctgtcataacaaagtctttcttgcctgataataggcttactgattgaccgcttctgtctgaccgggggaaaagaccccattggctatttgaaggcatatcttaccaacttgtatattgctgcagattctgaaaaagtgcaagaggcaatacaagaaggtattagtctgattttattcctctagttaataaagaggtttacactaatggtgacttacattaagtttcgcatatgattatgaggcttatggtcttgttggatattcttctgaagtttttccacatggggcaacacttaagtctgtcctttagagctttgactttcctggaaatggacatcctcagtaattgtcctacaatccatttcacatgttccatccctatagaaacagaggcagtgcatagacaactgttctgaggtctgtggttgtgaagaggagttgagccatcaggtaatagctagagagaaaacataaggtctgggagaatttgttttttttaatggtagaaactataactcatggacctgagaagagtattaatcagtctccatgatctatcaggtattgcctctgcgacaatgtttgatggagccaaagacatggcttactgtgacactcagctccgtgtagcctttgatggggatgctgtcctcttctctgatgagtctgaacattttaccaaggagcatgggctsgacaaattcttccagtatgatacattatgtgaaagtaagcctcttgctcaggtaggttcaatgagtgctaattaatttttatgtacttatttattttctaatatataaatatcaatattggtccattctgatgaatgttyaagttattctaggcagggcactccttcttactgtcttatctttggagctttctctctttctttcatgaatggctcactttgatgcattcactgctgacaactttatttttaattttcacattattttatctatccttttggaaatacttgcatgatcttcccatgataagaagtctgccctctccmaattgggagtaacaggaaatactgcttatcaataagccatttctacataataaattctcaaaatagtagggtcatttccaatagattagagtaagcatttgttgaatctctgtccttgacttcaaactcaagaaaggcatcgcttaattgagaaaatatgcacaactaagaacttgaatcaaataatgatcctcaaacaagtgcaaattatgaatatgtaatcaaactgaaactaaatatttagattgttttggattagtgctgttgagtacctttcaatccatccatgaactgaagtgttaaaatcaaggtcgaaaatgaacagaacctataacttttgaacaaaaggaaatctgaaatcaaaatgtcacttaatctgaatctaaactgataggtcttttaattttattctatcaattttcccaagaaatttaattgttctttttctcagttcttcctgaacttaagttaaacttaaatattgttatttttatataaattcataaaagtatgaatagactaattgaaagttgaaaagtttttctacttagtcacctctcattaaagcaagcaatatttaaactatgggagtgtgtgttcaacttcatattctctttctaaatagctcctttggaaaccctgacctagtgttataaagttctgtattaacaaagcttactattaagaaaattctttgttatattttatatcagtctactctgctgaaattcagagcctttcaccattattgaaatgtggaaatcctccataaaaagaacacttaaacaaaaacacttcaaagaaagcattacttccagacaaatgttaaagtagtattttcccatctgaagtaaataatctaaatttcttttagattttacatttttcagttcttttctcattttgtactttgttctttttttcagctttattgagttatatttaatttttaaaagttgcacatatttaatgtatacattttgatgaatttggacatatacatacactcatgatactgtcactacaaataaggtaataaacacatccagcactctccttgtcttttaaaattttttttgtattgtggtaagaatacttagcatatgatctatccacttaacaagtttttaagtgtacaataccatattgttaactataggcgctacattgtacagcagatctctagaatttattcatcttagcagatcttccaggtctcatccattttgttacaaatggtagtatttccttctttttaaaggctgactaatattatgttgtgtcttatcccacattttctctatccattcccctgatgatggacatttgggttatttccaaatattggccattgtgaataatgctgtagtaaatgctgcagtttacatagctctttcagatcctgctttcatttcttttggatatatactcaacagtgggattactgaatcatttggtagttgttctattcttagtttttggaaaaacttccattctgttttctacagtggctataccatttkacatttctgcccacagtgtataagggttccacattctctacatactcccccagcatttggtatctttgttttgttttgtcttctataataaccatcttgactggtaaaatttgatattggattgtggtttttatttggatttctctgatgattaatgtgttgagtaccttttcatatacccattgacatttgtatgtgttctttagagaaatgtctattcaagtcctttgcccatttttaaccagcttaatttgtttttattttgctgttgagttgtaagaattccttgcatattttggaaattaacccttatcagatgtatagtttgcaaatattttctcccattccatagggtgccttttcactctgttgtttcctttgctttgcagaaactttctagttttatgtattctcacttattttgctccttaaattgcctttttctcccattaaacaattaaaattgtgaatcccaaccctacttattgcaggaatactcaacacatttctagtatacatgctttcctttattatgcagtacttctgccagtttaaaaaacatgccatttttttacatgaaaaagatgattttccataaaggccagaaggccttgctgggtgtgttccactgatgagaaagaatgtatgaggtacaactcctactgaagacattcaagtatgttgctagtagggtgttggtttggtcatgacagtatcttaattttgtcaaatggaagaggtctgaaactcaccagcaaatgggacagctggagaggattaatttaacaagtctgaatgtagtttatgagcctccaatctccaatgtagtacagtgacaagtaactgatatctcctgatttgatccctatctcttgtctcaccattctggaataatggtctctaagtgtgtgtgtgtatgtttgtgtgtgtgtgtgtgtgtatcagaatttttgaggtatatttatatagagtaaaatttataattttaagtggataatttcattttaacaaatatatataattgtgaaataaccactaacataaaaatacatactcaacagtttcgttaaatcactaaattccctcatgcccctttgtagtcatcctagtaccctatctccacaccccatcaaccactgatttctttttctatagttttgccttttccaggtgtcacataaatggaatcatacacgatgcaatctgacttcttttatttatcatagcataatgcatgtcattgcatgtatcagtacttggctcctttttattgctgagtagtattctattctgtggatgtaccacattttctttattcatttacctgttgaaggagtaggtcatttctagtctttgacatttataaatgaagctacttttaaacatttgaatacaaacttctgtgtaaatataagatttcatttcatttttaaatacctagaagtggaattgctaggtcatgtgataaatagtgtatgttttatttgatgagatacagtaaaattattttcccaaacgacataacattttgcatttctaaaagcaatgcatggttttgttgctttgcattgttgctggcctttggtagtattcagtatttttcttttctttctttctttaagcaattttagtgttgataaaaaaattatctcattgtagttttggcttcatttctttaatgacaaatgttactgagcatcttatcagtgcttttttccatcacatatcttctttggtgaagtacctgttcaaatattttccttattttattgggtttttggtttgttatcaacttctgagagttcctcatatgttttggatactcatcctttatcaggtgtgtgttttacaaatatcttctctcagcctgtgcttgtctttcattctaacatctttcagtgcttttcagtgagcagaaacttataattttgatgaagtcagatttatcaattttttctcttagaaattgtgcttttaatgtcatatataagaaatctttgcctaatccaaggccacaaggattatctccagactttttatatagaaattttatggttttaggtttcttacttaggattatcatctattttgagtcaatatggtatttgtgcaaagcacaagttgtggttcatttttcctccttatcctaatttcctggatatcttaattgttcaagcattatttgttgaaaagggtgattttctgccttgttcctttaatacagatattcatccctttatcaatattacattgtcttgattattgtagttttatagtagttcttttttttttttttttttttgacagagtctcgctctgtcgcccagtctggaatgcaatggcatgatctcggctcactgcaaccttcgcctcccgggttcaagagattctcctgcctcagctgcccgagtagctgtgactataggcacccaccaccacacccagttaatttttgtatttttagtagagagtaaaataccatattggccaggctggtctcaaactcctgacccgcctcagcctcccaaagtgctgggattacaggcatgagccactgcacctggctatagtatttcttaggcccaggtggtgtgaatacttcaactttgttaaaattaacatatatatatwtatatatatatatatatatatatatatatatatatmcacacacacagagagaaagagagagagagtacagtctgattcccttgcactttcatatagatttaagaagtttatttctgggggaaaaatttttacaagaattttttatttttattttatttatagctagatcttgggataatagatatcttaacaatattaagtctttctgtccatggacatggtatttctcctctcctcatttatttagatcatttaaattttttttttagtcttttgtaggttttagcacacagatattacatttttttatttatacctatgcattttgtaatattttggtactatcataaatggtactttaaaaatccttactgtccgattatttattgctaatacatagaatcacaattggtttttgtattctgcaaccttgttcaatttccttgttagttctcgcaacaattttgtagattgagattttctaagtcaacaataatgttgactgtgactaaagacagttttatttctgtgtttccatgctgtatatctgttatttatcattcttgcctttttaccttgctagtacatccagtacaatgttcagaacagtgatgagggtggacacccttgccatatacccagatcttagggggacatcaatctttcactcttaactgttatccattgatcttttctagatgccttttgtcaggttgagggagctaccttctctttctagctgtttgggagtttttataataaatgaaggttgaattttgactaatgcctgatttgcatctattgagaaaaaacatgtggtttctcccctttagtctgttgttatgtaaattacattaatggatttgtaaaagctgaggcagctttgcattgttggtattaattcaagttggtcatgtggtattatccttttcatatatcgctgaatccaatttgttaatattttgtattatttattcatttatgtattcatgttcatcctctacagttttcttctcttgtaatatcttaatctgactttagtaacagggtagtactaacctcataaaatgtgatacaaactatttaaaatgtttggtagaatttttcagagacgccatctgagtctggacttttttctttgttggaaggcttttaactactgattcaattattttgatagctatagaacttccatttttctttttcttccttttctcattcttttcttctgtttatgagcttgcatttttcaaggaatttgttcatttaaataactgaatttatggacataaactcttagagtgttttattaatatgtttttaacatttgtaggatccttagtgatgtgtccccacttttatttctgatactagtaatttgtgtcttttcttttttgttgttgtttttcttggtcagtttggccagaagtaaatcaattttcctgagccagctgttcctaagttttcaaatgtggaagctgagactgttaatttgaaacctctcttcttttctaatataagcacttaatgctataaattttcctctaaacacygctgtagttgcatcccacaaattttgatagatgatttttttttatttaattcaaaatatattttttaaatttctctgtaatttcctctttgaaggaaataggttagaagtaggttatttaattatcatatatttggagtttattcagatatctttctattgttgaaacaaagcttaactctgttgtgttgtgattagaaaacatattttgtatctcaattatttaaatttgttgtggtatgttttatgccaagaatatggtctatcttgatgaatatgtcatgtgtatttgaaaagaatattctgttgtcattaagtattctataaatgtcaatyagattatgtaaattaattcaggtcatattgcttgggttttctatattgtcagtaattttctgtctacttgctttatgtactattgagaaggcaatgttgaaatctccaaatatatttgagaatttatctatttatcctttcaattttatcagttttgtatcatgtattttgaatctctgtttttaggtgcctacatatttaggattattatattgtcttaatcttaattaatatcttttcattatgtaatattcatctgatactcatataatcactccagcttttttgggggggctaatgtttgtatgatatgatttttctatacttttatctatgtctttatatttaaattgtgtttatatttaacttatttttcttatagatattacagttggtgctgctattttatacaatctggcaatccctgtgttttaattgctgtttttaggacatttaaatttaatgtgatcattgctttggttggattaaaatctactatcttcctatgttttttctgtgttccaactgttcttagtcccctttttcttttcttttttcccctatttacttacagacttattgtgtgtttttacgttccattttatctccactattggcttatgactcatttaaaattttttattagttacgctagtgtttacaatatacaactttaagtaatcacagtctattgtcaatgttatactctacaacatcatatgtactgtaagaaccttgcaacaacgaactgccaaactctgcctctcatgttttgtgctacagttgtcatatattattttatctattctataaactctctatactttgctactgtgaacctcaaaaatctgaaacaggtctcagttaatttagaaagtttattttgacaaggttgaggatacgcatgcatggcacagcctcaggaggatctgacgacatgtgcccaaggtggtcagagcacagtttggttttattcatttaagggagatatgagatattaatcaacatatgtaacatgaacattggttcggtctggaaaggcaggacagcttgaagcaaaggtaggaagactccaagygggtttgagtttctgattagcctctccaaaggaggcaatcagatatgtagttatctcagtgagcataggggtgactttgaatagaatgggaggcaggttgtctctaagctgttacaggcttgacttttccctttagcttagtgacctggggactgcaacatttatttttcttttccactactatttctgtttttggcaattaaataccgtctagtaaataaggatgaggcaaaaatatgtatttcatattcaaattccttttaatcattttcagagatcttcctttctttgtgtagatcaggtttttctctgttatcatattccttctgccaggagatcttttgttttattttgttttgtttaacatttcatgtcgtacaaatctactggtactgaatctctgtttttctttgcctaaaaagttttaatcttatttagtttttaaaacaatattttatttttactgaatgtagtattctgggtttactgtgtgtttctcccagcactttaaagatgctcttccattgtcttctcatttgtatagattttgatgacaaatgttatgaattttgtatctttggtccttagtatgtaatgtgtctgtttttgtctggctgccttcataattgtctatatttcctttggtttgaatatgagaggggagtgtgtgtgtgtgtgtgtgtgtgtgtgtgtgtgtgtgtgtgtgtcccacagcatttcaatgctctgctcttttttccccactctttttttctctttctcttttcagtttgggcaatttctattgacctgtcttcaagttcactcattatttcttcagctgtgttgagtctactgacacatccattaggcactctttatatagttccattcaactcttttcatttcaatctctttgccaaaattgctagtctactcatgtatggtatccacctttaaagtagacatttaaagatattaatcacagttattttcaattccctctgttatatttgtgacacttgggtcattactaagtctagttcttttaatttctcctaaaagtagattgttcattttgttttgttctgttttactgtgggactagcaattattgtgatagattgaatcaatcaaatcaggtattaaagttgttttaggttttgtggttgctatggttatcttcatggcaccacaggatccaagtttgtctggtatcaactttgttcttagggtgcaaactggcttaccagagggtttttctcaagatttctagtcgactttcagcagcaggccttccctgtgtgtctgctgcagagaaggtctcctcattcttaccccttcccagctatttcttctatcttcctagggcttagggatgaacatcctggatcttgccatgccccagtgatagccaatatctaatggtaccaatccttgatagtctcttattctcccaaagttagaatgttttcttctgtaacagtggatctttactcatgccctggaggataacagtgtttgaagctcttctagcagtctaggctctttgttcctgagggtataagcaactagggggagttttagtctttgcccccagtggcagctgctcccctcctccacacctgtaccatcaaggatggctttattctatcaccccactgcctgcagtctttgtcatcagcatctagtgaagtccatggagaaaagcctaaaagagagtgtgtacttcttgtgcctgtggatcctagggcttctatgctctctcattggtggaccctagttctttgtcaatgtctttttgaaattacttgaattgcttgtacttgcttgtatggaagctggtataactttcttcaacactctaccaaaagtacacagttcttgcactccatgtcttcttgaagatgactgtttttccctagttttcatgctaggtggttaccctgcaatctcagctctttgatgggctcaagaaaagttattttttagattggagttttcttgttattagggtgggagtaacagtctctccctagtatttgctttttgtaagcttccctagtattgttatatttttattgataaattatatgctgtactactgtgcaaatgtataaattataaaacataccccaatatagaagtaaaagagaatgagatgggtacttggtttgaatgtggtgacataactcagcattctctgtttcttccatttggaaatcatccaaaaacagcaagggaaactgtgcccctctgtgttttaaagactaactgcaatgagggtggttcctgccaacagtcactatgagttttctgcttttgtcataaaaacagtcccagttttttcacctatatgtatggcctcttaccgtgagaaagcaaatttacttgtttttttctaagatatacaaccttaaagaaaatttaagcaaatggttacacaataagtcatgtttacagaaaactgtttgtttccatgacagcaaagaagggagcctttgaatcatgaaaacaagtcagtctccaaatactacccttgaccttcccctagaaacccaccaattatcccaagaaaaaccagtctacttcagtataagtaataataaaaagagagctgacattgaatacattcaaagatactatgagaaaaaggcagattaaaaaagaaaaaaatctaataacagatgaagagctcttacaagaaaaagttgacataatacagataattatgactgaacatttgccatgacttttaaagacttaaagcaagatcataaagtaaaaatgcaatagtcaaggaagacatgataaaatgtgaaagttatagaatgctgtaaatctttcgtcccttccaatagagttattacccatctgttactgttaaaaatacaattacatatagaaaaatgacagaaatagataacaggtaaagaagacccagcatatgcctaagtagaatccctgaagaaaaactttaaaatcatgttgggggagggggactgatgttaaatataaagatgcaaattaatgtaaaaatataaattaaaaactgctaaattatcaaagatgtttatatatattaaatgattaaaatattaaagattaaaagcccatattgtatgacagaggtatagaatcaaaatgaccatcactgagacatggcctagtgaaattactgggcttcaaaatgaagaaataattatctgggctgcctactcatgtaagtgatggaagaggtggcatggcaatcaagaggccctcaaacttctcaagagcagcattcaaaagcaaaagacagtggagcactacttataagatcttgtggagaatcttatatgtaaatcatggattctatatctagccaaaagtttattcaaggacagaggaaatagatatatagttgagaatatactatattctcagggattattaccataagatgtttttgagaaaatcagtactacaggacaaatttcggccaacatgcagaggactagaagcacaaaggcacaaatggtcatataatatacttaaccatagaattaaaactaaaacaaccgtacaaatgaacaaatttgtatgatgtacaaattatgtaactaacaaaaaatggaaaaatatggggaaagaaggtctacggaagaagtatgctggaattttcagttacaatagccaatcaaaggatgaaatgtaaacttgataaacagaaataaaacaaaatgtaataatgcaaaagaaacaccaaggaaaagtaaataaatgactaaaattagatggtggagaagaaatagaggactacagagacattgaagaaatgccctgctttcattatttctcattatgaagaataatagatctgggattctttttaaaatagaggactgagggtactataaaaggttatagttgtaaaggtaatttatagaaggaaataatgtaaaccttcttaaatgtcagaagaaccacccacacacaactacaaagaagaaagacacagattattgaacaatcctttaaaaattttaaaacatggaaaatgcaataaaaaccataagacagaaacaatctcaagtatgtttgtaatatgaataaatgtaaatgaacaaaaacttaactattgttttaaaaaataagattttcaggttgtatcacatagcaaaatccaattctaggctctgtacaagagatactaaaaccaagtgtttggaaaggttaaaaatgaaagacacagttagattcaagccaaacagcattaaactagacaaaagcatatacttcataaagttaaaatgcacaattcacaaaaagcaaattaaaagagtagtgctttggtaactaattagagtttatttagagtgaccctctattccagcttaccatggatagtttatgtctgttgtcctggcttaagtatttattgaacattctttcatacctaaagtatataggtttacatgttaaataatatggtcattttaggcacattccaggaatgcaaggatggttctatatcagaaaacatattcacataaattcctatcaagttttagcattttgccatcagcttcataacactgcatgtcatgctgtattatatcctttgtattgtatcrtatcatataggtctctgctttttagcattcactttctttggctcactgtatcacagctgtgatatatgttccttttacagggtcccctaaaaggctttctggaagatttaggcagactgcaaaagaagttctatgccaaaaatgaacggttactttgtcctatcaggacctacctggttacagctaggagtgcagccagttcaggcgcccgtgtgctgaagacccttcgacgctggggtctagagatagacgaagctcttttccttgctggagcccccaaaagtcccatcttggtgaagatccggccccacatcttctttgatgaccacatgttccacattgaaggggcacagaggttaggttccatcgcagcttatggctttaataaaaaattcagtagttaggggcagggaggagaaataaagtggtgrtagtctggtgttacagaagccacttcttttggctctctaggataattagataggtatttcagaaaattggaccttaaaactttgcttctttggaaaggttttctcctgattttttggaaaaccttttgaaccctcaagttaccatcaaactacttctctttgaactaccaatactgttgaatgccattacacctatctctgtgtaagtcataatgatgactctttaggataagtttagaacttgaatatttgcatgcttaaggcactgttttagaarcttacttagttttataaacactgctcatttttggatgtttgtagataacaatgaattgttacccatcagcattgtagaatagtgtcttcaaaggtagaaggagtatggttaagcacactcttgaaaactggagctttgtattctgtgactgctatggctagctttgtaaccaaagcaaaatgagaatttcactctacctgcatgagtataacaattttgatactgctcatttagaaataaatcatctggttgttcctccagggtactttctaagataagccttaaacagaaacccctaagaaaggttctctgaaaattatttggtgggttaaatgcctctgatccacagagtttcatatttgaagtctccggctttgggcctggcaggctggcacatccatatttgtatggaaaaaaaaaaaaaagaccctacgctaccacttcaaaaagtgacatgaagtgtagtatcctggcccttcattgtcattctctcatgatttttgttttgttttcaacaaaaattggttggtcattaaatatatcatatgttaggcacagtgacctggttattttcacatgttacttcattttcttatcaaattaaatgtttgtgacatagtattattattaccttcctttttatcaatgaggagcctaagattcaaaaagattagacagcttgtttaaggatatggagctaataagtgttaagactaattagattcaaattcaaatcttacttcataagttataatgaggtctctttcctcccttccaaatagagttattaatttcatggcctttggacccatctggtacagattaatcatttcattaagttccatgcataaactacacagcagttacactgcaggtctaaggattcctccctcctcttttcctcctaccctctcctgctctctctacctccaccttcatctctactccacctgtacatatgtattccacccctggctctagatgagagaagaccacagctgaaacacatcttctgatgctccctaattttatgtaaaccagtccaaaatatatcagttgtgacatgtgacactgagtacctaccattttgtaggtgtcctcccatgcaaagaccacaagaggtacgcagacacaatcctatcctctaggaaacttgaaaccttaacaatctggtcaaggaagtcaaatgtgcaaactcaaacagccaatactagaaggctgtttgtcttcagtgccagtgagggtcacacatgaccctgagggtcacacatgaagggagcagagatctttataggctggaagtggtcaggaaagaaagacttgaggtagcctgtgattttgatggatgggcaagatgtggatgggtagaaaggacaataaagtggaaacatatgctgggggatcaatgagtttgagtagcagcttcaaattggggatagggtggtgtaggaccacctctcatgattcctgttcctggtgccttgtataatccccagtaagagtgctctttcccacctctgagctccattctcattactcataagaaacctcctggaatccatccctttttctttgtattctgactattagttgcatgttacatccttcccaaatgtaagggagtggaagatggattatcacaattattggggagtttgtctcaaacgacacaagctgtggttctttttccttgtctggagaacctgcaatgggtggagggtgggaagtgggagatcacagttccagaaagtaagcaccctgagagcagaaatggtgtcccatttctctgtggctctaacagggaacaggcagggccaggcacatattggatggagaggcagacgaacgaatgagtctttaaaagtagcttggtctacagctatgaagtttgtagcttgaagaagggtccctgtgacactaaccctgatattaatgaggcattttacagtgagccaagcactttgccttccatcgttgtgtgtaatagtcctatggagagggcagggaggcatttgtaaatggcctgctcagaagcctatatttacaataagtccaagcttttcccactgtacctctgccagtgtgaagatcatttgaagatggctttcttttttttaatagggaccaatgacataatgtcttgttcagtggttctcaaagtgtggttcccagatctgcagcagcagcagcacctggaaacttgttaaaagtgcaaattatcaggccccatcctgtacctattgaattagaaactctaatactggggccctggttttttgttttcgttttgtttcattcccccaccccgaacccccaccccaagtcctccaggtgattctgatgtgcatttaagtttgagaactactcgaccattctatttccaactgattcatgttgcttaattctttgtctcatctatgaaaaacagtcctacctcagacttcagcttgtcagggcccattcctcagaaggtgaattgaactgaatttacaagtcccaagagccctcaaaggaaaacacacgaaatgccctgaggagtggcatttgtaacagggcctgtacagagatctgtgattcaaagtactcatcagacattcccatggggaagtccgccactactctgggatttcaatacgtatgaaccccagcaccctgaacactgtgctggttgcccagcctccatcattaggctgggaggagcttccacggagggcgcaggacccagggcgctgaactctcacaaccaatcaggcgacccccccagagggaaactacaagtcccagcatgccccacgcgcaccgtcaggggccgacccgccgcgccccagcgttctccgcgtacaggtggtctcttgggttccggtaaggcggcggctgcggaactcccgtggaggggccggtgggccctcgggcctgacgatggcagtggccactgcggcggcagtactggccgctctgggcggggcgctgtggctggcggcccgccggttcgtggggcccagggtccagcggctgcgcagaggcggggaccccggcctcatgcacgggaagactgtgctgatcaccggggcgaacagcggcctgggccgcgccacggccgccgagctactgcgcctgggagcgcgggtgatcatgggctgccgggaccgcgcgcgcgccgaggaggcggcgggtcagctccgccgcgagctccgccaggccgcggagtgcggcccagagcctggcgtcagcggggtgggcgagctcatagtccgggagctggacctcgcctcgctgcgctcggtgcgcgccttctgccaggaaatgctccaggtgtgggcctcggggggccgggctggtggggagggcctgggcacggtgtgggaggggactgcgggctggggctgagccgcgagggaccgccctggggttcagggtgtcaccttgggaaccgctgaggctgagaggagtccaaaaagccactttgaggcggccgggaagctgcagggttgagagggaaagagaaactaactgggagggctgccttctgtcctctaaggatgtcgaaaaagaaatgggcccaagagaaaaataaataaaccagtttctgaacgtttcatttcgttacgtgaggaccgccccgaagtagatccatggcctctgaattgtttttcctgtgtcagaagtgaatttgcaccaagctgtgtcttcagaacccctgagcactgggggaagttgctagctaaggacctcatatcagtcctttaaaaaaagttctccttcccccggcctctgccccttttctgctggggtaaggagctcgctgccaccagtaaactcagcaccatccttaacgggactgtggcctgatttccaagtagaatacattttggaacccagtggtcatgctccatacagagacaggaataaaaataacacccagcattattgaagatctgtatgccaggagctgtgccaagcatttcagattttcctttttgtcttaaatgaaaatgaagtgtccttgcctataactgtcattgaagctacacagtaaccctgtggagtaggcattattatcatccctgttttacaacgcgaggaaactgaggcataggaaggctaagaaacttgcttgtggtctgtctccagaacacttgcttttaacccttgttctttcctcctgctgcctggcagtgaggtgtgaggatttctttgtgcaaatggtaagtaattccacataagtggatgttctccgttgagattgaggtagaagagtttcttgcagggataactggcattcagagggcatttgttcagaagagtgaaatttaaaattagctgggacaagaaaggtgcctatatgacgtagagtctcttgagtctagagaagaggttcccaaattttctcagtaattttttcatgatgcccttaggccagaaatatttcccagttcatttatttagaaagtttattttgccaaggttaaggatgcacccgtggcagaacctcaggcggtcctgaggacatgtgcccaaggtggtcggggcacagcttggttttatacattttagggagacatgagacatcaatcacatatgtaaggtatacattggttctcctggaaaagtgggacaactcgaagtgggggcttccaggtcataggtagatgggagacaaaaggttgcattcttttgggtctttgattagccttttactgaatacaatttacatgtgcaggagggatagaggaataatcacttatgtcttagactggctcagtgagtctgcattttcacataaacaatacggcagagtcagcaatcagataagcatttatctcaggtgagcagaaggatgactttagagttctgtcttttgtttggcacttgtgaagatgagctatcaatttatgaatacattgccagggtgaaattcaacagaagtgttttagggtaaagatcttgaggcccatgtgggcaaattatgagggtgatatgtagcttctttttctttgtagctatcttatttaggaataaaatgggaggcaggtttgtctgaggcagttcccagcttgactttaacctttgacttagtgattttgggttctgagatttattttcctttgacacaacctaataagtagttatgtcctaacaacttagtagctatttgagaagataacataattgaaagaaaaaaataatatgtttattttgttcttaaacagccataactactaatgggaaatgtatctctgttggtcattacaccagtgtctgaaaccttggaatcagattggacacttccaccctcatttcctgttctaggtagatttttagcattgttcttgttttttattacagcaactgctaacagctgcttaaaagtcagctccacaaagaaataatgtcattgaaaggaatatagcacaatgtaatgttcaagctgtgaaccacctggagctagtagttttgaggtattgagcaaatatcactgtgtttccctcgaaaatttaaaatattccacaacaccctgagagtttgctgcaatgctgtaggccacagttcgggagctgttgcagaactagagagttggttttttgtttattgctagtatttaattatgtgtaacacaggttaagaaataatactcatcagtgagattttggaagcattaaagatggatctttctgttcctctttaaaatatagatggggctgggtttgcttctttggcacttgaggcagaactaattaaaaagtgaggacacaaagagataattaagttgtccttgcttctaagtaagtatttctgttcctgcctggctctgaagttaagtgactataattagaaggaaaaaaaaatggaaatgtagatttcccacaggttggtattcttggtatttatttcatttatctcgtagaatttaaaaaaatagtaaatgacaaaattttaaaataacacaagcccagcaaagaatgctggataacaaatgattaattcaggaaaatcttccaaaggatttgtgaaaaagaatactcctttctttcccccatgagtgaactcttgccttctttttgaagttgactattggaaaacccaaagatgcttagacagggcagaatgagaaatagttaatcctctgacaggtgggcttcgataacagttgtgaaatgtaacacatttttcttttcacttatagttggcagaagggccagtgaaatttgaaagttgacctcatattaatcatgggtcatcacagtgtctttacacttggaacatgttgtgcatttctttgtccatcaaaagaaacagaacaaccgagaaaaggctagagaagaccatcttacatgatttaaggaataaaaagacttccctatgagaacagtctaaattttaggactttaatttggaaagatacagaagcataagttcagagtataaaatgttgactgtacagatctcctagagtcccctttacgctggatatttttatattacctgattatttttttcttaatctttgattattctttatgaatctcgatttattcatgatgttctctccagt

SEQ ID NO: 97969 - DNA, 32103 bp, Homo sapiens
  misc_feature (1)...(32103): n = A,T,C or G
ttttgagacagagtctcactctgtcgcccaggctggagtgcagtgacacaatttcggctcactgcaatctccacctccctgcaatctctgtctcgtgggttcaagcgattctcctgcctcagcctcccaagtagctgggattatgggcgcctgccaccacgcccggctaatttttttgcatttttagtacagatggggtttcactttgttacccaggctggtctcaaactcctgacctcaggtgatccacccacctcggcctcccaaagtgctgggattggattacaagtgtgagccaccacggccggccagaaacagggtgtttctgtttacaagaacatatcttaaaaccatatgtgtgcctcttaataattttcataatttttttaacttttgagaaagtttttttttttttttttaagacggaatctcactctgtcgcccaggctggagtgcaatggcatggtctccactcactgcaacctccacctcccaggttcaagtgattctcctgcctcagcctcctgactagctgggattacaggggcgtgccaccacgcctggctaacttttgtacttttagtagagatggggtttcaccatgttggtcaggctggtctcgaactcttgacctcatgatctgcccgcctctagagaaagtttttaaaattgcaaatatcttgctttgaagaaacagttatctcaaaaaggaaatagctatcttcagtttttgcttaactttttcttgtatgaatttaagtaaaattaaatcaatacattttcatttaaagaaactgacatgaaatgcaaaaaaaaggaagccacctgacttgtggctccacacaacaaactgactagcatggacccatctcctgttgtaacacagaatttgctggataaaacatcacctgaggccaggcgcggtggctcacgcctgtaatcccagcagtttgggaagccgaggtgggcagatcacaaggtcaggagttcaagaccagcctgaccaatatggtgaaacctcgtctctactaaaaatacaaaaattagccggacgtggtgccgtgtgcctgtagtcccagcaactcaggaggctaaggcagaagaatcacttgaatccgggaggcagggggtgcagtgagccgagatcatgccactgcactccagcctgggcgacagagcaagactccgtctcaaaaataaataaaaataaataaataaataaatatcacttgaaattgtctcaacagcagatgttgtgtatcatcagcagccacagcagctctggggtgtctaggggtgtcccatctggcattagaagcccccagctcttgcacccacactggtaaggggatattccagcctcaagctcccagccagagtcactgtgtgttgcttacagcctgaagaaattaacaggatacaccaagcttcaccctcaggaaacaggaaaagcagaaccagagggcaaccgagtgagacgtggactagagctccactaacatctggacctccttgccccgcgccacaccaaggggcctactgggcgccacaggctaggcagggagcgcttctgttcctagtgctccccacgatgccccggaagttcagggaggtaagaagcgtaaggtcagagaactggagccagctgtcaactgcccccgccccacccaggccatttggcttctgctaccggcatgctgctcagggctctgcccaaggacaacgacgagccccctgtgtcctctcctgggtcatcttccatgaccctgaggcagcgaagacaagctcggcagctccctgagctgcttcacaccaactacctatgagtctgaggccagcatccaggcgctgcccagaccctgagagtccctggaccatgacgtagcctgtgtgtgaagggagcaagacagccttgacagaagcacagagaacgccactgggattcttaaagacgcgaagggaaaagggtaccttcaagaaaaagcaggacagcgtagccacaccacctctccccatctgggaattctccaggtccaagtcttgtacttaattctaattctgctcatcatgtttccctccccacccctatccccaacagcacagaagatgctggcgctgcatctcctccagcaccgagaggcctcgaggccccagggagcggaggcagggttcaggcacagccgcgggaacgcccacacccagtcctgccacaccgtaaaacatgtctgcggcatcaacctcacgcaggcctggcggacctgaagactgcgacacggacactcaagcccgcggctctccggcctgggctcagggcggggggaaggagagggaaccaggggtacccacacggcgctcctcagggagaagaccccaggctcgggcccgaggcgggctcgctggagagacgccgcagcctcgcgggggcggccgtggctgcgtccgggagactgactagccaaggccccgctcctggacgccctagcggggcgggcagcggcctgcggaccccgcccggccctctcggcggactgtgccctggcaaggcggccgggctccggagccagccggggctgcggctaaggcgttgcccgcccccgtccggaacgcgccactcacccggcgcgggcggggagaggacggcgcgagcccgaccctgcagccgctgactggaccccgccggcgcgggccccacagatcagccgacaaagcctgcaccgccgccagcccgccgcgaccggaagtcgcgagaggccccgcctgggaaacttcctgcgccgttctaggagcgccagggatcggctcccctctcagtggtgcggacttccgggcccggggactaagacccccggaggggccaggggtgtccggcaggagcggcgttgctacgcggttgggagggttgcgggccgggaagcgcgggctcggaaactcgggtctggagctcgcggcgaggtccgaccgcagcccaagaccagcttctcaggaggcgaggatccaggggaagtaaataccgtgagggccaaacttcacctctctgcgccccagagaagtggggaagcggcgcgctgtggagttttttggttttcgggttttggtttttttaagacagggtctcgctctgtcgcccaggctgcagtgcagtggcgcgatctcggctcactgcagccccgacctcccgggctcaggtggtcctcccatctcggcctcccaaagtgctgggaccagaggcgcgcgccaccgcgccggctcattgattcttggtagacattactcattgctagaatgagtcacagtccgaaataatcgaaataattacattcccctgccccccccccccaccaaaaaaacattatattcgtattttgggttttctttttccatttttctgctagcactgaggaaacttgtttacctaaattgttagataggattgggaggaattttgttttagcaatgacgctcaatttatttttatttttattttttgagatggactctcgctctgtcaccaggctggagtgctggaatgcagtggcgtgatctctgctcactgcaacctacggctccctgattcaagcgattctcctgcctcggcctctggagtagctgggattacaggcatgcgccaccacgcacagctaatttttgtatttttagtagagacagagtttcaccttgttggccaggatggtcttgatctcctgacctcgtgatccacccgccttggcctcccaaagtgctgggattacaggcgtgaaccgctgtgcccagccgacactcaatttctttagctctttctgacttatatgcaaaaaacataacagcagtttatcaccaagtgtacttaatgacctgtcagttgaccacttgaataggtcctttttaaattttgacagaagcaaacaaagaattagaagtaacctaaagtgcaaaactacatgaagtctttcccagccaataaattcacctactttcttaaaatcaactgcagagttttgaattgtccctttgatgaggaggacagcccaggtaccaaggccaggtaccagggtgaataaaggaagagaagcaacgtgggagaaggagctgtggccaagggggacacgctaggcgcgtgccctcatccaaggaccttctacaggaattccagggcagaatccatgtggaactcctgctgtgattctccaggggctccccggctcttggaaaggcttctgtgttccaggggtgtgtgtgaaagccctacattgagcgaccccacctttcatccaggcccggagaccttggctgctgcaaccctattgccagcttaccatgggacccagctcttaaggcgagaagggcttgaggcctcttccccacagggcttacagacctttcagcctccctgtccgcaggcccaaagagcttgagaacaccgcctgagcaggttgtcacagatcaaaatctgccttgtacacctgacgcctgccacttcaaccccaccaacagctaacacatggctgcagcttggcacttaatacttttttttttttttttttttttgagacagagtctctctctgtcacccaggctggagtgcagtggcgcgatctcggctcactgcaagctctgcctcccgggtttatgccattctcctgcctcagcctcccgagtagctgggactacaggcacccgccaccacgcccggctaattttttgttttttagtggagacagggtttcaccatgttagccaggatgttctcgatctcctgacctcgtgatccacccgcctcagccttccaaagtgctgggattacaggcctgagccaccatgcccggctggcacttaatactttgagtttacttgtttggtactgattgtccctgccagtagaaaggaagctccgtaaggtcagggacccccgtctcgttccatgtctagcccagtgcctggcccatgtggacctcagcaactgtggtggatgctgcgatgagaggccccgggagacccctccagtgacaggctgggtgtcccagttgttcagggtgtggtaagcggccttcagccatcagctgcaactcgccagggtcacacccttccctgggacagcccacattgcaaagtcctggacatcctggtccaaccgaggacagccctgaggaccacttctgtggcagagctccctgtgggggaccagtagccgctgtgcttgatggcatcacagccccactcctgcctcttgtgtcttcccctccacaggtccaacaccactccgtgaaagtctgctccccacctaggagccccctcgagccacagcagccttgccaggtgacttctaatattatctccattttatagatgaggaaacagaaatagggaagccaaatggctcacctaaggtatcagccaggacatgctggaggaggcctcagatgtagccatctgcctccaaagcccttgacctagagcaagtacaatgccaaaaccaaggagtgtggctggaaggcaaaaggcccgaggggaggctgccatgcaagatgaggctggcgctgttgccataaccagagctcaagaaaggaaagctgtccaaagaaactgcattcagccagaaagggaatttatagggatttgaggggacggagccattctgaagacaaagcagaaattctgataaaagatcccaaaacatagtttcaagctatctgggatgtggggtttaggaaaacaggccatgggtggtcttggtacgggagcaagcacaaaactgtctgggaaatgtccctgaggaaggccactgtgtcttcgggccatgagcagagctttcctgctttgggcgaatggagtctggggacaagttgatgacaatggagggctgaagacagcttgggaattagtctttccgagataactactgggtggggcagattgtgtggtcccggtccaagccacacaggaagcccacactggcttctgagcaggagtgtaacaaaagccagatgacactggaaagacacgttggctgcgtggtgaccacagaggacagggtgaggacggtggcaatggcagccacacagcagagcacctggggtgagactggaccragccaggaagaggcagggactggctctgaaggccgagggagggttcacaggagggtggggagtgggcaggaagctgacatccatggtgacgcagggtggggcaggtgggagaaaggtgaaagaagaacagaaggtcactttgggatgtaagtttgagaccttgctgctaagtgaggccaaaaaattaaaagatttttaaaatctgctggtagctggagaaggacccgagacgtgcagatgggagttgtggcagtagtggccatcttgagggacagacaccgggagaaaacgagtgatgcgtgcaaggaggggcatcgctgagcccacacaagactcaagatggatgagacagaggcggcctcaggtgcctgcaggtggagagagaaggtaggggtggcctggaggcaggtctcttctgagtatcacaaagcacatccaaaagtaaatgatgccgggtgtggtggctctcgcctgtaatcccagcactttgggaggctgaggtgggtggatcagctggaccaacatgatgaaacctcgtctctactaaaaatacaaaaattagctgggtgtggtggcacgcgcctgtaatcccagctacttgggaggctgaggtaggataattgcttgaacctggaaggtggaggttgcagtgagccaagatcatgccattgcactacagcctgggcaacaagagtggaactctgtctctaaaaaagaaaaaaagaaaatgaggtaggaggtggagctcaactccggaggcagggcttggacatgggaccaaactgaggactagctaaaacaggtccagggcagaagagcctcctgtaaggcacacccaccagtgtgccatatcagtttaccattgccatggcaacaccggaagctaccgcctctttccatggcaacaaacagacaatgcagaacttaccaagctaattctagaaatttctttttttttttttttttttttgagacaggttctcactctgttgcccaggctggagtgcaatggcgtgatctcggctcactgcagcctctgcccccagggttcaagtgattctcctgcctcagcttcctaagtagtgggaccacaggcgtgcgctaccacacctggttaatatttgtatttttagtagagatgggtttcaccatgttggtcaggctggtctcgaacccctgacctcaggtgatctgcctgccttggcctcccaaagtgctgggattacaggcatgagccacctcacctggcctaattctagaaatttctgcataagctaccccttaatttgcatatgattaaaagtggatatacatgtgactgcagaagtgcctctgagctgcttccctgggctcactgcctatggggtagccctgtctgcaaggagcagtccctctgctgctgctgtacacgccacttcaatcaaaggtgctttgaacaccataggctcgctcttgaattctttcctgggcaaagccaagaaccctcgtgggctaagccacaattttggggctcgcctgcccttcctcaaaaatatttttttaaaagatctctggccgggcgcggtggctcacacctgtaatcctagcactttgggaggctgaggtgggcggatcacctgaggtcaggagttcaagaccagcctggctaacatggtgaaacccatctcttctaaaaatacaaaattagctgggtgtggtggcgcgcgcctataatcccagctacttgggaggctggggcaggagaatcgcttgaacccaggaggcagaggttgcagtgagacaagatcacaccattgcactccagcctgggcaacagagtgagactccatatccaaaaaaaaaaaaaaaaaaaaaaaactctatggttaaaagtcagcttaactgaaagctgaggttcaagctcctccctcctctgctgtcttggtatcacaagatgtccagtgtctcagaccccttaaggaacacagaaaaaggtggcactcacacccttttgggtcgtcctgtggaggctgaagagtcatggacagggtcctctcaggtctaaaactctgctctctttgtattgtatcacctgatctctttggctttggggggcaccagagattactttgttttttgttttttgttttttttatttatttattttttttattttttattttttgagatggagtctggctctgttgcccaggctagagtgcaatggcacggtctcagctcactgcaccctccacctcccgggttcaagcgattctcccacctcagtctcctgagtagctgggattacaggcaaccacgaccacgccaggctactttttgtatttttgtagagacggggtttcaccatgttagccaggctggtcttgaactcctgacctcagttgatccaccagcctcgacctcccaaagtgctaggattacagctgtgaaccactgcacctggccaccagagattactttgtactgtgagacactatgtgcttttgcgtgtgtgatggctagttagtcataggtgagagctgcagttttggaggtggctgacagcagtggtctgcagtgagtgttaattacacagggggctgtgcagttttggaggtggccaacagcagtggttcacagtgagtgtgtgtgtgtgtgtgtgtgtgtgtgtgtgtgttgttttgttttgtttgagacggagtctcgctgtgtcgcccaggctggagtgcagtggcacgatctcagctcactgcaacctctgcctcaggttcaagcaattctcctgtctcagcctcccgagtaactgggactacaggcacccaccaccacgccagctaatttttgtatttttattagagacggggtttcaccatattggtcaggctggtctcgaactcctgacctcaggtgatctaccagtctcggcctcccaaagtgctgggattacaggcatgagccactgcacctggcgtctcgttccgttgcccaggctggagtgcagtagtgtgatcttggctcactgcaacctccgcctcccaggttcaagcaattctcctacctcagtctccggagaagctaggattacaggcgccttccaccatacccggctaattttgttatatttttggtagaggctgggtttcaccatgttgcccagggtggtctcgaactcctgaccttgtgaaccacccacctcagcctcccaaagtgttgggattacaggcatgagccaccacacctggccaattttttttcttttacataggagaattttgtgtggtcaaaataatgggggaaggaaaacaattttggtcctagtacagaatgccaatataaaaaggaagtataggctaaaactggaggggtagtgagttgtgcaaggtttgtggaagatgaatcttgtggaaagaattttctggctgggctcagtggctcacacctgtaatcccagcactttgggaggccaaggtgggaggactgcttgagctcaggacttcaagataagcctgggcaacatagcaagacctcatctctactaaaaatccaaagaattagccaggtgtggtggcacatacctgtagtcctagctactcaaaaggctgcggcgggaggattgcttgaacctaggagtacaaggctgcagtgagccacgttcacgccactgtactccagcctgggcgacagagtgagccacgttcacgccactgtactccagcctgggcgacagagtgagccacgttcacgccactgtactccagcctgggcgacagagtgagccacgttcacgccactgtactccagcctgggcgacagagtgagccacgttcacgccactgtactccagcctgggcgacagagtgagccacgttcacgccactgtactccagcctgggcgacacagtgagccacgttcacgccactgtactccagcctgggcgacacagtgagccacgttcacgccactgtactccagcctgggccacagagtgagaccttgtcccaaaaaaaataagacgccaacatgggtgaaaccccttatctactaaaaatacaaaaattagccgggcatgatggtgcaccctgtaatcccagctactcgggaggctgagacaagagaatcgcttgaacctgagaggcggagattacagtgagctgagatcgcgccactgcactccagcctggcgacagagcaagactccatctcaaaaaaagaaaagaaaagaaaagaaaaaagtgtgtgtgatcaagatggctaaaattagaaggggatcatttagttttactaaaaattgagcattaatatacaaagcacacagatgcagagccagagtctgggccctgtgttggaataacagagttttcctggagcattgatccgctctttaatagaaagttgtaaaaggttataaaatgtttttggaaatcttatcttctgtgataaaaactgaaatcggatagatatgtttataaagttatattaaaattaactttaggggccgggcacgatagctcacacctgtaatcccagcactttgggaggccaaggtgggyggatcacctgaggtcaggagttcgagaccagcctggccaacatggtgaaaccctgtctctactaaaaatacaaaaattagccaggcattaaggcaggcacatgtaatcccagctactcgggaggctgaggcaggagaatcacttgaacccaggaggtggaggttgcagtgagccgcgatcatgccactgcactccagcttgagtgacagagtaagactctgtctcaaaaaaaaaaaaaaattaactttagtattagtagtatactgatgcaaagataaaaattggttttctctttagagaaagattattggaggtattaataagaaatcatttaaaatggtttacctttggagtaaaaaaacagagggactgggcacagaggctcacgcctgtaatcccagcaccttgggaggccaaggcaggcagatcacttgaggtcaggagtttgagaccagcctggccaacatggtgaagccctgtctctactaaaaatacaaaaattagctgggcatggtgccagggcctgcaatcccagctacttgggaagctgaggcaggagaattgcttgaacccaggaggcagaggttgcagtgagccgagatggtgccactgcactccagcctcggccacagagagagactccatctcaaaaacaaaaaagttaattaattaaattaaaatttaaaaatacaaaaaatgccatgtaatacatcgactctcctgaagttgcctacatccccctgcatctcccctgtgctgagagtgtcagagcttctagatctccctgggtttagtgtagatatttacttttctttcctgggatggccctgtgcatggaagatatttgtccaccttttctcctgttcatctgcctgtggtcaattgatccacaggctcaggtatcaaatgctcagagggtggaggggaagttctccgtccccgtcagggcactcatctgcacaggcaggatgtgtacgcaggcctgcagacacctcgtggggctgccccagctaattgccacaaaacaacgcaaggttattgtcctgtggttctagaagctagacgttcaaaatcagggtgtctgtagcactgtgctccctccaaaggatctagagaggaatctttgcagcctcttcccgattctggtgatggccggcaatccttggcactctctggctgtagcggcatctctccaacagctgcctctatcatcacggagccgtcttctccctgtgtccagatttcctctctttataagaatatcggaccgggcgcagtggctcaagcctgtaatcccagcactttgggaggccgaggcgggcggatcacgaggtcaggagatggagaccatcctggctaaaacggtgaaaccctgtctctagtaaaaatacaaaaaaaattagccgggcgagatggcaggtgcctgtagtcccagctactcaggaggctgaggcaggagaatggcgtgaaccccggggggcggagcctgcagtgagccgagatcatgccactgcactccagcctaggcgacagcgagactccgtctcaaaaaaaaaaaaaaaaaaaaagaatatcgggccgggcacagtggcttacgcctgtaatcccagcactttgggaggccgaggcgggcggatcacctgagatcgggagttcaagaccagcctgaccaatatggagaaaccccatctctactaaaaatacaaaaaattagccgggcgtggcggcgcatgcctgtaatcccagcactttgggaggccaaggcaggaggattgcctgagctcaggagtttgagaccagcctgggcaacacggtgaaactccatctctactaaaatacaaaaagttagccgggcgtggcagcatgctcctgtaatcccagctacactggaggctgaggcaggagaattgcttgaacccgggaggtggaggttgcactgagccaagatcgcgtcattgcattccagtcagggcgacagagagactctgtctcaaaaacaaaaaaaaaaaggccaggcgtggtggctcatgcttgtaatcccagcactttgggaggccaaggcaggcagatcatgaggtcaggagatcaagaccatcctggctacagtgaaaccccgtttctactagaactacaaaaaattagccgggcgtggtggcaggcacctatagtcccagctactcgggaagctgaggcaggagaatggcgtgaacctgggaggtggaggttgcagtgagccaagatggcaccagtgcactccagcctgggcgacagaggtagactctgtctcagaaaaaaaaaaaaaaaaaaaatcagtcactggatttgggcccaccctacctccatatgacctcatgttaacttgatgacatctgcaaagaccccattcccaaaaaggtcaccttcaccagtaagttgggggttaggacttgaatatagctttttggttgatgtaattcaacccacagcactgcctttttcattccatgttatgttttttgagatttttgagatttgccaatatatgaagctataaattatcagtgaaaataaataattcaaaatctaagctgttgaaactctaaattattttaagccttaaaagaatgattatgagacaaggcccggtggctcatgcctgtaatcccagcactttgagaggctgatgggggtggatcacttgaggttaggggttcaagaccaggctggccaacgtggtgaaaccctgtctctactaaaaatacaaaaattagctgggtgtggtggtgtgtgcctctagtcccagctacttgggagggtgaggcaggagaattgtttgaacctggggggcagaggttgcagtgagctgagatcacgccattgcactccagcctgggcgacagagcaagactccatctcaaaaaaaaaaaaaaagaatgcttatagacctgagtcatgtgacagacagttgtatgtaacctaggcaactagaaccttttttttctctgattttagattaagccttcttccttgcatgcattgtttcgtaaaaggctgtaaatggctgaagggtaccagggaagagcccttgcctctccaatgttgactttcactgtagattaacctccttctcagctgcctcacacaaaggctttatggctctcaagttgtattaagatggaatgttaaatatactcttttaagttagaaaggaaatgaaaacatgctgtagggaaaagaaaacacactgaaaccaactaattaatttgtcgtacctcttaaaccagccttgtatagaaaattttgtaatccaggtaaacgtctttgttttctgtctctaataagcaagaacttaacttttaactttggaactgatatggtttggctgtgtccccacccaaatctcatctggaattcccacgtgttgtaggaggaacctggtaggaaggtaattgaatctcaggggcaggtctttcctgtgctgttctcgtgatagtgagtatggctcacaggatctgatggttatataaaggggagtttccctgcacaagctctcttgcctgccaccrtatgagacatgcctttcaccttccatcatgattgtgaggcctccccagccacatggaactctaagtccaataaacctctttcttttgtaaattgcccagtcttgggtatgtctttatcagcagtgtgaaagcagactaatacaggaacattgaacccatttctctgcagtcagtgtctcctaggtagctattcccagctttttgcttgaataaactctttaaaactaattctgggttgggcwtggtgggtcagtcctgtaattccagcactttggaaggccaaggcaggaagactgcttgagtccaggagtttgaggccagcctaggcaaaatagggagaactcggccgggcgcagtggctcacgcctgtaatcccagcactttgggaggccraggcgggcagatcatgaggtcaggagatcgagaccatcctggctaacacagtgaaaccccgtctctactaaaaatacaaaaattagccagacacggtggcgggcatctgtagtcccagctactcgggaggctgaggcaggagaatggtgcgaacccgggaggcggagcttgcagtgagtcgagatagtgccactgcactccagcctgggcgctagagtgagactccgtctcaaaaaaaaaaaaaaaatagggagacctcatctttacaaaaaaatgcaagaattagctgggtgtggtggtgcacacccctagttccagctactcaggaggccaaggtagaaggattgcttggacccaggaggccaaagattcagtgagccatgattggccactgcactccagtgggcagttgaatttttgttttgttttgttttgttctgggacagggtctagcaatagagcaagaccctgcctcaaaacaaaataatacaaaactgattctgggccaggcgcagtggctcacgcctataatcccagcgctttgggaggccgaggcaggcagaccacctgaggtcaggagtttgagaccaacctgaccaacatggagaaacccatctctacaaaaaaaaaaaaaaaaaaaaaaaattagccatgttggtgcatgtctgtaatcccagctactcaggtggctgaggcaggagaatcacttgaacccaggaggcagaggttgcggtgagccgagagcacgccattgaactccagcctgggcagcaagagcgaaactccatctcaaaacaaaacgacacaaaaaaactgattctaaccttttgattacttcaggctgacatatccattttcacagaaaaatagtttctggtatcaacatcacttatccatccattctcctgtccaggccgtcagtgctgtctgcatctttttgctttaccgcagggctgctgtggaattcctgcgccgtctcccagtgcacacacaggacaccctctctggtagactctgggagcgtcgctgctgtgcagacagggatcggcctgcgactctgcgagggggacctcctgtctcgtagtgtctgtgccacctgtagctctgcgtcctcaccaaccctaggcaccatctgatggttaaatgggccaatctgatggatataaaatgctctttttgtggttttagggtttttttactcccctctccctctttttgtggttttaatttgtatttccgccggacatggtggttcacacctgccatcccagcactttgagagttaattaattaacttccttcaccatattggccaggctggtcttgaactcctgacctcgtgatccgcccgcctcagcctcccaaagtgctgggattacaggcgtgagccaccgcacctggccgattgggtttttttgtttgatttgagacagggcctcactctgtcgcccaggctggagtgcagtggtgtaatcatagctcactgcagcctcgacctcargtgatcctcccacctcagcctcccaggtagctggacccacaggcatgcagcaccatatccagctaatttttttttttgaaacggagtcccactctgttgcccctgctggagtgcagtggcacaacctcagctcactgcaacctctacctcccgggttcaagcaattctcatgcctcagcctcctgagtagctgggattacaggcgcccstcaccatgcctggctaattttttttttgtatttttagtagagacagggttttaccatgttggccaggatggtctcraacccctgacctcaggtgatctgcccacctcagcctcccaaaatgctgggattacaagggttagccaccgtgcctggcctctggctaattttttattttttgtagagacggggtctcactatgttggccaggcttgtctcaaacttctggcctcaagggtgatacctccacctcgcaaagcactgtgattacaggcgtgaattactggcctggtacattgttttaatttgttactaagagatgtggattcaactgcacatctgagaccagtgatattccttataagagggatccccaacccccaggctatggaccagttccggtctgtggcctgttaggaactgggccacatagcaggaggtgaggccaggcgagtgagcatttcagcttgaactctgcctcctctggtatcagtgtggcatcagattctcatcggagcaccaaccctattgtgaactgtgcagacaagggatctaggttgtgcgctccttatgagaatccaatgcctgaggatctgaggtggaacagtttcgtcctgaaaccacccccgccctggtccatggaaaaattgtcttccacaaaaccaatccccggtgccaaaaaggctgtggaccgctgccttaaaacaattcaaaattacaaatgctattattatctcttctttttcttaagagaaaagttctcactccgtccccaggctagagtgccgtggcacaatcacagctcactacagcttcaaactcctgggctcaagggatcctcctgctttagcctcccaaagatgctgggattgtaggcatgagccaccgcgcccggcccaatatttcttaagttcgcccaaagatggaacatcttgaagaaatctggatccgttttgaccttgaacccttccctgcttggacacagaataggaatagtgacatgtcaaaagcatcagatacgatgtagacaggatttgagaagctctgagagagaagggaaatggtgtaggatacccagatgaatacctaattgtctttcatgggaaacaaaattaattttgaatgttcactgccacagctatttgatatgaactgtaggtcattaataatgttagagaaagctcaccaaaacccaagcagaaagactgacaaattcactttcgaaaggattttaaaacacatttctttaattttagagaaaatatttttctaaattgaaaaagctgcacatgaaatacacaagagtggcataccaataaaataggggaaattggcacaaaaatgtttgtatgactatgaaggagaaaattctcacataaataatcctaaggtaattttagcataaaggattttctgactgttagagattaaggtatagggccaatcaaagagagatgtgaacagacagactatcttcctgctctttttctttttgtttacaatactccagcactgggaagcctgaaggagcatgagaaagactgttgctgtaagacacggcgctatctatggcctgaatgtttgttatctgttgaaatcctaaccccgaaggtgatggtatgaggaggtgaggactttgggatgggatgactgctctcataaaggaggctagagaaaggctcctggccctttccagcaggcgaggacacagatgccatcttgaaccaggaagtggccacaccagacacggaatctgccagcacctggttcctgcacttcccaacctccagatctgtgagaaataaatttctgttgtttacagccatccactctgtgcttcagagacctgaacagactaagacagatggtgagcagcgctctataaaggtggtgattataaagtgaaattaaacattatatataaaaatccatgactggctgggtgcagtggttcacacctgtaatcccaacactttcggaggctgaagcaagcggatcacccgagatcaggagttcaaaaccagcctggccaacatggcgaaaccctgtctctaataaaaatacaaaaattagccaagtgtagtggcgggcgcctgtaatcccatctactcagggaagctgaggcacgagaatcgcttgaacctgggaggcggaggttacagtgagccaagatcacgccactgcactgcagcctgggcaacagagcaagactccatctcaaaaaaaaaaaaaaaatccacgactaatttctgaatctaagaaatggaggccaggcgtggtggctcatgcctgtaatcccagcactttgggaggccgaggcaggcggatcacaaggtcaggagatcgagaccatcctggctaagagggtgaaaccccatctctactaaaaatacaaaaattagctgggcgtggtggcacgcacctgtagtcccagctactcgggaggctgaggcatgagaattgcttgaatctgggaggcagaggttgcagtgagccgagatcacaccactgtactccagcctgggcgagagagcgagactccatctcaaaaaaaacaaaaaaagaaattttggatttctttgataatttcagtttctactgcctcaacagaaaaaannnnnnnnnnnnnnnnnnnnnnnnnnnnnnnnnnnnnnnnnnnnnnnnnnnnnnnnnnnnnnnnnnnnnnnnnnnnnnnnnnnnnnnnnnnnnnnnnnncacgatctcagcgcagtcacctctgcctccctattcaagcgattctcctgcctcagcctcccgagtagctggaattacaggcatgcaccaccacacccagctaattttgtatttttagtagagacggggtttctccatgttggtcaggctggtctcgaactcccgacctcaggtgatctgcccacctcggcctcccaaagtgctgggattacaggtgtgagccaccacacccagccgaaccaatttttaaaaagaagagtacaagccgagtgcaatggctcatgcctgtaatctcagaggtttgggaggccaaggcaggaggaatgcttgaatttgagtgatcaggacaggaatttgagaccagcctgggcaacacagcaagactccatctctgaaaacaaaaaagaagtacaatgacttaagaaagattgtgtagttcgacactatggtcaacagaatacaaattatgtgactttaatatcataattagtaactgctgaaatgaagaaaactaaatttttatggaagaaatatataacaatttagaaactgtgaagtctttttttttttttttttttttttttttttttttgaaaaggagtctcgctctgtcgcccaggctggagtgcagtggcgcgatctcggctcactgcaagctccgcctcccgggttcaggccattctcctgcctcagcctccggagtagctgggactacgggcgccccccaccatgccgggctaatttttttgtttttttttagtagagacagggtttcaccgtgttagccaggatggtctcgatctcctgacctcgtgatccgcctgcctcggcctcccaaagtgctgggattacaggcgtgagccactgcgcccggcctaaaattgtgaaatctttattaagcaacgctgcctgcccatcaccagagcaggtggacatacccagcagcgactcacttcagtcatctctaatgttttgctaacttccagtcagataaaagccatcgccttacggatgtctttaaacgttatcatcatgaaacgtcctttcatagcaagatgttaaggtggtgggggcggaccacatttcccttacccttgtcagcctgagtgactgtttttattttatttatttgagatggagtctcgctctgtcgtccaggctggggtgcggtggcgccacctgggctcactgcaacctctgcctcctggggtcaagcgattctcctgcctcagcctcccaagtagctgggattacaggcgcgcgcaactacccccgactaatttttcatttttattagataccggatttcaccatgttttgccaggctggtctcgaactcctgacctcaaatgatccgcccgcctcggcctcccaaagtgctgggatcacaggcctgagccaccgcgcatggccgtgactgcttttaaacgcctttcgatggaagacgatgacggtggcctctcgatgtcagggccgcgctgccaccccctcccgccccaggcagcaggactgggctctgagctgagggcaggagcagctggcggctcgcagcgcgaccgtgggaaccactgtgagccgccgcgaccctccttgactcgccgtgacccatcgtgatccgatgtgatccttcttaacccgccgtgacccgctgtcacccacagtcacccaacgtgattcgccgtaactctggtgttgtttgctgcttgctgcccgagcctgggcgtacccatgggcgcgggtgacagtgcaagtgcttgggacgacaacccgggctcctcatcgcggccggaatccaagaggctgcggcgcgaggtctgsgtattcgggggcggaaccctgggagggaaggggagcaaagggagacgccgcagcgtaagcccgcctggccccagcgccggcgaggctccttccgacgccgcgggcatcccgcgcggcgctgccggctggccctcgtctcgtgtccttccgccgtcccaagcagggcctgggcccagcgccccgcgggctaaagaggttgcggcccgggacttcgtccggggacccgcccgcgcgcggccggcggacgagactgcgcttcccaagcggctttgcggccgcggactccaagtcccagctgtgcccgggacgctgcgcgcccccgggactccatttcccagagtgccccgccccagcctcccggccccgccccccacctggctccgcgggcagccggagcgcacccggccggaagccgctgtcggggagccggcggtggggctggacgcaggtgaggtggcaccggactcagccgcgccctgggccctggatgttccgtgagagtcagggagcgctgtgggggtctgggatcgaggggcatgggggcagcctggggctgtggtagagggtctggctgcggtgaggtctccccgcgtgcttgggagccgcgcgacgcctgcgcagggccccctcccctaagggctggccctggggccctgccgggggagccsgagcaggtttccggctcccaggatgggatccttgagggtggctgcgccccgaggcctgtcctgccctggaggaatctggctcgccagggctctccaggaccagccagcctcgagtgggcgtgggctgcacacaggcgccgtctcgtgcctgtccctagcatgcgggctttagctgcgaaccgtgttaacgacctgtgccaggagcccccgtcccaaggttgtctgcctcccctcttgtcagtcagaggggagtagaatgtaccttttctcggcctagtggggagtcgtgggttgggaccagctgctctgggctgggtggtagctcaggacccctgcggcgctgtaggctgagagctcccaggggaacagggctgcgacgagggagtgcctcggtccagctgggtctttctggttgccagtggactatgccccactctgagggcctcactctgtgccagttgccacagaagagtggggctccaaaggatgagagcgtgatgacctcagcctcccactgtttgacattacaggtgcaactgacatgggtgaaccccagggatccatgcggattctagtgacagggggctctgggctggtaggcaaagccatccagaaggtggtagcagatggagctggacttcctggagaggactgggtgtttgtctcctctaaagacgccgatctcacgtgagtgagcccatccccagatcagcccttcctctccatcctaccccccaccctagaactaagagttccaggctgggcatgttgctgagtctaacagtagctgtgtttctgggtccttcctgccaggtggctggcctggcctgggtgtgcttggctgtgttcctggaaaaacaaacaccctcccatctcttcctggaagcctgcaccctcatatcagccaggccctggggccaccctcccttttgactgtccctcctgccatagtcccacccagttcctgcacttggcacccaaccctggggtgctggttccctccagagcctcctgacagcctggcttcctacagggatacagcacagacccgcgccctgtttgagaaggtccaacccacacacgtcatccatcttgctgcaatggtggggggcctgttccggaatatcaaatacaatttggacttctgggtaagtgagggtggccccagcaagcactggaaaccaggatcccaggttctgggaacttcctggcgggcttcccactctcacaggcccacattcccaccccaggaagtccctgaggatcagggcttggcacagcctggtgggggcagcccctgagggacccccagtcactcacacttggtgctgtggacagagggccatgcagggggcctggaggcacttggcccagtaggcaaagctgtggagctgacttgcagcattgggaggctgaaaagagccagcggccacgtgggactgggagctggttcctgccccctgagtccccagggcctctggagcctctggctcccaggactgtgctggcccagctccccttagccgggcccaccacacactctggggtgcaggggtgtgaaccgcrctctgtgcatctgctgcctgtgtctgggggaagggggcgtggtgtaagggccctgccgtggctagctgtgttccggagggttggccccaccagtcactgggcagcagccttgccttagctggctttgctaagcgtaggaggcactagcgtgagcagaggctcagaggagattctgcccaggagccctgtcaccccagagccctccttgtcggtgtctcggccttcccagcaggctgcctggccaccacctctcccttctcccaagaccagtcccagggctccagccatgccgtgtctagttcatgcacgggaagtggggcccgcggggtggacccggcaagcgcaggctccattgatcctgggaagtagagccaggtgggagctcctccagggtggggaagtagaccgccctgttccccgtgtagtgggagccccagcccagcccagggccagactgggctccttcccagcctccagtggggtcctatgccctgacctcagcagcctcctgggtggggcccagccctgagctgggggtgtggttctcctcatagtggaaggcagagccagcccctcctccagccttggtggggctggagagcaatggtgtctgtaagcccactgccttgtccggaaacggttaggatgggcaggcttgggtcctcccagggctgaagggccagggtgtgtctccacttctgcgtctggaggagcaggtaagggctgggatctggcctggggagcctgaactgtccccgcctcacccctgcagaggaaaaacgtgcacatgaacgacaacgtcctgcactcggccttygaggtgggcgcccgcaaggtggtgtcctgcctgtccacctgtatcttccctgacaagacgacctacccgatagatgagaccatggtgaggggcagggcctggctgtgggtggggccggggagccggtgggcagggccaggaagtagcggcctctgcctctcccacgcccgcagatccacaatgggcctccccacaacagcaattttgggtactcgtatgccaagaggatgatcgacgtgcagaacaggtcctcgcgcccatcctgctgaggcccagccaggagtcggggagagggcccccaggggcgggtggggccggctggtcgggtcttcgtgccagcctcagtaagaggccagcggcagcctggggtgggatcgcgggcccaggacgagggcaggagacgctgtgcctccgcagggcctacttccagcagtacggctgcaccttcaccgctgtcatccccaccaacgtcttcgggccccacgacaacttcaacatcgaggatggccacgtgctgcctggcctcatccacaaggtgcacctggccaagagtgagtgcgtccgtccgatggggtgcccgggctcagctcgggaggaggtgacccagtgcctctgacacctgctccttccccaaatctgcaggcagcggctcrgccctgacggtgtggggtacagggaatccgcggaggcagttcatatactcgctggtgcgtaaaggaaggcacagctctccccagagaacctgccctattgagccctgggctggcccctgctgggctgtcggggaggtggtgcaggagggaggctcctaccagcagagaatctgggctgagctccragaggagccatctctggtcctcgtggaggccccataggctcctgtctccaggagtcactggcgtagctctgagctccaagggagaaaggagggacccctgttccccaggctgagcccccactgaacaaggacagcagtatggactccccagcaggggcgtttgggagagggttggctatacccatggtctctgaccctgcctgtctgacctctaggacctggcccagctctttatctgggtcctgcgggagtacaatgaagtggagcccatcatcctctccggtgggtacctcagccctcagcccccttcctccatggtaggacaggatccaaggctgtcctgggaggctggctgaggggtgggagcaggaatattcatgggccgtcgggtggcaccaaggggaggcctgacccggtggctccccacagtgggcgaggaagatgaggtctccatcaaggaggcagccgaggcggtggtggaggccatggacttccatggggaagtcaccgtatcctctggctccagtgctgggggttgggcgggggccccttgggcgggctcagtggccacccggtgtagggccagcgtgggtgggacactgcggagggaggatgctcaccctggcaggcggaggagctctgctgtggctcccctgggaatggcagaggttcaagggcaagctgcgggggctggggtggaggtkctcttctcgctgtggccttgacaaagcctccagtttgatacaaccaagtcggatgggcagtttaagaagacagccagtaacagcaagctgaggacctacctgcccgacttccggttcacacccttcaagcagggtgagccctgaccccacagccctccacttgrtggaggcctgccccagcccctccctcatgctcgctaccagggcagaggtgaggtgccccctcagagcctgtactgccctggaggtgggacaccaaagctctgaggggtgacttccctgtccctgggcctcctccccccacttcctcccatgcggccccraccctccctgtccatggccctcacctgcctgcctctgcagcggtgaaggagacctgtgcttggttcactgacaactacgagcaggcccggaagtgaagctggaagacaggatcaggtgccagyggaccatcggctggcagagcccagcggccaccacccgtcaaccctgccaggagctgagggcaccacccagcaacctgggcctgcattccatccgctytgcagccccaagcatctttccagtggggcccccattcacgttggtcctcagggaaaccagggtccsgggcaggcccggcgctttgctccccacaccagccccctgsgcgtgtccactctgatcctgcatcccactccctgggagccaataaagtgcattttcacaggcctggccttggcagctctgtgctgagccgtcccccacacccagggactgccccctagcctggccagtcccaggacccactatccccctggcttactgttcagcccccaagagctggtgactccctggggtggaaaggccgcagaggctggagatgggaaggcacacgtgggcaggcagcaggcaggcagcagtgagactggtgtggactgtcagctggacaaggatgtgcagggcagggccagtcccagcccctccacatgtggccacctgcaggcctgagtaacttgagctcacccggacctccctgcctcagcctgagggctctggggaagctggtctagtgggccagaaacgtctagtgagccagccgagctgagcccatggatggatatgaggggaggctgatgattgggtggctcgggcttcccctggcctggcccctcctctctgtggctctcaggcttgggcgtgggtcccccacctggccttatcccatggagagggacaggtgcctgctggacaggtcagctccagccaccagaggtggggtgtcattgctcgccgcccccgtccattctcagaggggagacagcaaagtccagaatggttcccgggccagtgcctcagccaggcagggtggcgctggggtatggaccaggagcactgggctccaggccccggcttgcccgtcgccccctttctcagtgcctcgcacagagggagcccctatgccagaaccctctggtccactgcatccaggacccagatgccctccctggctcctggcccaactctgggcccacgtcctcagggtccctctcctgggcgccctgtgccgtcttcacgcacatgatgccttttggctgcaggtaggacctgctgcttcacttcttcgttcattccggcagcggtgatgtgtcctccctgtcccggcactgagtccagaccggtgtgtcctgcacccagccaaccgctcacctcatctctcactgtccctttgtgtccagcaagccgaggtgtcctccaggcctcccctgagactggccccctcttgggtcaaggcctccctaccttttaggcctcagctgaggtggcccagcctccaaaacaccttccctgatggcaccttcacagcgcctctcggagcatccaccctgccctgctgggattgtttgtctggaaacctctgggagccccgcctcaacccctaaccctcccgctgacaccccaggacctcgagctccaggagacgggttggcctcgttcacagtgtatcccctggccccagccctttgtggataaaggctctgcccatgtgggggttcaggaaaggcctcctggagagggtggcgcctatgtggctgcttggatccaccaggtgaacagtgggaagaagcccagccaagagcagagaggtgccctggacacaagccttggctggctgggtgtccacgtcagctgagggctcccagctgatgctcagaagcccagcccggcatgggatggagaagctgaacggggctgggcccctgggcctccttttacccactgtggccctgggcactcagccagcaatcctccttcacctcgcctcagtccacttgtttatgatgagctttgtccttatgtatgatggcatggcactggatgcctctggcccctctcacctccccacagccttggtcctgagccatcactggcccagggggcctgggagaaaatccagggagtctgtgggaaggggctgggaggatccgaggtggcaggagatacagctgctgacgctgtgtgctggtgcaaagtgtccaccacccacatttctcggctgcagtggccgaagcagcctcctggtggctttctgtccctttccacctcatttgcttcagaaccttgacacactggctgtcctgcgtgtgtgctgactgtagtctgtctacactgccaccaagcagggctgcagggtggggtccagcctgtcccatctgctgccgtggggtgatcttgcccaggcccagagcagggcccagaggctgcagctgcacagtgaatgttgaatcaatgagaggatttcattactgaagagcttagaaaatgtcaaaggcttgggccggcacggtggctcacgcctgtaatcccagcactttgggaggccgaggcaggtggatcacgaggtcaggagattgagaccatcctggctaacaaggtgaaaccccatctctactaaaaatacaaaaaaataagccaggcgtggtggcggtcgcctatagtcccagctacttgggaggctgaggcaggagaatggcgtgaacccgggagacggagcttgcagcgagcccagatggcgccactgcactccagcctgggcgacagagcgagactccgtctcaaaaaaaagaaaaaagaaaatgtcaaaggcttcaaaagaaaataacatatgtaacatgcagctttagattggatgatgaaaaaaccgcactcagatcttcaagccttgttttccttgtgtcattaaaagtgacgagtaccccctccccgactgtcccctccgtcggtctcaggcccctggccctggcctgctctccgtgacctgggtctccgcccctagtgcttccccgcagctccaccgtctgtggtcggcggggcctcagtgaccgcacgctctggaccagccccgcaacccgcttcgctacccctcccctccggaaaaccaacatgtgctcctcgcacgcgcgaccgggacccctccccgctcctccggcctctccgagcgcgagtaccccgccggccccgccccttacggccccgcccccagtttctctcagccaatgggcagtgaggggcggcatagccctttcgggccaataagcagcgagaggcggggttcccgcgccttgcgaacttgtagagtgcggacaaaaagccggccggagtgtgccgtcccagtaaccaatcggcgagggtggggacggggaggcgagtcctattggagggcgggggtggggcctagatctgtgggcggggcgcggcctgtggatgggcggtgagcgcagcggcgtccgaggcaacaagatggcagctgcggagccgtctccgcggcgcgtgggcttcgtgggcgcgggccgcatggcgggggccatcgcgcagggcctcatcagagcaggtggggcggcgcggggctaggcctgcggtctggagtgggagcagccccgtgggaggtgtcctgccgcgagagtggggccgggggcgcgggcccagccaaccgggtctccgctccgctgggcgcagccggggccacgcctgtttgctcttacttttttgacgtggctgcgggaagatttgagtcacacgtggctaggtgccgcttccgtggccggcttcctggccgcgtggccttggccaggctcacctcttccagcctctgattttctctttgcgcgccagcccctctcatggggagcagcagggcttctcccccagacaccttggctctagggacacctgggccagactatccatcctgtgccagcagcacccccacgttgtgacagccaaaaatgcctccagacactgccgaatgtcccctgggtggggggaggagacaggcaaaatcatcccctgttgagaaacactgctttatacccggaatatttatgctgaccatatactcctccaggcatttagaagcctctctgcagattgtggatagggagagctgggtgacttttgactctctgccttcagccatacttcagggtccagaagagtcaagatcaatcgggaaatagcttactatgagtctcaggagtcttccctgtgaaacctggcagtaccgcatgcctcccagagctgtacaggttaaatgagacataaatgtctagtgttgagcttagtactggtgtgtgtggctgccactgtcatgattaattgctgtgttcaggttgtggtgtacacttgtgccttcctgttcgaccttaccaaaatctaacccaatctttccaccccgtacccgacaaaagcagataatttctaccaagtaggcatttagccttttcttagacattccagcatagactctccctctcgaagaacctgggccccgattgggccttctgtggccaatcaactgcctttgtacccaccacattcccccaaggcctggtgttcctccagaggtactgcctcttctgctccaggcagccttcccttccctggaggcagaggccccagggatctgtgtcctcaccaatgaggtaagctcctggcctccatacccagcagcagtcaggggcgttgaccgccaagtagaatcagtggatctgattgcctgggcccagtgaatggtgcatcccgctttgggttcctggggccaggagggggcccaggatgggccaggcgtggctgagcctgagaggccaagtgagctccctctcctctccgtgccatcctatcccaccccttcaccaacccctcttccttttcctttctttccaggaaaagtggaagctcagcacatactggccagtgcaccaacagacaggaacctatgtcactttcaagtgagcatagagcccaggttcttcataccctcaggagcccaggatagctcttggctcctgtcccactaagacacttatcagagccagggatgggtggtttatttagctgaagtttgcagactggctggtctgggctgggaaaagggagattagaggccaggaggaaagtaaggttgtggagggccaaagcaaagtgtttgtgtgtgtgtgtgtatgcgtgtgtgagtgcatgtccgtgagtgtgtgtatatgcacgtgtgtatatgtgaggctatgcgtgtgcatgtgtgtatgtgctcatgtgcgtttgcacatgcgcttgtgtgtgcgtgtgcacgtgtggtgagtgcatgtatgtcagtgcatgtgtgtgcgtgtgtgtatgagtgcatgctcatgagtgcatgtgcacctgtgtggtcgtgagtgcacgtatgtgcttgtgcatgtgtgcctgtgcagatgtgtatatgagtgcgtgtgtgcgtgtatgagtgcgtgcgtgtacacatgagtgcatgctcgagtgggtgtgtgtgcacgtgtttgtgctcatgagtgcattcatgtgtacatgtgtatgtatgctcgtgagtgcatgtgtctgcgtgtgtgtatatgaatgcatgctcgtgagtgcgtgcatgtgcatgggtgtgtttgcatgctgggtggtggtcacagacattcactggggatggagggctcagggcttggggaggcgctgacatcaggatggcctgtgaggagtagggctagtctgcgggagtcttgggcactggagaagtcggggtggtctagacacttgcaatgggagaggccctgggaccatgggaacgtgtggcatccagcaggaagggctgtgatggagagggtgcgccgcttacatggcccctgaggcttggtcctggtgtccctggcgcaggctctgggttgccggaccacgcactccaaccaggaggtgctgcagagctgcctgctcgtcatctttgccaccaagcctcatgtgctgccagctgtcctggcagaggtggctcctgtggtcaccactgaacacatcttggtgtccgtggctgctggggtgtctctgagcaccctggaggaggtgagtgtcccttgggctaaggccttggtcccagtataggctctgctggccaggcttgggcggcaggcagccccccagagagcctgagaggtggccgtgtggcccacctggatcaagtggctggatttagggttccctcctggtgctgtacctgggaggcagacgctggagcccaccgcgagctgacgtggacctttcctgaggcccctgctggggcctgcccagcagggcccagtcctacagactccctgattctgacctctctctggccagctgctgcccccaaacacacgggtgctgcgggtcttgcccaacctgccctgtgtggtccaggaaggggccat

SEQ ID NO: 97970 - DNA, 61614 bp, Homo sapiens
cctgatatctttcaaaatacctcaatctgtaactgaagtatatatagcccctctgctaacatccaactgtttttctcatttaaaaaaaatgttggttcctaccataaagaacagatggttccaaggcaagaaaaaaatagcagttgtataaagcaaagaatctttatggaaacaaaaggtgtgcaatgacagttctttgactaaaaaaaattccattctattttttttttcttttgaaacagggtttcactctgtcactcaggcttgaatgcagtgacacaattatagttcattgtagcctcaacctcccaggctcaagcaatcctcctgcttcagcctcccaagtagctgggacacaggtgtgcactggcacacccagctaacttgattttttttgtagatacggggtctcctttgtttcccaggctggtcttgaactgctgggctgaagcgatcctgctgtcttggcctcccaaaatcctggtattataggtgtgagtcaccacacccagccaaaattctattttcttggttagtaacttatgaatgtataaacaaaaattgagcaaacaagtttgataaaggttaaatttatgaaattctatatcctgctattatgctatcttttactaacacacggaaaacttttgaggaatttgttttattcataaatatttccgaatattaggaataattttctttacatcaacttaactaggacttaactaaaaattattaaatgtgttaaaagtatttgtattaaaattacaaaaccatttaacttaccaacgtatcctttatcaggggcatctgttgatggtgctgcaaattcctatagtagcaaagaaatgtttcctattgaaagaagctactgaaaaattatgaagacaatttagcaatcagttatggaaggctctatcaaatatcagcttagggaattgtgtcagggcctctacggacattggtgctgatcctcacaatagctctacaagataagaaggcactacagtacagtggactacactacagtgctgctcggcaagattacctggagatcttttaaaaaatagtaactgggtttgtgcccccaactactagccaagaatcttaatttgttctccagatgatagagcaagatttaggaactgctgctttagtggtaaagagcaaaagctcagctgggcgcggtggctcacaccggtaatcccagcactttgggacacagaggcgggcggatcacctgaggtcaggagtttgagaccagcctggccaagatggcaaaaccccgtctctactaaaaatacaaaaattagccaggcatggtggcgggcgcctgtaatcccagctacttgggaggccgaggcaggagaatcacttcaacccaggagacggaagttgcagtgagctgacatcgtgccactgcactccagcctgggcgacagagcaagactccgtctcaaaaaaaaaaaaaaaagcaaatgctctgcaattactaagccagttcaaatgtcagagccatacttactggctgagagacttcaggcaagttatttaacctcttaccttaaactcctcatcttgtcaaatgggaagaaaatagtgtctactcctagggactgttaataagggccaaatgagatagacctgttaaatcccaggcataaaacctgacaaggagcaagttctcaaatcttactgttatacatcactccaggtttacgaaagaagaatctcaactgaggttaaataacacagggtagactgtagtcaaagaagcacaggctttggagtcagatttatgtctaagttttacttatgagtcttatgtacctggacaggttactgaaagtcatctgtaaaacaggaggtgaagacaagtaacaaatgattgttataggcattaaagtggataattctgtaaagcacctaaaaaggtgtctggaacatagcaagtactcagtaaatggtagccagtattccctcaaatttttcttttcaacaatttcaattttctacacatttacacagattacatgtcatcactggctaaaaggatgtcaccaaaaatctgttaatgtctcaaatgatataacaatttttttaaaatggtgactcagattttaaaagttgtttcattttgctacatttgacaattgttcacttagtcattaaacttgggtcatattatctaacactcatagtgaaagctcttgggaaattaaacattaaaaattgacacccaactaccaaatcaagagtagaattacaggtgtatattacaatctaataaataaagctaactttgtaactcaaatctcaataggacatatttagacttactgctttaactccacagattactgtagtatttcccaacttcactaaagcagaaccatctgcggtactaattgaacctgaaaagataagcaaaatgaaaggttcataaaaggaaaacagctacaaaattatccacataataattaaaattaagtgttttagtttgctgtgtacgattatcttgctacccctctcagttgcttatgaatatttcaagttagaataattgatttttacataactattttaaattagtgtttaaataattattcacctgtccttgaatttgtgttaatcatttttcatttagttacagggcttttgtacggataaaaatctcttgacaaaaaaaatcatcaaatcctttagacaaagaatttgggtgaaaaactgtttggctggttcatagactaaaacttgggaatatcatacagttgaaagtggaaaatacatccttaccgatgttgacagttgtggttctgaattcaccaagttctcttccatcaggacggcagttctctttctaaataaatatgtttatataaaaatagattatacctattacatattttacacatctatcacaagttttacacacacattaaatgttacttcaaatggattaatttaaattacttgaaattcatctttaaaagcagctcgttatcaaaacgcataacatgtacataacctttactcaccagaaatctcctgtaatactccagaggttccacggttctgaaacacgtgttaaaaatatatctgagataaactgatgaatcttaacataaatccagaaattggcaaagatcttaagtgtggtgatgcagcataaatctccacaactttttaactaaaagtaattctagaaagtaaaaatccttgtagtagcaatcacattcaattgctgtccttaactctgccataaacgattagaagattggcgtctaaaagccctttgagtgagctctttaaaagctcaatctgtgtcaaaagaatcatgtcgttcttgctctgaaacaaggattcagagtgatctagtgatcatgaaaaaagattattttaataatctagtgatcatgaatagttaacctcttactagataactcaggaaacaaaaaggtacatctttattttcactgtaagtgaaatttagcatattcttcaattatgactgtaagcaataagccatagtaacattagcagtacctgcaactttaacaaccacggagaccacagatgttttcgtttgcaccctttagctgtgtaaggtatgttcaggctcaccgttactttgaaatcccaggagttactactagtctcgccactagatcttgtttacgaaggttaattttaaaccaagtatatatactactatatcgtgtcttcggagtttatactcatagataactatttcaacataatggatttcctttggaatcctatttattttatccattttttaaaaactttaagaaagtccactggcttcacacacacaaaaaccttccaaacgaggcatgatccttttagaaataaattacgggagagggagaagcaggcggtatgtggttctgatgcaacaatcttgattgattgattctgacagagtctcactctgtcgcccaggctggagtgcagtggcgcgatctcggctcactacaacctctgcctcccgggttcaagcgattctcctgcctcagcctcctgagtagctgggactacaggcgcccgccaccacgcccggctaatttttatatttttattagagacagtgtttcaccatgtacaccaggctggtctcgaactcctgacgtcaggtgatccgcccgcctcgtcctccaaagtgctgggattacaggcgtgaaccgccgcgcccggccacaatctttaaaagattacaactatgtctcctgggactgcacgttcactacacaccacgctcacgagcgctcgcagcgggtatggaactctacagagtcctttcatctcccgtctcactgaggaagaagccctttcttttcactgtgacaacctccaggtcctcccgcccatcgtctgcctcgacgaggaaggaaatggcaccccaacggggtcggcctccaggtgagagaatcccagctaagagttaaaggaagctgccgtccgccagggtacagaactctacccgccacccgccaacactcacttgaacccagccgccatcttcccgcccgcgcgtctgcgcctgcgccgctcctctcctgcgcgcctgttccgccgccgcactttcgacacggatgccggggccgctcacgccacgggaaatgccaaggtggggacgcgacgaaaggtccctggcccgccctcgcatcgactttcccctgcccagacgcctttctaggtttccttgccttggacgtattttgacgaatctgctgttaaagaaggagcgggtctccctctttataaaagagctggtgctgtgactcagaataacaccaacagttcggagataacagggtttctagcgcagaatcaagcagtgcgtgtggagcgttattccaatgtttctgcgtcttttttctgcctgtgacttaggctcagccctggccttgcctcttcactggtcaagggctccgtgctccaacacatgagaaacctgaactttttttttttttttttttgagacagagtctcgctctgtcgtccaggctggagtgcagtggcgcgatctcggctcactgcaagctccgcctcccgggttcacgccattctcctgcctcagcctcccgagtagctggaactacagacgcccgccaccgcgccccgctaattttttgtatttttagtacagacggggtttcaccgtgttagccaggatggtctcgatctcctgaccttgtgatccgcccgcctcgtcctcccaaagtgctgggattacaggcgtgagccacggcgctcggccgagaaacctgaactttctgtgcgctcattgtccgcaccacgttctgctctgcaggtcccggagctgagggctcctaagcatcaccttgtgttgtagactgtgtcgtgctcaaggctgccatctccctcctaggtggggttaccagataaaatacaggataccacgttaaatttgaatgtctgataaacacagcgtggtttttttgttttttgtttttgtttttttgtgggttttttttttttttaaagcatgagtatgccccaaatagagcatgcaattagttgttgccagaacctggagggagctgggaaggctttacagatagatagtggtgatggttgcacagtatgtatgtaattaatgccactcactattgtaaacttaaaatgattaaaatggcaactttttattttaccacagtttataaaaactaatgtaataaaccagaaacctgtaactggatgagtcgtatggtatgtggctatcttaataaggctgttaaaaacatgattagttttttaatctgaaattcaaattaagtagacgtcttgcatacttgataaacctggcgccccgctgtggaacctagcgctcctctccaccgactgggcgccgagggcacgagagcggcgttttctccgcctcgccacgcgggggcgctgcggccagcgggcgcgacctctctggcggcggggccgggtcgcgcgggcgcgcttccgcctgtgtggaggtgcgggattgggcgggctgccacggcatggagaatggctccgcttctgttgcagctggcggtgctcggcgcggcgctggcggccgcagccctcgtactggtgagaacagggatgggaacccgcgcaggccggggcttaccgctctcctggagactgcggctcctcaggcgtcccctcctccgcgctaccagttctcggagaagtcccttttcccctagattcccccaaattcctgacctcggagtttcctgkagtttcactctccttttcttcggttctttaattttcccttggaatcttatctctttgtgtgctcagagacttgtaagttttttcacactggagcgcacccacccggcctggcatcatcgccgcttccatcgcccctggcgcccgcgccccctacccacctcctctgtcaacctcgacctctcccagactctccgggacctgcagccgctgcagttctgctccacccagggaggtctcgagcccccagaaggggtgtgctccctagcctgcycccttggctgatgtggttaagcaaataggggtgacggagccttgacggcagccatctgttacaaatgggaataaatgcgtggatcgatgagacccactagggacgcagggtgagcgagagagacaggcctcaggcgccttgtccggggtcgcattgtgtcccagaattaagcaccctaaatatactgcccctaaacaaggcaggacgatagaatgcaaactcgattgtctttgcccttgctctcgaaacacaaaaacattgtaaacacttgctgattgttaagtggtagaaaattggcgaactctctcccgcacaccttggaatgagcctgccctctagttagtaagtggagaggatttcagcttccttgacattcagattagccacctagacagcactgccaggaaggccactctgccatctttccagaggttgtataaatttacagtttagataaaatgtaatgcatccttacttctttgttgatagtatctgggtgagagaggagtcctctcttgccctaactagtagagatttcagggtttagggcttttttgttttttcaagtttttgagcaaaccaggattgattgattgattgattgatttttggcggggtgcgggcggggagtggattcacacattcttagattgaagctgccttactttgggtcttttgcacagattttatgggattgtactgacggtatttgttcccactagcttgaagtgataagagctaccatttattgattgtagtacttactatatgttgtgttgcacttggtttaataggagttattaaatctttaacactgtgacatatatgttatcattagcattattttactggtgaggaaacatgttggagaaatgagctcgtgtactcaaatgttgcacaactagtgaaacttaggttttttaaatgccagagcaagaaatcattaaaaaaataatttttcaaaacctcatcctgtcttcatatgtatccactctccattactcacagtctcacctcctttctgaattattttaaaacaactcgaagacattttatctttaaatcctcagcatttatttctaacagataaggtccttctttttaaaataccacaataaagtggtcacagatttaaatttattctgtgatttcaaatgccccctcagttcacttgccctcacttgtctcatatatgtctcagtatatatgtctgtttgttccaatcaggatccaaacaagtgccacacattgtactctgttgatgtcttgagtctcttaatcagttgacagtttctcctccccctttttttcttttccttgtcttttttttttttttttttttgagacrgagtctggctcttgtcacccaggctggagtgcagtggtgtgatcttggctcactgcaacctctgccctcaagcaattctcctgcctcagcctcctgagtagctgggattacaggcgcctaccaccactcccggttaatttttgtacttttaatagagatggggtttcgccatgttggccaggctggtctcgaactcctgaactcaggtgatccaccctcctcggcctcccaaacttctgggattacagacatgagccaccgcgcccggcctttttccttgtctttaatatgatcatttgtcctgtagaacttctcacaatttggatttctttgattgcatccccttaatgccttttaacatcttctatctcaaattttctataaactggtagttaggatggagagacctgatcagatacatactcgatgtgttttttaatcaagaaaaaattgtgagtgatgcttcttcctttctcttgtgtctcatcaggagtcatgtaatggccatttgtctctggtgttaagatggatctgtggtttcaaatgttgccagccagacccaccagtttataaagtttgtcatcagcctaatggttttagtagtcattgaggatcattacctaaatgctttatttcattgcgggttgcaaagtgaaatattctcattgtatccttcatttattacctagagttttgtaatgaaagaaatctcatcctcagctattcatttaccctaaaatacctttcatacatataaaacgcaaaaggcaaatttttgaaatgagatccttcctgcatcttacccagtttttgtctttagtatcattgcaaatttatgatttacagtatttttcatggtttgatccattgcagtaattttttttggcaggggggaagtgggaggacgatcagattcttgcatcataggccactgagagcccattcaggttgactactttgtcctttcagcacagcccttataatctttgataatctttgattataatcttataatctctgaagtgatagtagttgatgatggcagtaaagatcagacctcaaagatcaaacctcaggagctgatgacaatgacaatttgataatgtcttcaaattgatcattaaattacaaatgaatagcattccaaaaatttaaagactgttttgaaagcagaaagtgtaccaatagaaacaatgtaaaaacaatggttatttccaaagcttagctcccaagtgcatatggaagggagcctgtaagttagatacttcagtaaatgctgtattctgaattcaaattcgagttaagtgtcaaaaacatattcttaaacattgttggtccctacttggtagtctggggaatcttccttttatatcttgggtctgtctggtcctggatggaaagtgtgccctcaccccacatgttccaactgcaaaatggacttgtcctgtcacatatagattccaagtagcgataggaccttactatatgtgtgtgtgtctctatgcatgtagacacgctaaggatcagggttttagggcacctgagagtagactggtcttcctgtagtgactgacctttattgtagctgggatggtggaggcctggcgaatgatgactgggaagagacagagcctcctaaggcatcagcaccttactgatggaaaaaaggacagtaattcgttcataagtaggggactcactattgtctaattttggagtcacctctagaccattgttaatgaactaaaacctgagagtgagtattcaactaaaagaaaagtagatgatgtattctaacataaatacagaaaagtcagcaaaacataatttctgttttgtaaaagacatgtatgtctgcttttagatttccatcgttgcatttacaactgctacaaaaatgccagcactccatcgacatgaagaagagaaattcttcttaaatgccaaaggccagaaagaaactttacccagcatatgggactcacctaccaaacaactttctgtcgttgtgccttcatacaatgaagaaaaacggtgtaagccctgttttgatttttttggtaaagggtagtttggaaaagaaaaggaaatttaaagtatttgacttcactgtctttgccaaaacattaatagatgtgggctgtgttgagcacacagttgataattgttgtagttcggcagagagggaagtgaatatttgctctcatgaataggagcagcatcatgaggcagcgggactggaatgttctagagaggtaataagcacattgtggacagaaggcaggatttcagatgggaatgaccattgggaaagtaccagaggggcttgttagattattgggacttttttctgtatgtaagctgaatgtgccgggcttggaaaatcattttcaaaagygatttttaatatatttttttcttcaagtgcctgtgatgatggatgaagctctgagctatctagagaagagacaggtatcatgttttctcttttaatatgatatctccaattaaaactagaccaggtcaccaattgtggaccccaarccagatgcactgtgagaggcagtcctggcagcaccccgatcgctgggccacctgctgcttgcttgttgctatccataagcccggcacgtagcatgctacctccagaggcaggtcgttgacccaggacaaaccaggaagcgaaaatttctgtttctgtaccctcctacccattttaatcctgtcttgcttgatgatatatttaaaattgagtgacagtgtatgtctgcagactttgtatgatgccacaatgctgtttttacttttgtgacttgtaagaaaaggtgtattgttgctgtttttgctgttaacttttattctcttctctctttttttattttttggttaactgggtttgaataaacagaaaaactaagtctgaatgaacagaaaaaagatatttttaaaagacacacttacattgaaattattttgtatttcttcaatattctcaagagtctcccctcacattttcttcctgttttccctacataaggagaagagaagtaatacacaaccttcttttgtaacattagctgccattggaatccccttggagggattaagaattaagtgagttctttttaaaaaaaaattgttttgatttactttgcttttagattttttgtataaaggggaaatagaagattcactgaaagagaaagggctgtattaccttattaccaacttcaaacattcaatttagagaaaagaagaaaggaattgagcctttaatatgtatgaggcttctacctcttcaattacgtgtaatcttcacaccagccacatagagtaggtttttctgttctctttttttaatcagaaaataggcccaaaaagttaagttgcccaaggtcattaggctaagaaatgctgcagccaagctggaatctgccctctctgacttcaaacctcaggagcttttttcttacacacctgtaccctctcaaatgtgctatagcaccacaagtacctggcttcttccaccaccaaggtacagggcagactggggaacagcaaggtgacatggagagattgagtcaatattcactctccacctctacccaggatctctctctctctttttacttagcctttttattttatgcggtttgtgcactratatttatattcaaatttatatgtatcaacactaaagcagttgttttttaaattactggtgatttgattagaatactttatggcagttatgccaaattgtattactttatttttgtttcttgcagaaacgagatcctgcgttcacttatgaagtgatagtagttgatgatggcagtaaagatcagacctcaaaggtaaatacacttgcttttagaattgmcaatagttagaaaatagagaataattttgcacatgtgaaatctcactttcattcaccaggggaccctaaagctgtgcctaacactctccattgttatagtctagatagcagaaaaaacagatttcatttatggaacttctccataagaccagggaagctttgaagatcgccagatagggaagaaacatgcccgcgcacagttcctcctggcctttagggtaggaaccttcgttgcctaccaatttgtgcttcctttttccctaagcacagtttctttatgctccatcttgccttataatttctaaagcagtcacgccaatagaaagctgctttcgtaccagcccctgggaagcaggtgtgtcctttcacatgcacagagagcattggcaggatctggcttaggaagggtaagtgctgcactttgaatagtatgatgtgaaagttatgaacacaagccatctcagcagtttagtgatacatgaagggaatggcatggaaagccacattggacacttgctgttgagattatagaggtagcctagacccagctgaggctgtgcatcttctcctgaggagcacttttttggtggcccttgacctgtgagtggccagctgctctgctggaaggatcagggatgccctcccagggaggacaagcaagggaggggttagcaattggccccactgctcccaaggttgggaggaagtagaaagttgaaattatatttagtagaagtttttatttaaaacaaaccagttttcgctaagttaagtatttatagattccctgttaatgtcttacagtctgaggggtgtgaggaaaattttagatacggctcttgttcttgaggcgtttcagaccaagggggcacaaggtatagtacaagagaatactgcagttgtacagtgatgtttattatatcctcaaacaacataccaaaaaggcgagtaggcactcagtaggaactcagttcacaaatggtggccgagtgacagctgctgccctgtatactaaaggccatgctgtaaagcttcattgtgcatccattccaaacagttgtggctttaacaatgttatattccttgaagctagataccatactctagagggagcttttcatcctaacatagtaaagtcttattagttcacttagctacttatataatgactttatcttcttggttttgcagtctcaagtattgtgccattccagagtaaacatctacagcacaaataactgttctttgaacacatttcttcagctgttaagcagaagtcgagagttctgactggcactaaaatacaaagatgtaaagaccactttctaccttgaaggagttcacatctattaataatactggaaatatgcatcaaataattagagcactatgtgttagacatttttatcaattaggaactatatcatagagtggcttagataataaagacgtttaattatctcatctgccaggaagtctagaaatagttgattccagagttggcttagcatttaaacaggatcaggttgctagatccatatcattttcagtctcacgcattccttcatcacaaaatggccacagctgcaaatattacatgtcctggagtagtaagggacagccaggactttaagaatcatctctgggctgggcatggtggttcatgcccgtaatcccaacactttgggaggccaaggtgggagggtgggaggactgcttgagcgcaagagttcaaggttacagtgagctgtgatcgcacgactgaactccagcctgggtagcagagcaagaccctgtgtcaaaaaaaaagaatcatctctgcgtgcatctctcctttttaactaggaacgaaaatctttatcagaagtcctcacccctccctctactaaagcccacacccaaagttcacaagctagaacttagtgacatgacaccaaagcctgcagggaggctgcaaaagtactcagcaaagaggagttagaccaatcatggttcatcccctagggcttcacagttgtcactgcattattggggccataacagcaaagaaggaggcactgtttgctggtttggcagctagttaacagtgctacaacaggaccatggctgcatttgctggttgaaactgatagatttcagctatgtgccagataccagaaataaaaatctttgcctttaagtagctgacatttacagttgcattgtgatgagtaaagtaatagttgaatgagaaaatgcttcagtagtacacattgctattagaattatacttttctttttcccgggggaaggtggggatgggcatggaggctagaaaagagaaatggtgtttggctgagtcttaagctggcctgacaggtgaggaagctggaagacagtgttctgagaaaaggcatacaagtgtaagaccgtggtatggtctggaaatctcaaatactgctaatgttcacggtactaatggggcagcctcagaagctggctaaaaaggtgaaggctgaatcacaaaggatctcctatgctatgataaggaactcatatgtgatgcttagaagccataagtcatcactgagggtgtttgaacagggcttatgtgaactgatttccatattagaaaggctactcgtataactttaggaatgaattagggagtcagggtagagatgtggggactttaggggataaggccctgaactaggtcaggaaggtgtgaggatagcatggatttgagagggattttacaaatcagtcagtgagttatagtagccagtgaattgtaatgggtgatagaaatggaagatgattctcaggttttcaatttgagaacttagtagatgatgatgccatttgctgcagcaaggaatgtagactgagcagaagttgggaggaggagatgaatgaaattctggagtttttatttatccaatatataactaggtgacacaggagagaagagtctgggctctaaacagacatgtgagattcataaatataagctataattaagcccatgcagtgactcccagtgagcttttatgttgagaagagaagatggccaggggtttcccattagctgtatgtacagtgtagagtcagtccttgtgtggattatcagcatttaaggagcaagccaagcaaaaggagttattggtgaaaacttgggaacagtagaggagggcaaaggccagatgagagcaactttacagctgcctgtagagatggttgtcaaaggagagggtacctgatgggctaaggttacaaggaaacgggatgtggaagagcaaagggcatgagccctactacagtggaccgaaaaataaatgggtgatgaaatgcaggtggcaaatatagatcactatctcacgactttgattataaagcagagtaatggccgtagcttgagaaaatagtgaagtcaaaggaaagtttttaggatgctggcagcttgagcaagtctgaggctgtggagccagcagagaggaagagattgaagatttagaagagaatttactgctgagagagaggaatttgagtgaaaagattcgggagaaatggtcaggatacaaacagcctctctggggaataagagcgattgcagaccagaacaaatacaaaagtcattaaccagtgttaagggcccaatcataagtttgtaccagtcagatagcacatggcttttgtggggtttttttgttgttttttgttgttgttgttgtttgttttttagcagctcagtagcttaggtagaggagtcaagaaaagaaggtcattgcccactgtggtggttcctctgcaggaaactgaactatgatttcaacctagtaggtcaatggcaccaagatttctacagctcctccaggtcatcagaatgtacagtgggtgtaacctagtcacaagaagggataaactgcaatagcagtgtttgarccaaagcaagaaacacagcttatataattctctttaatccaaattaattttattctgatttttatataatttcataggtagcttttaaatattgccagaaatatggaagtgacaaagtacgtgtgataaccctggtgaagaatcgtggaaaaggtggagcgattagaatggtaatacatattttcaacatttttatctaaaatatgaaggtatcttgaataatgtcttttgcagacttgtatgtttgcccactgcttgaataccagcatttcaagttagtgataacataattttaataataacttcatgtttttagtcaaattttaagatgtgtcatatctataatatagtgggtgatttaaaaatagatttatgtatttatgtttatcttaaagtttaaaatgttaccatctacctctgtatctttgatagagttagcagatagcttatgtggttttttgcagtttaaaaaatgttttttgtattaagttttaccttgatgaaggtatgctgttatgcatggtagcatgaactaagatgaatttgacttgggtctgtcctgatgaaatgtgcagtctaataggaaagrtaagcatttgcataagtaaaaaagaagattataattatgagagacatgcagataaagtgctaagaaatttcaaaaaagaggttactgtcagctgaggcatatcagctatgaatcaagctggaagtttaaaaatcaagatatgtgaaagaaaacctaaataattgactttgaggtccatttatttatttttccctcataaaaagaagtctaaaggtgggcagtccagggcttgttcaactccacagtcatcagaagtccaggcttctgccgtttcactccttcttcctcatgcacacagggtgactcctggagcactagccatcacgtccacattcaacaggaaggagaagggaaatggtcaggatacaaatcatcacatgttgccctcttcacagtgtcttatgagttgggtaatattagtttgattattatatagttgaggaaagtgagtaaagaaggtaaagtaaattacccagtgttatcagatgataagaggtagagtcaagatttggatgcagttagtttcactctgaaagccatgcttttaacctctctgataactctatagagaaaagacttgagaaaacagcacgccatttagtaaagccagaaaagacagaagtaggaactctttggatatgtactagaaacagtgattcactttggctgggtcacaggatatatgaaacagaaagaaagtaggattgatgcagtgtcatgatgggctttaaatctatccatttgtttctttattcagccaatgttgtattttcattagagacactgagatgaaagacacctattctgtccttaaggacatcacagtttagtagggagacagaccattgccatacagtgttgtaaatgctataatagaagtacatgcaaaaagttggtgccaccatcttttgagggcagcagcacagatgtcccagaggaggcaaattctcggcggggtctttaaggaggattaggacttaaccacctccaagttgggagggcagggagcctagacggggaacatgaacaaaggcacagcaatgtgaaagaacatgccacaataaaggacccactcatggtacccacgtcttgactggagataaggctggagcggtgggtgagttaaggtcacaaactgtagacgaggggcttttacattttttaccattgacagagtgacactttaatcagccagcatcaagtgtagcaatattgggcaaggtatgatgaatatttatttggattatgatagtgacagaagagaagaaaatgaggggataaatgtgagagctattaaaatgacatagcattgggtctgggatcagagagaagaatgacatgctaagccattcttacattgctataaagaaatacctgagactggataacatataaagaaaagagatgtgattgattgacggttctgcatgctgtacacggagcatggtgccagcatttgcctctagtgaaggcctcaggaagcttccactcatgatagaaagcgaagtggaagcaggagcatcgtatgacgagaacaggagcaagttagcgggcacggtggtgccacacacttttagacaaccagatctcatgaaaacttgctcactattgcaaggacagcaccaagctgttcatgagggatccacccccatgacccaaacacctcccactgggccccacctccaacattggggatcacattgcaatatgaaatttggaggggacacagatccaaactatgtcaaatgagtaccactggccttgggtaacagggaggatgacgatgccattaatagaaggaatgaaacactggaggaggagctggtataagaggcagttatgttgagtttgagccatgttaagtttgaaacaacatgcagtggtatccagaatagcctaggagagaggatgtgagtgagtcatccacatatgtcagatgatagttgaacctgaagccattaaactggcaaagaggaggttacagagaaaaggagaatcaggaaatcttaaggcagtgaggcacatgagaaataatgggtataaaatatgactgaggaaacacaaatgggagttgctatggtagactgccttttcaaggagctgcagcaaagtgaaggccatagacggtagaacaggaaagtaggcttaaacaagtttgatcacgcatcattgaaattagtcacttactggttttttgccccatttcagactaatagctccagtttttttaccacctcagcctcccaagtagctgggactacaggcatgtgccactatatcaggctaattttttaaatttttttgtagagatggagtctcactgtattgcccagactggtctcaaactcctgagctcaagcaatccttccacctcagcttcccaaagtgctaggattgtagtaggtgtgagtcatctcacctagccttttgcatttgttctaatgggtgtgattaaaaagacatcacagatactaactagttagcttattataccatagaataaatgatctgatttctctctacatttgtatatgtcttacctatagtcacactatgttgtgttatcaaagcaattttactatatcaaaccataaatatatttgcacgtaagaaataaggaattcactcaaatacatcagagaaattaaaagttgatgtgcagtttatttctgtatgaaatatgcactcatggagccataatttgcacaaaagaccagccaattcagaattgaatggcataattttgctgtttcaaataccgcaaatggcataacataacatttggatttatgcataattcttaaagtttattgacactttttatttctttaattaatttagtaaactttagatcctataataaatgatactaaagacctgtgcatttcacagcatatctatatattagaatgtttaatctgtctataaacatgttctttatatgtggttctaagtagcccgtaattcattttaagcatcatgacacgataaacatataatatgtatgatacgtactgtccgttttttattctttgtgatgcagaatatctttaatttgtccaaacctattttattatcttggtattttccaagatatttgtagtatgacttcacaaagtttttaaaataatgaagataggcaataggttcatttgagaagatcttaatatacaggtaatttgttttcagtgaactctggcctccttcagccatctcatacctcatctttcactcttaggtattttaagtagaacagactgaagtgtcattgaatttaacctgagttttaaccaattttctttgacttgaaattttaaaatacagggtatattcagttctcgaggagaaaagatccttatggcagatgctgatggagccacaaagtttccagatgttgagaaattagaaaaggggctaaatgatctacagccttggcctgtgagtataagaatgtagtttaaataacattcagtcaagaatgcaggagagctaaagtaaagttaaaggagagtttacctatcagtttaaaaactgagtgtttttggtatgaaatccttatacaaatggtacagccccatagaggaactgatcattttgttacaaatattgtctgattttatgagattcacttgacaattacttatttaatattgtgaccatttctctctcttggtttctgattgcttctacccaagttttaatatttattgtgcatattcaattaagacttttatttaaaagtatagcctgaattccaggtaaagatgtgaaatgaagctggatcacagaatccagtttttgatgaaacaaacaaaatcacaagcagcaatcactcaaaaaggattatttgaaacttcacaccataacttcaaaaagtggaggttgaggaaagaaakaaaatcctagtaccattcctaccttttaaaagccatttagagaaataagatgaatttggcaaacgctcaggatcctgagcgtttgccaaatacttcccaatctggaaaaaatgaataagagaatgaaaaagcacccttggacaacatcaaacaatatacctaccatcacacaatatgtcaaacaatatacctaccaccacacaatacgtcagaatttcagcagaagcaagaaaacttgctgaggtctgccatttttcaggactgtaagctgaattggggacacagatccatgtgactagatcctttcctggatggagtgtaccttgttcaagacactygacaaaatctcacaagaccagggaacccaagtaaccaacaaagccacgtagagctccaggggagggtccctcctccctgccttcccaccgtctaccctcaagtccagatataatactcaggccttgaaattctagtttagagggggaagagatacaggtacatcaaggagaatgttcatttactgtaggagagctgcccatgttaatcatgacaaaataaaagaaagaaatggcaatcacaccaacatataattacacaaaaaagaattaaagttgcatacaaaagatttaagacwgtaatccaaggaaaaggacaaaattacatgcaagtattctggctaaagaaataaaacaatgaaaataagaatttagcaacacaggtcttcaaaggtaagatgacaaaacaacaaaatggtattaaaagaaaaattacaggccaggtttacatgcctgtaattccagcactgtgggaggccagggcaggaagatcacttgaggccaggagtttgagcccagcctgggcaacataacaagaccccatctctgtaaaaataagagaaaaattaacagggtgtggtggtgtatgcgtctagtcccagctacttaggaggctgaggcaggaggatcatttgagcccagcagtttgaggttatagtgagctgtgattgccccaccgcactccagcctcagtgacaaagcaagagcctgtctcaaaaaaaaaaaaaaaattacagaactaaggaaacaaattgagaccaaaataagatgaatatgtaaaactatctatgaatgaaatagacctagtttagaactgaatattattacatatttattaagatcctgttatagcaaaaaccaaaccaaacaacacaaaaaggtaaacatataaggcccccccaaatttaataataattacagaaaaactcactgcatatccttctagaaataaatatttatttaattccacactttgtgaagtatatttctcccccaccatcatccatccccatcccttgtatttctagctgttttttttgtttttttctaggtgttttttgtttttttaagmttctaagtgaatcaactaatataaytcttaagagaattagctgtaaagatattcataccattgctcttcagacaagtagcactagctgcatgtgtctatttaaatttaaataaaatgaaaatttagttcctcagtttcattggccacatttaaattacttgttgctaaaagctacctttttttttttttaaaggagataaggtcttactgtgttgcccaggctggactcaaactccatcctcctgcctcagcttcctgaatagctgggactacagaagtgagccaccatgccccgcttgttgtatagcatttccatcatcacaaaaagttctctggcttataacatgatatgaatttattgttggatatgttgtagttcactcttactaaaaaagtatttcatgtccaacatcttagtaaatcatgataggctaaaaggaaaatctcattcataaagttacttggtgtgatttcctgattttctccagaggaccccaagagaaacttgataaatatttcccttgcattatctttctagagggagtcactcagtgggagggagggcataaggcatcagatttttagcagctgattttgtcattcagcagtagggcaaagataatttaaatgattttgctgatgttagggagtgaaccaaacaataaaacaaaaatctgaactttattcttataaatctagttcctttatactactctgtaaagaaaaggagttctgatgccatattttttccttatcataatcccatttactacactgttactagaaatgttaagttttaaagaattaaagcatgtgattatcattaagctattaattcgtagccttggttttacagcaccttaaagtatccctaattatttaagtgtcccagctcaattgaattaatttgaattaaatttagtaagttttattaatatgcatcatgtaatactctttgcaggaggtggaaaggaggcaaataaatgataggtggttaaagttacaaaattcatagtttttggatccacccagtgaaaaatatggttctgacaaagcttataaacagccagtcattgctctcagaaaacttacattctgaagttgacatgcatagagaaattagaagaaatcttcttacttatgtaattcaggtgttagagaactttttctgtaaaggaccatatagtaaatatttcagctttaaagccagtcagcctctgtggcagctgctcaacgctctattgtagcatgaaagtagacatagataaaatacatcctttatttacacaaataagcagcagatcagatttgggctacaggctatagtttgctgactcttaaatctaatttaatcatttatccaatattggaaagtttttacaactacctagtgatctttcagcctctactgcatagctctagtgatgcttaagcagctcattctgtctcagctcagctgtgaagttcctctagacaccaaatgcaaatatgtctccttttaatcacccccttccattgtttctgtcttctgtagctacacaaaattatctactccacttctttgtgacagcccttcagagagtcaaagctgttttccatgtgtattctctgttttaggctgtcagttcttacggtttttgttgttgttgtttgtttgtttgtttgtttttgagacagagtctcgctttgtcatccaggctggagtgcagtggcgcaatctcagcttactgcaagctccgcctcccgggttcacaccattctcctgcctcagcctccccagtagctgggactacaggcgcctgccaccatgcccggctaatttttttttgtatttttagtagagacagggtttcaccgtgttagccaggatggtctctatctcctgacttcgtgatccaccagccacggcctcccaaaagtgctgggattacaggcatgaaccactgcgcctggcccagttcttacagtttttaaacatagcatatttttttcttataattttccactgaagatgtktctgttcgtgtggatttggtttccacattacattgttacttcgtacaggtattgccaactctttttcctgttcattgcctttgaactttgtctctccatctctatactggtrtggatttctttctgtgttcttttgctttgttttcaggaatggaattgtggctagttatctcaacttcaacttgttagatttctgtgtctaaaagtgtaggttcttgttctatcttagggcaatagctgttttctcaattcatttaagccacaaatttgataagcatgccttgcatgtatttccctaagccctaataaaaatagcgactgaaatagttcagaaaataatgaaacaggaacgtgggttttgtagtcaagtcctataattacgtgactgtctcactagatggcagtcattagcttaaatatcttttacaatattgctttgaccatttaagtcatttctttagtacgttttacagtggtttctaatgtcttctttcttagctgatttttttttaatgactacaaaaagaaatttattactacttgcttgtatttcctcttagagtaaccaggttacatgttctggttctgatgattcttatacaaagtcatcttacaaaagttgcctacaatttcttttctgataataagtgctcctgtaaggttttaaactacatgtatataatttaagtagagctttgtataatacatacaaataaaatagggcatttacattttcatactaaaaattttattttattttattttatttttgagacagggtctccctgtgtcacctgggttggagtgcagtggctcaatctcagctcactgcaacctctgcctcttgggcttaagcgattctcgtgcctcagcctcccgagtagctggaattacaggcacgcaccaccacgccaggctattttttgtgttttttggtagagatggggtttcactgtgttggccaggctggtctcaaactcctggcctcaagtgatctgcctgcctcggcctcccaaattgtggggattaggagcatgggccaccacgctcagccaaaactttcatttatattttacttgtattttcttttcccacatctttgttttttaatatgcaaagctttcctctcagattttcagtttcctaactggtagttagtctacctctttttaaaaatatgcttgttttttagtaatttttctaagcaaagtatatgctggccaggcacagtggctcacatctgtaatcccagcgctttgagaggccatggtgggaggatcgtttgaggccaggagtatgagaccagcctggccaacatagcgaaatcccgtctctactaaaaattagccaggtgtcgtagcgcacacctgtaagcccagctactcgggaagctgaggcatgagaatcactagaacctgggaggcagaggttgcagtgagtcgggactgcgccactgcactccaccttggtcaacagagagagactctgtctcaaaaaataataaacaattttttcaaaaaataatcccaaagtatatgatgatcacttgttcagttgcttaacttttctaaatagaatcaaaaatccctaacaggcaaaataaatgctaaaaagtgtgtatttcatgatcatagagtcatttctcaggctgtgacttaggttttaaattattttatttattttttattattattttttgagacaaggtctcattctgtcacccaacctggagtgcagtgatgcgatcttggctcactgcaacctctgcttccagggttcaagcaaatctcatgtgtcaacctcccgagtagctgagagtgcatgtgcaaaccaccatgcctggttaattgtttggtatttttagcagatgaggtttcaccatgttgccgaggctggtcttgaactcctgacctcaagcagtcagccctccttggcccccaaagtgctgggattacaggctgagtcaccacgcctggcccttaaattctgatttagacatagctctaacaagctgagtttttagttttttaagcccacagatgactagaattaatggatatgaaaaagatacggagaaaaattacattaagaagaaccataggaagcagatcttaactacacgcacaactcagtctggagtgctgggttgcttactaatgaccctgaatgctcttctatctctaatatagtaatccttggccagttctagttttgtataccaatgattcatatctgcgtgcatggtttggttccttaaaagaatgtgacagttagtccttctccctttttttgtggaccatgtgagcaagtctaagaagctggtatgtttgtttcaccctctcaatatatgggtagaaaagcaggcttccaaaagagaactcaacctccaaagtcatttgttttagacaccataactctgaggtagtgattaaaatgaggaaatgtggccgggcacagtggctcatccctgtaataccagcactttgggaacctgaggacaggcgtttgagaccagcctggccaacatggtaaaaccccatctctactaaaaatacaaaaacttagccatgcatggtggcacacacctgtagtcccagctactcaggaggccgaagcaggagaataacttgagcccaagaggtggaggttgcagcgagccaagatcgtgccactgcactccagcctgagctacagagcaagactccataattaataaataaataaggaaatgtatgtcaggtgtttagcatgtgttcagcactcaaccagtacctgtaattattaacattcatctttttttctttttttttccttttttttttttttaattgagaccaaatctcactctgtcacccaggctggagtgcagtggcacaatctcagctcactgcagcctctgcctcctgggttcaagtgattctcctgcctcagcctcccaaagagctgggattacaggcatccaccaccaggcccggctaactttttttgtatttttagtagaggtggggtctcaccatggtggccagggctggtcttgaactcctgacctcaagtgatcctctcacctgggcctcccaaaatgctgggattacaggcgtgagccaccacgcccggctaacattcatctttgtgcttgatattttttcatcagatccaattctgttactgtttatgattgttaatataaattagctatatctctatctattccttttctccagtaaattgtgtgaaaatatttaacttaaaaagtactgaggaccgggcacagtggctcacgcctgtaatcccagcatttcaggagactgaggcatgcggatcacccgaggtcaggagtttgagaccagcctggccaacgtggcagaaccccatctctactgaaaatataaaaattagctgggtgtggtggcacgtgcccataatcccagctacttgggagctgagataggagaatctcttgaagccagaaggcggaggttgcagtgagctgagattgtgccactgcactccagcctgggtgacggagtgagattccgtctcaaaaaaaaaaaaaaaacaaaggtggggcgcagtgactcatgcctataatcccagcactttgggaggccgaggcgggtggatcatgaggtcaggaratggagaccatcctggctaacatggtgaaaccccgtctctactaaaaatacaaaaaattagccgggcatggtgccacgtgcctgtaatcgcagctactcgggaggctgaggcaagagaatcgcttgaacccaggaagtggttgttgcaatgagccgagatcttgccactgtactccagcctgggcaacagagtgagattccattaaaaaaaaaaaaaaatactgagaaagattttgattgatttagcatttcttgctagaagataatatatactttacttcttaccaccgtttttttttttttttttttttttttttttggagacagtctcactctgtcgcccaggctagagtgcagtagcatgatctcagctcactgcaacctacacttcccgagttcaagcaattctcatgccttagcctcccaagtagctgggaatacaggtgtgtgccaccatgcctggctgatttttgtatttttagtagagacrgggtttcaccatgttggccaggctggtcttgaactcatggcctcaagcgattcccctgcctcagcctcccaaagtgctgggagtataggcatgagccactgcacctatttttttgtttttttaaatgagttgggatctccttctgttgcccaggctggggtgcaatggtgccatcatgactcagccacaatcctcttacctcagcctccctagtggctaggactacaggcacatgccaccacacctgcctcacttattaaaagccaactgtcatagtaacttaaatactcattttaaaaaaccatgggaaattcagttatactccaaaagaggtttaaaagaaagagactccatgtctacagacattttctaacatgggcagtttttaaaacaaagatatctttcatttctgaagaacagctaactttttgaaaaaatgtttagattaattctacctgatagtgagattggtatcagggattcagctcttacatcagaattcttcagatacacaaaactcttaraagctcttggggacttatgctgagataaaaacgagatttgtaaaagaaagttttttggattttgatttgtttttagttaaattacatggtattttaactctactcatgaatctttgaaatggagaagtatgttcttttttatgtattactcaatagtgttgttgctcttttcaagtttaaagttaaaactgatttgccatatgctatttgaacttttaacatgcttcctctctaagaaaatcattctctccctttctgcacaaagtacctctaccagaaaaacaagggaataaattattttactactaaatagtaggcaaagtatataacacaatttttttttttcctgagacagagtctcggtctgttgcccaggctggagtgcagtggtgcgatctcggctcaccgcaacctctgcctcccaggttcaagcgattctcctgcctcagcctcccaagtagctgggactacaggcgcttgcaaccacagccggctaatttatgtatttttagtagaaatgaggttttgccatgttggccaggctagtcttgaactcctgacctcaggagatctgcctgccttggcctcccaaagtgctgggattatagccatgaaccaccgtgcccagctaagaaaattcttttctttttttttttttttttttttttttgagacagagtcttgctctgtcactgaagatggagtgcaatggcgcaatcttgtctcactgcaacctccacctcccagattcaagcagtttcctgcctcagcctcctgagtagctgggattacaggcatgcaccaccactcctggctagtttttgtatttttagtagaaatggtttcaccatgttggccagacgggtcttgaactcctgacctcaggtgatctgcccacctcagcctcccaaagtgctaggattacaggcataagctaccgtgcccagcctagaaaattctttaaagaaaatatggatagctaaaacatcccccaaacgttttatttttttattaataataaagatagaataaccagaactgacaagaatttgatttaatagtcaatatcataccagttaatgggaatgtaagtaacatgttttgttttgtttttttttttttgagacaagttactgctctgttgcccaggctggagtgcagtggttcctgccttggcctcccgagtagctgggactacaggggcacgctaccatgcctggccaatttttgtatttttaatagagatggggtttcactatgttgccaaggttggtctcaaacgcctggtctcaagtgatgtgcccacttcggcctcccaaagtacttggattacaggtaaagaaccttttaaaggaaaatttggcccatatgcattaaaaaacattcagacttttaacttagtattctacatctatgactccaaagaaggaaatctaaaatacagataagagttttatattcaaagatgttctttcagttgcctttctataacataaaattagaaaggacaacaaataggcaaatagtcaaagtaatggtaaatctgtacattaaaatattgtatagcccttacaattgacaagaaaaagaaaaactaccatgcagcactattatgacaaattcttgaaaggtagtcaaacttgaatcttatcaagcctctgaatctaactaccagtttagaggaagtacaggggacaggagaacatgttaaatgtcaccatgggggtgcaatcagcaacatctaaaacctaggaaactgtagagcaaacaatgtggtttcttcaggttacaagaaaaaaatttaaagaggtcgggagaacccacagataaaagaaataccaactgatttgtatggatttttttggtggtggtggtttgtttttttagacagagttttactcttgttgcccaggctgggatgcaatggtgcaatcttggctcactgcaccctccgcctcctgagttcaagcaattctcctgccgcaacctcccaagtggctgggactacaggcgcatgccaccacgcccagctaatttttgtatttttagtagagacagggtttcaccatgtaggccaggatgatctggatatcttgatcttgtgatgtgcctgcctcggccacccaaagtgctgggattacaggcgtgagccactgcgcctggccctgtatggattttatttggccattcattcaaacaaactgaaaacatttaagagagaattgggcaaatttgaaatatgtatgtctgatggtattaaggaattattggtgttttaggtgtcatagtggtactatgattgacattatatgaatttgtaacatatgatatctagaatttttttcaaaataatcccaggttgggtgggatggtggkgggggggctttacatagaacaagattggcaatgtgttgctaattattgaagctaggtagtaggtatgtggtgcttcattttccccttgtttctagttttgcgtatgtttgaaaatacccataataaaaagtataaaaacagtaaactttaacatgaataaatttttgttgaaaaagaacatgacatacatgagtaaatttgagctatgtttttttgtaatgtagagaaaaaaagaatacaaagaaatatacacagtttaaaacagtggctgcttttaggtagtaagataattcatgagttttctctttaattatcatttatatatgtaaatttatatacttgcaaattttttataatgagcacttttaaatttatttttgttagtcattcaaaattcaaatggtrtaagaaagatatacagtgaaactagctctacttttcatctctcagttaccctcagatataactagtgttactcatttcttttattgggaagatgcatactgtgtatgtattcttttttaaattgcaaagtgtggtactatacagtgttctcttgtttctacttaacaatgtgtcttggagattgcactatatttatgcataaagaccttcctcattctttcacatcttcatagccagtcccttcggatggagatgcaggtttgctacttcaaatactgaaatgattaaactctatgaaagtcattttacacatatgcaagtatatttgtcggaagaattgttggaattgctgggtcaggttatatgtatatttgtaattttgataacgtttcaaattgctgttgctagagagtgtgcgggcacagtatggtaaaaaattataggttttattcgcattactcttggaataagtgtaattgaggatcttttcagttgttcaagagctattttcacttcctcttttgtgtactctgtttcaagtctgctgcttttccaactgtatttttgggtactttttaaaatagtaaatgcactttatgctttttggaaattaaccttttgtctgtagtataaattgccaatattttcccccagtttttttgtcttttagttttgaatatggttggattttttgttattttatcatacaattctttaaaatgttactaacaaatggatcagtcttctggttttttgtacttgtaccttccttcagattatttacaaaatgatttctgatgttttacatttaaatatttgatgtatctggactatgtcccattattcagttaagaagctcaagtccaacttaatttggtttccaagtggctaccacgatgtcccacaccatttgtcagttcgtctttttcccactgatttaaaaggtcatctttatcatattctaagtactcatatggctttgtgtatgtgtttcctggccttttcattctgtccatggaattgtccatggatttgtctattcacattccagcaccttagtttgaattattgtagctttatcatatattttttaaatttttgtgatgagtcatcctttactcttgaattttcctggcttttttcttgattatttttgcttctcttttaaaaatttttttattttctcaccactatactaacaaggacctttttttttttttttgatggaaagtctaaaatcagcttgtccagttcagtgaaaaatcattttggcatttttattggttttaagttaggaagcattgattttttttttttttttttttgagacggagtcttgctctgtctcccaggctggagcacagtggtgtgatctcggctcactgcaagctctgcctcccgggttcacgccattctcctgcctcagcctcccgagtagctgggactacaggcgcccgccaccacgcccagctaattttgtgaatttttagtagagacggggtttcgctgtgttagccaggatgatctcgatctcctgacctcgtgatctgccctccttggcctcccaaagtgctgcgattacaggcgtgagccaccacgcccggccagaagcattgactttttaatgctgttactatatcctctcatatatcatgacaagaccttctgtgtgtttaaatcttttgttttccttgttagcatttacatgtttcctttatttagatcttgtctaaactttctacctttcttataaactttatttctagatttttcatttttattggtgttataaatgctgtcttcgattatatcttgtgattattgttcgtacatgtgacatctaaagttttgtatatatattcattttgtgactactcatcttttaaaattctttgtttctaatgtagtttttcagttgctattctttgattttcaaggtatataattatgtcatctacagataacccttttctttctcataccactaatttttctctcaaataatatagtrttttcacacagaaaatatcatttaaagttacgaattttaacataacgcatgccccttatatttagctctatttaagcaaaatttagtgtcctcttagtatgattaggcttctcaaagttgtacatattctgaacttttcaataaacctttaaaagatttttaatgtsaacttttttaaaatcagtttctaaaaatgagatattctcattgaaaataaatatttttattagtgatatttaaatattgaaaaactatctctgctttttccctcagaatcaaatggctatagcatgtggatctcgagctcatttagaaaaagaatcaattgctcaggtgagacttcattaattggcatgggacagccaattaattggcttttatttctttttttatatatatatctggcaagaaactggcttttatgtctaatctcttaaacatgaggttcctttcaaaagaaattaatgttttaattgtggaaaggttatgaaggattggcacattttagaattgatttttttttaagcatatacaagaagatgtggacttcgctttgccttaggatggaagcagttctttttaatatatttttaagataaagagaatctgttcagtaataaaacaaactttaaattacgcytttttttttttttttttttttttggagacggagtctccctctgttgcccaggctggagtgcagtggtgcgatcttggctcactgggcaacctccacttcctgggttcaagcagttctcctgcctcagcctcacaagtagctgggactacaggcgcacaccgccacacctggctatgattttgtattttggtagagacagggtttcactgtgttgcccagcctggtcttgaactcctgagctcaggtaatccgcctgcctcagcctcccaaagtactaggattaaaggtgtgagccactgcgcccagcctaaatgatgcattttttaaccaatcaacttgcctttatttttttctaacattggcacagttaagtgctttattttgaattttattcagttaaaaatttttttttaacctcattcctcttagaaaaacactatcactataccttaaaatttcacaagtttgcaactgcccttttagggtgtaaaaatgtcactaaagatgttcaattcttcattttgtaggttatgctagaaaaactagagtaacaatttcccaggtccctcttacgcacatgaggctttgagaaccagtagaataaaaggttgaacctttcccccaatgattcggaagagagatatgtagaaattttaatttttaaaaaaggtatattgatgacagagtgacaaaaaccttttaaggattatattgaagtacaaaaacccagactctctttttattttttgtttatttatttttgagacagagtctcgctctgtcacccaggatgcagtgcagtggcgcaatcttggctcactgcaacctctgcctcccgggttcaagcaattcttctgcctcagtctcccaagaagctgagattacaggtacacgccatcatgcctggctaatttttgtagttttagtagaagaggtttcaccatgttggccaagctggtctcaaactcctgaccttaggtgatccacctgccttggcctcccaaagtgctgggattacaggcatgagccaccacgcccggccttctttttttgtttgttttttttgtttttatgagacagagtctaactctgtcacccaagttggagtgcagtggcgcaatctcggcttactgcaacctctgcctcccggattcaagcgattctcctgcctcagcttcccgagtagctgggattacaggcgtgcgccaccacacccagctaatttttgtatttttagtagaggcagtttcaccatttggtctcgaactcctgacctcatcatctgccctccttggcctcccaaagtgctgggattacaggtgtcagccaccacgcctggcctcttctcttttttttagaagtaattattttactagcacctagtctagtattctatgtatcctagagattctcactgatgtttgaaaaaggttaatctgttaaccatagagaatagcacactcctagatatttaaaatgggaagagagcttagaattaatcctgcttcatcagtttaacaacgcacgggggataagaaaaggaaaagtatgtgtctaagatcttcagcacattttatatatatatgtgtataattataaaatagtatatatatgtataattataaaatagtatatatataaaattgtagtagaaactattaaatactaaattcccacaataggaaatacagctatagccctagatgaaatgtgcagccagtaaagctgatgataatggagactatttaataacatgggataaaacctgaaatattaggttgtttgtaaaaaatagtatgatattataaatacagttatctgtgttgaaataacaaataggctggacacagtggctcacacctgtaatcccagcactttgagaggccgaggcaggcggatcacctgaggtcaggagttcaagaccagcctggccaacatggtgaaacctcatctctactaaaaatacaaaaactagctgggtgtggtggcgcccacctgtaatcccagctacttgggagactgaggcaggagaatcacgtgaacccgggaggcagaggttgcaggtgagctgagatcaggccactgcactccagcctgggcgacagagtaagacacctcctcctcaaaaaaataaataaataaataaataaaataaataaaaatttgtttttgcacactaaaacagctaatgaaaatagatcaatactaatttaatggttttttaagtactttttttctttctttttttttttaaatatattaatgagatgagaaaggataatctacttggtgaaggaaaaaagatagtttggaaaaatagccaaatacagacttaggagccagtgagtaatataggcaagagatagttcttgtatttgttggtggtggctgtagaaaggagccatgtgttttggttttgtttttcatggtgtaaattcttttcacttagaacttgcattggttgaaaactctgaatttttcctagaaatacactagtatttaaatgagacttatgctatggtctaaatcttttacctagtactgctcttagccaggtatcaagggatcaatcgcaggaaccacatatttataattcatcttgtctccatccatccattctttcagctctaaaaccaagtgtttggtttagtgytcttgattcccacagaattggctgccattctatagaaagaagggataacctttgatactcactagagatcattggttgtccgctgcagatgctatgacaactactgctcagtaggcttgttcaagtccagcttattcttatagaatcatagctgtctcacaaaaggttgtctccaagaaggcacaagacatgcatccgcctcatgtctagaaaactgcagcatggctttccatttcccttcrtgtgctgtcagtaataaacccctgcatggtgatcaatctgtggacaatgagaaaattataaaagaactaatcaagatagcaaatgacaacttcggtagcttattgcctaatgttcagaaacatctttccttgatatttttctacatttctcaattattctaccacctcttttactgctcccttggaagacaaacatgacactgccctgatagagtcttgtatcatccttaaaagtgcttacattcccatgtgttctgtataacggtaatgtttatatatggtctggctattcttgaatttatcattttaaaaggattcaaaaatagaatccattagtggttacttaatgtttttagtttttgtttaaagagtctttgcttaagtcctgggacttctttgaacttcttattttaagttaatgaaattagaagtcacctttaaatttcacctgaattaatttcttgtttacattttataaacattgaagatactagcgttaacactgaaacagtgaaaattgttttccttaatgttttaaatggccatttcagaagatcatataagccttctctcttttagtagcttcacttaactaaataagtctatcctatattttaggtatcttctaaattttaagatattttgcaaagttctaaaaacaaaaacaagattatcttgtttgtgactaaccttgttaagcttttaaatatgttagaaatcaaataacttaaggtcttcatgtgaactctacatttttctgctttttaaaaaatagccattatcctaaagcaaacaaaaatcctgttattaacatccaagccagagcagtcatgaatagttttatttgcgaacaaataagctcactcaaatcacattaaaaatcactcaaggagaataatttataggtattgtttttctacctttaatttttatttttctatctttcaatttctatttgttcctttcctaagcataagtgctcttttggaggtttaatcagtcaaccagtatttattggaagtattttgtatggaaggcactgagcaagctgttgtgagattcctaaagtattttaagatgaggtttctgccctatctacttagagaggtaagacatatttacatcaacccataactaatgattctagatgataaatgagaagtgctagatcatttttaaaagtttgttttacataccatatagataagtattttattcttcctttccttcctgccctatttaatacataagtaaaattgtggtcaggagagtaaagtaagctttcaagctttcttcctgtatgaagaacattattgagttcctgttattttctgtgccaaacacttcgctatattctttaaaataatctcatttaatccttataataactttgtgaggtaggcattattctcattttatcaggaaatggacttagagggctgaagtaacttgttgaaggtcaccctgctaattagtaacggagccaggattccaatataggcctcctagtttggtgctttttcttttcttttctttttttctttttttttttttttgagttggagtctcactctgtcacccaggctggggtacagtggcgccatctcggctcattgcaacctgtgcctcccaagttcaagcgattcttctgcctcagcctcctaagtagctgggactacaggcgtgtgccaccatgcctggctaatttttgtatttttagtagagatggggtttcgccatgttgggcaggctggtcttgaacccctgacctcaagcaatccacctgcctcggcctcccagagtgctgggattacaggtgtgagccaccgcacctcgcctgatttggtgctttttctttgttactctgttccactgtggttctgtttggtgttgatggaaaaagccatgcaaaggaagaacgatactaaaaattataattttgaaaagcaaaagccaaaaggaggaagggacctttatcccatagtatgagatattaaatgttctaatagactcttaataggttgcttatgtatgtaagtaacgcatcattacttgagtctattgccttaactaaggaacattttaaaagatcgtgtcttaaagaagctgggtatagtggcacacgcctgtgatcccagctgctctgtaggttgaggcagaaggatcacttgatcccaggaatttgaggctgcagtgaaccatgaccacaccactggactctagcctggacaacagaaggcgtctctgtctctaaaaaaaattttgttattttattttttagaaagatcctatcttttactaaatcttaaatgtgaaagtctggaatccagtgataataatcttatgttcttatgttttaaaatgtgctatgttttatgaataatggaatattctgttactactaataaaattaatcatcagtaacagtagtgaaacttcagatgggattaaaacctacttaatcttaatatccaaagtattaaagaactcaatattttaaatgtatttaattagatctctggcatgcttagaaagaccaggtgtttgtttcaaactcctttctagtccataaccttcatgatactctgctatacatcttctgtcaatattctcattagttaagtatcaactgcaggcttatatctgtgctttgttttgtcaatacatcctggaaactgacagcttttttgaaactgaaatayatgtggggcaaagcagcataaaatatgtaagtaaacaagacgttctccttgctcacagcagcagccccaaacctgtttctcctggtaggctaaagccctggccgcttgtctgactcaacctccaggaaatgagtaactgcttcctagtgcctctactctgctccaagcagtaggcattcttgctgtttctttaatatactttgttggtgaagctcatggaacagtggtgttcttatgtaagatctaccagtcaattaaatattaaaatacagttgtctacagccaggtgttttcagtgtctcctttacagatgaatggaaaagtcatttatattttgtctttgttttcagcgttcttacttccgtactcttctcatgtatgggttccactttctggtgtggttcctttgtgtcaaaggaatcagggacacacagtgtgggttcaaattatttactcgagaagcagcttcacggacgttttcatctctacacgttgaacgatggtaggtttctgactggaatgtatccagtctgtcttatgacccagccatcttctaggtaatgagaaacagccctgtatatttataatgaacatgtagatttaaacaaaattgacaataatgtatgtaaacttgatcttgcctttatacttttcctgagttggatcttattttgaaaatacacaaacccaacaatatggtataaagttatgtgtgttcaccttaattgtagacagtagaaattgagtggcctgaaaacattttttttcctttgaagaaaaaagaaaaagctcagaaacatcaaaacagaatagggcacccattttctcttttcttccttctacggaagataaggtgtctttcctaagaccgatcttttgacctctacatctccttccaccttgtcaaaacctaatcctgtccatgtatttcatctcttgtgtattcagccttttcccttccatcacatctttcccagaaccctttccattgaccctgctgtgcccttccagctctagccctgtctccttcacaagcaaccttctcttgaaaaagtgttttatattcactggctttgttttcttgcttcccactcactcctcaccccaccttcttcatatggattttcttccatgcctcatcatttttttttttttttgagtttcgctcttgttgcccaggatggagtacaatggcaggatttcagctcactgcaacctccgcctcccgcgttcaagtgattctcctgcctcagcctcccaagtagctgggattacaggtgggcgctaccacacccagctagtttttgtatttttagtagagatgaggtttcaccatgttggccaggctggtcttgaactcctgacctcaggtgatccacccaaagtgctgcgattacagacgtgagccactgcacccagtctacttcatcttaacatctagccacctctatgtcattgaagccagtggtcatgttaaatgaccacttgtcacacttaacccatcagcagcatttgatactcctgagctctcttttgaaatatactggagatacaggtggctagcactgtcgtacagaagctgaaaccctgacatcagccctgacattctccacatgcatatatccaatccatgacagggcctgttgattttagcttttgtgttcctccatttctctccatctctaccaccgccatccagaacaccatccttctccatactaccatgctgtagcccacaaggtctttgcaaacttaagtgtgatcaatcatatgcacctcttctgcttatattccttcatgggcttcccatggtctttagtctggccccacctgtgtctccacatgcggactcttttcttttctaaccacgccccttctcaccttctccttcagatcttccttagggtagcctgccctcactctctaaagataatataattagctcgggtgcccctaattatatcctgttgcagtgccatgtgctgtattcatagcacctatgacatttgtagttttttcttatatttgtgtaattacttaatgtttctttttctcgattaaagcataatctttctccatgagagcaagagtcacatttaattttacttattagtatatcccactatctaatatcatgcccagcacatagtaggtacccagtaaatactgttgaaagaactaatacttagtcatgggttctgtgtgaatcctgttcatgttgggtatctgcatgattatgccagtatrtgtccatttttatactctctacaatttttgtgcatctgttttcaaagacctgttgtcttcctagaaatatatgccatataacccccaaaatactactttaaaaaatgtattttcagaattatcattcagactttttaaaatcttgtttttctagattaaaacattttaagtagtctacattagttgtcaaatttagatatgtgtttttattatgttgaaaaataaaataaactcatagttaatagacttcgaaatcagaaaatctaatttaagaaacgactctagaagtaaagccctctgtctgcattagctatttttcagtcagctattggctccagaactagggtcagagatgcaggttctttgtggtttgaaaggaagaatttagaaattgagaatactatttttcgttgttgaggatctttcatttttgttgaaatataaaaggttaggattgataacttaaaaatcatgaagcttccctgtcaggattgttctagggcagcattgtttaatagaaatatgagacaagaggcaaggcatatatgtaatttcaaattttctattagccacatttaaaaagtaaaaagatggctcatgcctgtaatcccagttctttgggaggccaaggtggggaggatcacttgaggccgggagttaaagaccaccctggaaaacatagcaagaccctgtctccagaaaaaaaaatttttttaattagcttggtgtggtggtgtgcacgcctgtagtcccagccactcaggatactgaggcaggaggatctcataagcccagtttaggctgcagtgagctatgattgcaccactgtactttagcctgggcaacagggtaaatcctgtctcttaaaaaaagtaaaaagctgatcagatttacttgttatccaatatatttccaagatattgtcatatcaccatgcaatcagtatgaaaaaagttgaactattttacattattttctttgtactatatattcaaatttacagcacatctcaattcagactagccacatttcaagtgctcagtatcctcatgtgctgaggggctgttgtattagacagcagttcttgtggggttaagttaaagaacattaatggggtttttttctttttttagtgttaatgttacatgcaagccttttatttattttgtgttaattgacataagattgacctcacttagtggctggggatggtggcttacagtggtcatcctagcactttgggaggctgaggcaggtggattgcttgagtccaggaatttgaaaccagcatgggcaacaatggtgaaacctgtctcggtttgttttttgttttaattttattagggaaaaaacaagattcacctcacttaaaattttaactgctcacatttttctttagggtacattatgtttatttggtgcctctaaaggagaaccaccaagtatacatgtatcagcttaatgagcagtatacccttcaccacaataatacgtcatcagtggtttttatttaaacatctttgttcctgcactttaaatcaagactaaagaacaatataagttacagaaaccaagttgtatatctatgccttatttccaaatgtcacctttgacatttgactattttttcttaaggattcattgaaatttttctcagaactttcaagaaatcgaaatcaaatagagtttctaggtactagaaatctgtaaaggagtatacctaaaattaagacttttggtatcggctgggcgtagtggctcacgcctgtaatcccagcactttgggaggccgaagcgggtggatcacttgaggtcaggagttcaagaccagcctggccaaaatggtgaaacctcgtctttactaaaaatacatttttaaaaattagccaagcgtggtggtaggcacctgtaatcccagctacttgggaggccgaggcaggagaattgcttgaacccaggaggcagaggttgcagtgagccgagatcacgccactgcactccagtctgggtgacagagtgaaactctgtctcaaaaaaagactctcagtatctctttggattcagaactgcagagttgagtataggtatgttaagtatatatattcaaatattaatataaattaaatgggtatgttaaaaacaaaaatagattaaaaarttttaagtaatgtaaatttggccttcaaattcagatacatatatatacagttgtctcttggtatccacagtaaatgaattctaggaacatcacccacagataccaaaatctgtacagatgctcaagtctttgctataaaatggtgtactctttgcatataacctatgcacatactctcatatactttaaatcatctctaggttacttatacctcatacaaggtaagtgctatgtaaatagtatgtgtttgttttttgttgttagtgttttggagacagggtctcatgtcactcaggctggagtgaacatggctcactgcagcctctgccttctggccttaggcgatcctcccacctcagcctgctgagtagctgggactacaggtgcatgccatcacgcccagctaatttgtgtatttttttgtagagacagagtttgccacattgccaggctggtcccaaaatcctgagctcacgtgatcctcccacctcagcctcccaaagtgctgagattacaggcatgagccaccgcactctgcttgtatattttatttgtattattttttattgtggttttctactgtttattttttaatattttcagtccatgattggttgaatttgcgaatgtggaacccatggatatggagaaccaactatgtatatagcttcatcttcagagctgtacttsacctaaattctttccatttatggaagttaaaatacttgggccaggtgtagtggttcacacctataatcctagctctttgggaggctgagttgggcagatcatttgggcccaggagttcaagacaagcctgggcaacatggcagaaccctatcactacaaaaaaaaatacaaaaattaactgggcatggtggtgggcacctgtaatcctagctactcagggcactgaggcagaagaatcacttgaacccgggaggtggagattgcaggcaagactccatctaaaaaaaaaaaaaaagcaaattattagctaggcgtggtggcacatgcccatagtcccasctactcaggaggctgaggcaggaggatagcttgagccctgaggtcaaggctgcagtgagcacttgattgcaccactgcactccagcctgggtgatagaacgagaccctgtctcaataataatatatatatgtttttttctttgaaatgaactttgcttcaatgaatactttttatttttaatcagtgttataattttatatattaaatagttagtttgataggcttagaatagtaattccttgccccaatttccactccatagctgtggccactttcaactgttttttgctatttctttgtggtatttgcatttgtgttcaaaataatgggtctgcatagctatttctcagttgttcagttttagatattaatttccaaaagaggaaatcgatgctaagaactaaagttctcttaaagttctgtataccctccacacgtaaactccaaatacagttttaaaataattattttttgtcagtattgatagtcatagctgtgtgaaaataattcacatttgagtgcagcatgattatattacctttcttgtactactttttgttttcccgaaggtaataaatgtttggggtttttgtttgcttgactttactatggatctgttacttactcatgttcaggctctcaagagtataattatcccttactgtgtttaaacacagattctgcatttcttcatttttgctggagacatctcagtcagctcatgtctttctgcttgctctctggcctgtgatacagcttgctccatcctctatctccatttccttatttatacccccatgttagtaaagcacattcctctattaactttctaaaaatatgagaaagaaactttttgattccttgcatgtgaaaaaaaaattgattctaccctcacatttgttttatagttaggtagagaaaggattatagtcattcaaaatggaaatttttcctcagaattctggaaacattcctgtattgtctttggcactccatacttctgtgaaggagtccaattctgaatcttgactcttcgcatgttgtttccacccccttttggaagctttttctccacagtgttttgaaatattataattctaggccttaatgtagttctttttcatgcattttgttgagtattcagtaggtccttctaattttttgtaaattgacaaattatagttgcatatgtttaggatacaaagtgatattatgatttatgaatacaatgcggcataattaaatcaagctaattaatgtacatcctttttttgtggtgggaacatttgaaatttactatcttagcaattttgaaatgtacaacacattattattaactataatcactacattgtataatagatctccaaaaaaaaaccttattccccctgtctgaggctttgtaccctttgaccatcatctcmccatctccccacccagcctcaggaaaccaccattctactctctgcctctatgtgtttgatggttttagattccacataaaagtgagaggatatgcaacatttgtctttctggatctgatgcttatttcacttggcataacttagcataatattctccaattccatccatgtcacaaatgacagaatttcttttttaaggctgaataatatttctttttttttttattttattttgtttgcagttgcaagatttaatagagtgaaaacagagctcccatacaatgggaggggacccaaagggggttgccacttcctgctcgaatgcctgggtttataatcccgatcattgtccctccccctgtgctctcaggcgatatatgatttgactatttctttacctcctgctttagcctaatttgtatttcagtgagccctctttacaacctgattggttgggtgtgagctgagttrcaagccccatgtttaaaggtagatgcggtcacctttcccagctaggctaaggaattcttagtcggcctaggaaatccagctagtcctgtctctcagttcccactctcaacaggaaaacccaagtgctgctggggagaccaccgctctaaccgcttcctgctgaattggggcgtagtaggggtcatgcagttgagatttcctcrggaggggtgccttcgatgccatcaacatcggagcatgggctagcaggccagtccaggggtccatggtagatcttagtcatgcactgcatctggggctccatttgaagaaccacttgtagttttacagcttcaattctggaagagacaaacttaacaaggaggttaaaaatacagggattgaaatgtatggcctgaagtgcaggggcatatgggtgtgggcagtgaaagtggggtttcctttagaaaaactcctatacattggggcatcagtatttccaggaagccacattctccatagaagctcttggtaaggagagctagtggtggtacagcggcatggagggggtgcggtgagagtgaaagggggtaagagaacagtaaggaggaaaatatgacaagggaaggccatggggattggggatctgcgattctagttactttcctcacggttgtcgcttaaagagcaggcacagatcctctagaggttcacaggaatagctagcgttgtctcctggattttcggtttcctttggcagtatccagggtttgactcaagtgtgatgtatccaagactccacaccagccactttaaacgcggttggggtagataaaaggactggatagagtccttcccaggatgtatctagggatgcggaattagagggaagggacttgactaataccatgtctccagggtggaatagttcctttccctcttctcggggacaggcttcctgtaatgttttaagaacttgttgatatttggctaaggaggtgatgtctgcaactaacttggccgtctcttggtcaagcacaaggtcattggttaggagtggctgtctatacagcatttcatatgggctaagtcccgctttttggggagagtttcggattcctagtaaggctgtaggcaacagagcaggccatgcaagatgggtttcttgggttagcttttttagatgtcatttgagtgtttcgttcattttctcgactcttcctgaggattgtggcctccaggcgcagtgtaagtgatattgtatgcctaacgcctgggatacttcctgggttaccgcagccttgaaagcggygccattgtcactctgtaagcctcagggaagtccgaatctgggaattatttcatgaattagtgcctttattgcctcttgggccttttctgtcctacaagggaaggcctccgcccaaccagtgagagtatctacccagactagtagatactgaaatccctgagatttgggcatgtgggtaaaatctagttgccagtgttctcctggtaatggcctgttctttgttctcctgaaggagcttggcgataaggcaggggattatttctttggcacacttcacaggccctgactatctgcttgatagttttgaaaagtcctggtccagtaaataacgatttggccatctgatgggtgctatcaatgcytaagtgaaaggtctggtgaagggttttaagtaatttccattggttagctgcaggcaaaagtatttttccttcttcggtggctagccatcctgaggggaggaaactatgtcctcatgaggtgcctcattctatttcttctgcttagtactggggcttcgtttcctggaggagattaccccatactaggggtccttctataagcatttctaatggagggtcccgccttgtagctcttttggcttttttggcttcaatatctgctgggcggttcccttctatttctcttttctttcctttctgatgatcccagcagtgtaagactgccacctcttaaagctcagctcgagccgtaacaaacacggaccagaggagtgtgcagttgcaagatgtawtagagtgaaaacagagytcccatacaaggggaggggacccaaaggaggttgcccaaggctgaataatatttcattgtgtacatataccacattttccttcccagtttttctgttgacagacccttaggttgattggataacttggctgttgtgaacagcgctgcagtgaacatgagagtgcagttatctcctcaacatactgatttcaaatcttttggataaatactcaaaagtgagatttctggaccatatggtaattctgtttttagttttttgagggacctccatacactttcccataatcactatactaatttacattctcaccaacagtgtacaaggtttcccacttctccacctcctcaccagtgcttgttgtgtcatcttttttataatggccattctgacaggggctttaatttgcatttccttaatgattagtgatgctgagcattttttcatatatctcttggccatctgtatgtcatcttttgagaaatgtctattcaggtcccttgcccattttttaatcaaattaattgttttctttctatggagttgagttccttgtatatttgtgatgttagccccttatcagatatatggcctacagatattttctcccaatccataggttgtctgtacagtctgttagtatttcttttgttgtgcagaagctttttagtttgatgtaatcccatttgtctgtttttgcttttattgcctatgcttttgggatccaatctaataaaaaacacatggcccagaccagtgtcatttagttttttccatatgttttcttctagtagttttacagtttcaggtcttacgtgtaagtgtgtaagtctttaatccatgttgaggtttgtttttgttttagttttttgatataagggtccagtttcgtccttctgcatagggatatccagttttcccaacaccatctattgaaaagtcatgtcctttagttctgagaaatgtttcttaatcytttttttttttttttttttttttttcacaatctctgttcattttctctgctctcttacaaacagatgtggaacctccttactagtcctgtaattttatcttctctcttcttttctagttttgatcttttgagatttcctcaattttattatccaatcttctttttgaatttttatctctgctatcaaaattgtaatttcctagaactctttttttttgtttttcagtattaactttttaaaaaacctattcttgttgcatgactacagtgtcttccactacctctgaatatcttatttaaaactttgtcattttctttacctgcattgtttctgttgcctctgattttgtgtttctttttaacactcattcttcacatgtctatagtatggcactaaaacactcagtagaagctgtgtccatgcgcagagcctctgattggtaaatttcgctacaggttaaaccagcagagctacgtgtgagaaagtcccaactggcattgtcttttggacaggtcattttcatgaaagtagagtccttcaatctcctgcctaggagctgtgagcctggctgttagcattcacagaaccaacagagaaaaggcatgaagggaaggaaaatcttagatgttcagtgagtcctacttgcagccccacctgtgtcttcacctgaagacatcagttgaggccttcaatgcctgagcctctggggtgctctgtggcacccttctcccactgtcctgtccatgttccctacaacttccaaggttttttttatttttattatcatttcctcccatctttgttcttatatgtttattccatattgttgtgttaattttgatagggctgcaggaggcagcagtggggttcatgtccatctggtgggtttaacagggtctcagcatattttttgtcctttaggaatctgttagtgagataacagctgtaccaggaactgagtaagaaaagaaaacacagtggctcagcccaacccatatttgcataaacaaatgaaggcatcttagttggagaataacccttatactgtttccccctaataacataaggctctgtatagaagtacttggtattttagttaaaatgtttgcttaggtaacagactgggcacttataatatgatgatatgagctgcatttttttgtatgtgtaataaatgtcttctaaaatgtttaagaggagaaagacataatttaattttgggtcagacacagtggctcaagcctgtaatctcaggactttgggaggtcaagccaggcggatcatttaagcccaggagttcaagacctgggatacataatgaaacctcttctctacaaaaaatacaaaaattaaccaggcatggtggcacagagatgaaaattcaaaaagagggctagataataaaattgaggaaatctcaaaagaacaaaactagaaaagaagrtaaaattataggactagtaaggaatatctgggcctatgctcccagatgttcaggaggcaaaggtgggaggatcacctgagtccagggaggttgaggctgcagtgagccctgattgcgccactgcattccagcctggatgacagagtaagaccctgtttaaaacaaaccgaaaaacccttttggtctaggatttttttttttaatataaggtgatttcagttaaccaccccactcttttttactcaattgttttgtgtatttgataagtcactagctatatactgatatccttagaaataatatataataatctttttcaggttatcaagtatcattagaactaactcagcccactagctaatattttgtttttgtgttaaaaggaaagttaagggtaaagcaccaggcttaatattgaaattatttcttttttcataagtatcacaattctaggggacgaaagttttaaaatacaacccacttttgtaagtggttttatcataatacttggaatttaaactatttacctaatggatgattatggtattgtggcaaaaaaccaaaaaatctcccaaattcaagttgtctgggattggagaaatcaaatataagtggactttaggcattttcttgtctgtattaataatgttttacaccaggccctagaagtttgaactgtgctctgtgcagcctagaaagtggggactgactcatggatgaaggcaaaacagtcarggactttagacagtttcaatgacgatgaagaagatttaacaggtagtagtgcttttcttcctgagctttaataccagtgagagaagcaactagttcagagaaattttgtaagcagaatccaggaaaacttatgagtcaggattcagaacctttaaggaaagcaggtttgacctaagccaaggcactgactgaaaagaggctttaagaaagacctttcgtaagtggaaggaaggatacactggagatttagactggaaatggttttaacagtatatattaggacaagtaagacaatatatcagattcctatgtatgtattaattatacccaaagagtatttcagactagtccaaagtagctttttactttcaatagttgccagtattatattgtgcaggacaccacagggaaggggaacagaaaagacaaggaaggccctggggacactattagaaaagtaatctggatcctctgatggtagaagaaaataggcaaccaactctaaagtaatgtaaaacagtctcaactagagcatctcagagttttgttttatcagctgtctgaatcagttgaaaatgtcagttctttaccttgagctagtccagttaaggttaggattgaaaaccatcaatcttgaaattttccaggattaaattttttcttggaacccatgaggctagttttacctctgtgagtttctgagttgtaatagagatacaatattatgcaatgatattctaaattattatttgacttgaaacttctgaactactcagctttgaattayttgatttctgtgaatctgatcttcagatttatggtataagctttatatctgccatgtaagcttctttaaaacatgccaaggtagagatgtagttgtgttctatttgtctttaaaaataaatatcaatatattttctattttagggcatttgatgtagaactactgtacatagcacagttctttaaaattccaatagcagaaattgctgtcaactggacagaaattgaaggtgagtatattgtttattgtatgattgtcttgagtcagataatacagttgtttagtaaagtcagctggctttaatgttctccttgctcccytcatcaagcccttctcagctgtcttgactcaaagatccagttccaaggagaatagtacctactaataccttccatctggcttgctgccttttatattttttgtctgttcatggggccttcagtaggcctactaccttgtcgaagaaacttcaataaaacttcctacaatagacaaagtcatggtgatctgaagttagaaggttgatagtcttttgagatagataaatttattttttgcatcaccatttcctatattttttttatcactaggtggatattaattaggtacctgcaaaccactatgcaaagctaaataagaaataaaaattttttttatggccgagcaccatgcctcatgcctgtaatcccagcactttcggagaccgagggggtggatcacctaaggtcaggagttcaagaccagtctggccaacagggtgaaaccccgtctttactaaaaaatacaaaaagatggccgggcgtggtgtcaggcacctgtaatcccagctagtcaggagtctgaggcagaagaattgcttgaacccgagaggcaaaggttgcggtgagccaagattgcaccattgcactcccgcctgggcaacgagtgaaactccatctgaaaaaataaataactaaaagtgtttttactccaaatgtccacagtcaatccagagccatttaaaaactatatctgtacatatatccaaaagtataaagatcccaactctataataacttgaaatctatcataaatcttaataattcctattttaaaaggcttagacagctctggctgtatagaattttaaacatattctagttttctccttaccttagaatgaacctaaattaattcacagtgtgggagcagttaacataatcaactggagactttttcgaagtccagctcttctggtgagagtccttgttgcagtaaaccattattgctctgtaacctcagatgtttagggacagaaaaaggttaagaaccaatctcgagattatacaaactgtatagtctaggatgaattcaaacctctttacatcttgctgaatcaaactgagtttacaaaatcttagctcatctccacagtagctgcctagaatcaaaggggattgggaagcaggtcaaaggatcactcaggggtatcatgatcaactttgttgatttgtgttgatctttggccaacctagactctatgggaagatgaggtggggaaaagtaaaagtccattttatgtttagtcatttgcttatttgcattacagagatagttgtcttgtaatatgaattgtaggtacctcaacttcctcatttgtgggatgaagataatttttggccctgataaacgataatgtctctacagtgctttggtggtaatgttttcagaagaaagctgtcatataaattcagagcagtgaaaaaggtcttctttaaatataaagtataattaaaatgataatgaaatgttaaaccttcctcctgatactttatctgcacgtatatactataagtaatggttataagaatctgctgtggctgggtgcagtcactcatgcctgtaatcccagcactttgggagcctaagttgggaggatcacttgagcctaggagtttgagaccagcctgggcaacacagtgagacctcatctctataaaaaaattgtaaaattaggcaggtgtggtgcgtgcctcctgtactcccagctactggggaggctgaggtaggaggactggatcgtttgagcccgggaggtcaaggttacagtgagccataatcgtgtcactgcactacagcctgggtgacagagcaagatcttgtttaaaaaaaaacaaaaaaagaatctgctgtgatatgtggatcagatatttaattaggctggtgttcttgtgtagcccgagacaaagaggtctggacaaaattatcttaagtctgatcataggctttattttttatcattaagattggatttatgtagaaataatcatatttatctgttgtgctgtatctttagttgtttcatatgtaattattttcagtaatgagcactcagtgagtagtttttttattagacttctagagccctcaccatatgtagtccttcctttctatagtagggccgtatgaaattttcactatttagatcctctcaagtttcatttcacttcaagatgttctgtttttgtttttagagaaaaccactccactcacttcagctttgaaattgtttaactttttggtccatgatttaaaaaattaaggtgctaaaggctcacaacgatcatgtagactgactttaaackgatacgttttctgctgagtttatttaagctaatttgtttttaattatttttaaatcacaggttctaaattagttccattctggagctggctacaaatgggtaaagacctactttttatacgacttcgatatttgactggtgcctggaggcttgagcaaactcggaaaatgaattaggttgtttgcagtcttcagttgtgttcttatgcttcagtgtcacatttcatttcatttgaaactaaaattttaagtaaagctgaaataaacttcttgtcattgtctgccttttgataattttaaagaaataactttccataagtaaaaaattatatatctctttggatataaatgatttttaaaagatgtttatttaaaaagtcagattttcttttgtttgtttagcttcattatcattataattctgagaaacataatttttgtagacagaagctattcttaccctaaagtgcctgcataactctcatgaacttaactataaactacaatcatgtaacagttttcagagatttaaaaataaagctagggtataagtttaaatgtacataaatttatccaaatcaaagaaacctatttcagcctatgaaactttaggaaattatatgttaaaggcaagaatacagacttagtcacaaaggtgttcatttccttatagtcttactcatctctagcactggaggccaaggtgggaggatcacctgagcccagaagttcaaggttacagtgagctatgatcgtgccactgcactctagcatggatgatggagggagttcctgtcaatcaattttataatattaatatatttacatagtaacatcagaagcctctttgagatactgcaagaactaatagcaattacaaaataatgaacccccaaaatcagaattagattgtttctgccatcttagagaaacaaactagtaacagtttgacatttattaagtgtttactgtatgccacccactgttctaagcacttgatatataatgactcacaacagaagaggaaactgaagcacaaaacggtgacctgcccaaggtcacatatttaggaaagagtggagtcatgattgtaacctgcatagtctggatcccaagcccacactcgttaatgacggctatagtcttcagtttctgaaggtatgaaaactggggatcatataagtagaaagttttggcagtacattgaataaaacatttttgagtagaaaagtaagctaaaaataactccagtagtttgaacaacagcgataatatcacatctgcagtagacaataagcttcttgaaaatagaaggcttgccgggcacggtggctcatgcctgtaattccagcactttgggaggccgaggcaggcagatcacctgagatcgggagttcaagaccagcctgaccaacatggagaaaccccgtctctactaaaaatacaaaattagctggggtggtggtgcatgcctgtaatcccatctacttgggaggctgaggcaggagaatcgcctgaagtcgcgaggcagaggttgcggtgagccgagattgcgccattgcactccggcctaggcaataagagtgaaactctgtctcaaaaaaaaaaaaaacagaaggcatgtcttactacaattagtatctccagcacagggcttagcatatagtaaacacttaataatgatgagatgaataaactttatttactaccagattttgtgagcattaaagtcacttaaatggataaatcaagaataatagaaagcaaagagaagaaaagaccatgctcataagaatttttaagaataagccttgagccaaaaataagatccttaatgaaattataaaaaggcaatgaaataatttgttattgctctttataaacgagatagaaatgcatatttgaagcataataggaatattgaaggaaagtcacgatactttttatgtactttgtctgtgaacactgtagggaaaagtctgatatcattgatgccagcttacctttctaagcacagatttacctaagaggaatatgggacagaatctgaggcaatcagagagaaaaggtagtttaacctgttaacttacagaatctgctaacaaaaactacatgcagcaatagcagagtgaaatagcaaaataacagctactatgttttttgtttttttttttttgagatgaagtcttgctcttgtcccccaggctggagtgcaatggcacgatctcagctcactgcaaccgccgcctcctgggttaaagcgattctcctgcttcagcctcccgagtagctgggattacaggtgcctgccaccatgcccggctaattttttgtatttttagtagagatggggtttcaccatgttggccaggctggtctcgaactcctgacctcagatgatccccctgctttggcctcccaaagtgttgggattacaggtgtgagccactgcacccggccaccagctactatccttatagtatgtacaaggaagagtaatgaacattttgcatgcgttatgtggtttgatcaaacaactctatcatgcaggtataattacccgcatttcacagaacgaagtagccaaataatttgcccagggttacacaagtagccattattcatgcttctactgaaataaaaaataggaaacaaaggaacatggagcatgattaaaacagtataacctgaggatcctcagacaacttggccatgtctatgtcaagtcttctcacttgttcttatagaataagatatatatgaaacttatttgacttgagggtcacatatggacaataatgtctcttgacatctgtaatcctctatctccatatagttatgtatggttgacccttgaataacacaggtttgaactgcacagatccacttatacatggattgttttcaaaaagtgtattgaaaaagtttttggggatctgtgaaaatttgaaatagcaacaggaggttgctgtaaaattatagtagtaaatgatagactaatatctacatgtattttatgcattaatgacataaccttttaatatctttcatactatcaaagactttgatattagtctataatttactatataaaatacacgtgaatctattcagagatttatcaaaatttatgcatacgtagaccatacatatccagttgagaaatttaaacaaagatgcagtattaggctgtgcgcggtggctcacacctgtaatcccatcactttgagaggccaaggtgggtggatcacctgaggtcaggagttcgaaaccagcctggccaacatggtgaaaccccatctctactaaaaatacaaaaattagctgggcatggtggcaggtgcctgtaatcccagctacttgggaggctgaggcaggaaaatcacttggggaggtggaggttgcagtgagccaagatcacgccactgcactccagcctgggtgacatgagtgagactccgtctcaaaaaaaaaaaatgcagtattaaatcataactgcataaaattaataatttcgtagccacctcctgttgctattgcatgagctcaggtgttgtaaatatccacttatatgctgtgtgacactaaccatctccatatgagcagttcatctctccagtaaattgcatataacagtagaaattgagctcttggagttctcatgtgtttttcatgtttagtgcaatactgtaaaccttgaataacaccatgggaccgatatgaagtaccattagtaatgctggaaatactcccaagaagcagagaaaagtcatgacattacaagaaaaagttgaattgcttgatatgtaccatagatgagggctgcagctgaggttgctcaccatttcaagataaatgaatccaagccaggcatggtagctcatgcctataatcccagcactttgggaggccgaggcaggcggatcacctgaggtagttcaagaccagcttggccatcattgtgaaaccccatctctactaaaaatacaagaattcgccaggcgttgtggcgggtgcctgtaatcccagctacttgggagactgaggcacaagactcacttgaacccggaagagggaggttgcagcaaaccgagattgcaccactgcactccaacctaggtgacagagcgagactgtctcaaaaaaataaataaatagtgtaaggactattggggaaaaaaaaaagaaaatttgtgaatccattgccactactacatctgcaggtacaaaaatcttgcaatttttgcaaaataccttttctctcatattgaaaatgcagcttttaagtgggtacaggattgctataagaaagacatacctatagactctaatatgattcacaaaaaggcaaagtcatcatatgacaagttaaaggaaggtgaaggatctaaagctggggaatttaatgccagaaatgaatggttcattttagaggtttggcttttaaaaaaaaagtcaagataagggagaagcagcttctgctgatccaggaggtaacacacgagttcccaaacaccattaagaaaatcattgaggagaaaggatatctgcctaaacaggtttttaatgcagacgaaagtgccctaatctggggggtgggggggtggaatgccacaaaggacatttattaggaagagaagcaagcaccaggatttaaggcaggaagaaacaggctaactgctgttttgtacaaatgcaatcgggtttatgatcaggactgcccttatctgtaaagctgctaaatcctgaaaggaaatgataaacatcagctcccagtcttctggttgtacaaggaggcctggacaatgatacccctttctctggattgcctgcattgatgttctgtccctgaagtcaaaaagtaccctgccagtgagaaattgccttttaaggttcttttgacattggacaatgcccctgatcacccagaacgtcatgagttcaacacggaaggcttagcagttgtctacttgcccccaaacacaatgtctctaattcagcctttacatcagggagtcataggaccttgaaggctcattacacacagttctctatagaaaggattgtcaatgctagaacaaaagcccaacaggacatgaaaggctggaaggggttggggtctggtggctcacgtctgtaatcccagcactttgggaggccgaggtgggaggatcacttgaggtcaggagttcaataccagcctgggcaacataacaagatcccatctctacaaaaaaattaaaaaattagctgggcatggtggttggtgcagccagtagtcctcactactcgggaggctgaggatggaggactgcctgagcccaggagtttggggctgtggtgagctgtcatcacaccactgcactccagcctggggaacagagcaagaccctgtctctcaaaaaaaaaaaaaaaagtctgaaagaattataccattgaagatgcaagccatcgttatagaaaaataaaagctgtgaaagtcaccaagtatgaaacaataattcctgcagaaaactgtgtccagatgttgtgcatgacttcacaggatttatgacagagccaatcaaagaaatcatgaaagagattgtggatagggcaaaaaaaaaaagatggcaggtgaacagttttgagatatggatgttggagaaattcaacaggtaatagagacaacaccagtggagttagcagaagatgacttgatgaagatgagtgcttctgaaccagtgccagatgatgcagaagaagacatacaagaagcaggactccaattattgaagtctgcttgtgacttcttttacaacttggacccttccacaatatgggcactgaaactaaagcaaatggtagaagaaggattggtactgtagagaaacatttttagagaaatgaaaaaaaatcagaccagaattatgatatattaatatttccatgaagtcacaccaagggtgcctgcctctcctgcctccccttccacctcctccacctcttctgcctctgtcacctgggagacagcaagaccaacccctcctcttactcctcagccaactcaatgtgaagacaagaatgaaggcctttatgacgactcacttccacttaatgaatgttaaatatattttctcttacttatggttttcttaataacattttcttttctctagcatactttattgtaagaacgcaatatataatacatataatttaggaaatatgtgttaatacactatgttatcggtaaagtttccagtcaatagcaggctattagtagttaagttttgagggagtcaaagttaatggattatcaactacacaggggttagcactccaaacccctgcatcgttcaggggtgcactgtacttctactcgtagttgattctccag

SEQ ID NO: 97971 - DNA, 12542 bp, Homo sapiens
ttgtgtgtcttctctgtgtctctcctgactgacacacttggatgcaaatttcctcccagtcatagttatttttctagagattggctatcttggcacaaatattatacaggtcagacaggagccacatggtacctgccagtataaacaaatgtcctgtgaggacatctggtcaygggctagacattaggcagtccgtcaggataaagaagtatctgggaaaggcacactgaacttctataaccaaatccctggggtcttcatcaggatagggctagagtttatggctattctcaagacaggcacctcaagaccaaattaggaagaaatgaaacaaaaatgtttcatttgtgttgatgttctctggagggaattttttgaaagactaaactgcataaaataaacacaaatacacgtatattgtcttttatgtttacctgtgtattagtgttattggtattctttcttcatgtgaattagagctagtctaatatcctttcatttcagcctgaaaaccttgtttttgtatttcttatagggttggtctgttagagaccagtttttaaagtttttgcttatctgagaattccttaatttaccctttgtcttttcaatgtaaattgcgctgaacataacattcttcacggacagtctttttcttttagcattttgaatacaatagccctctcttatccatggtctcacttttcacagtttcagttacctatggttaactgcagtctggaaatattaaatggaaaattgcagaaatcaacaattcataggtttttaattgcacaccgttctgaatagaatgatgaaatcttgcaccatcctgctccatcccacccagtacacaaatcatcttttttttggaaagtatccatgatgtacacagtacctgttcattagtcacttagtcgcagtctcagttatcagatcaactgtagtaataacgcagtatttgtgtttaaatgaccctcgtttaacttaaaatgttcctaaagcagaagggttgtgatgctggcaatttagatatgctaaatagaagccataaagtgccttctttaagtgaaaagctgaaagtccttgacctgatatgaaaagaagaaaaattgtgtgctgaggttgctaagatctacggtaaaaactaatctacgtatgatattgtaaagaagaaaagaagaaatttatgctagttttgttgttgcatctcaaactgcaaaagttacagtgcttacttaagacagaaaaggtattacatttgtggttagaagacatgaacagaaacgtattccaattaacagcaagagagtttggtattatttgcagtttcaggcatccactggtggtcttggaatatatcccctgtgaataatgggagactgctctgtacaattccatagtctcctggcttcatgatttctgatgggaactcatctgttaatcttcttgaagattctttgtacatgatgagttgcttctttgtttttttgacagtttgattatgatgtgtctagatgtggatctctgagtttattctactgtgaatttgtggagatacttctattaggaggttaacatttttcattaaatctgggaagttttcagcaattgtttcttcaaatattctttcttcccgtttatctctctcttttccttctggaactttcattatgcatgtgtttgcaatgcttgatggtgtctaacagttctctgatgctctattcatctttttaaaaaattctttttaatttctgcttcttagattggataatctcaattgacgtatcttaaagtctgccaattctctcttgtgtaagttgaaatctgctgttgagaatctctaggaaattctaaatttcagatattttaatgtacttgtttatattcttatttccctcaccagaatgtgagctatttagagaaaggactagatcatatttgttttctagccctaacattgggcacacagaacatactaagtgctccatagatagaattgaattgattaatgtaaatcaagtttatatatgaatagtgtataccatgcaaacacagctagatccactagattctctcaagaattctttcagcatttagataaactatttttttatataaaaccagttctagaataaatagaaagatcagaaatttcttgatttatcctgtatgatagcatagcattgtggtcagagtgccagcttctgaatgagacagactgggttcacattctttctctgccacttactgactgtgtagcctagggaaagtggccacctataggctcaaatttcactttctgtaaaacaaagagttgctataagcatgaagtgacatatagatggatacaaaataattggcacagttttagacacatagaatacattcagtaaattatatcatcaataaaatgaccaatattccatgctaaagaacaccatacatcaatctcatcaatgtatagagacataacatttttcaataaaatgctatttcatatgattaatcataagtataaaaatatttccttatgactagataaactttttcctgaactcaagaatgtgtcaacatatgggattctaataatagactgaatttctttgcctaagatctatggtaaaaactaatctacctatgatattgtaaagaagaaaagaagaaatgtatgctagtttttttgttgcgtctcaaactgcaaaagttacagtgcttagttaagacagaaaaggtattaaatttgttggcagaagacataaacagaaatgtattccaattgccagcaacaggtcaatctttcctttataattgataggatgttgatagcactaccagatttcttttcttaaattattatatgtattgctttgttaatctataaggtttttctctagtggatttacattatatatagaatcaaatacttatttcaagccccaccttcatattttgcttctccacatttattttttattttttttaaattttttctcctgacatttccccatgctaactttggactagaaataaagtggatcatctctcttttcaaatgtcttctgcttttctgcctctttctgtgtgttcatttcataccttctcccaaaacagtaacttgaatcttttcctcaggtttagttaaagtgtgcatatattcacataataatcatgtcttttctgaattttcctatatatttttgtgtttattattaggtgaatgctattattacctaaaatatctttattgtccttttctacaactagattacagtcttctataatagaaaagtctagttacttttgtagactccattagcaatgcttatgattactgagaaaatatttggtgatttcgaaaccaactttacacatcacgctttgtaaaaattcagttttagctactcatttttttccagttgtgaagaaacaatttcatgtcactttttagaacatttaatgtgctccgatcaaatgcatctgtttaaaattttgtttttatatacacacaaaagtttaaactatatgatcttttacaagttgagtttaccaaggagtagatatgtctattccactgtgcgatggttgccatagaaatgaataaatgaggatgttattaatttcgtgattttagggcggaggaatacagtttagagtgagaatactctgtatgtgaaataaatatagactagcaattgctgcagagaaaactcaataggggcaaaaacagttgctgattttctgtggtgtttatttgtttgtttatttatttatttactgagacagagtctcgctctgttgcccaggctggagtgcagtggcgcaatctcggctcactgcaacctccgcctcctgggttcaagcgattctcctatctcagcctccctagtagctgggattacaggtgcataccactacgcccagctaatttttgtatttttagtagagatgtggtttcaccatattggtcaggctgttttcaaactcctgacctcgtgatctgcccacctcaacctcccaaagtgctgggatgacaggcgtgagccaccgtgcccgactgtggtgtttattttttgcccagtataagcaggctggagacaacggactgttgaggagatctctggttttcggtatctacctaacatccttctggggcagctgttttgtgttttgtttttgtttttgtaatgaatagaaccgggaaagacaaataaaatgagaaaatgtagcctatctttttttagcaaaggaaaaaccaaatgtttttgtagtcacataatagcagacttttgtttgtgacctgacaacagagagaggaggaaaaactgttctgttcttagcaaaggatagaacaggaatttgataaagcctgactaataattgaagataaataaagtgagtgcctagtgttacctttagtttcctttttaacctcttcaaaatatgcttcattcatgaatggctatgcttctctgatagcayaaataattatttaaggtagacatatatcattgtgacttgttttccaattaccttgtgttatagaaatgtggatgttgaatcatgaaaattttagaagctaccacttattgtgtgacagtccccaacttatggttcaagttatgatttttttcaactttaagatggtacaaaagtgatatgcattacacagaaacagtgctttgagtattgatgttttcccatgccagcagtatgtggtgcaatactcttgtgatgctgggcaacaacagctgtcaatcagccacgggatcccaaggttaaacaaccaatatgctacgttgccccatgttgcaagatgattttgtccaactctaggctaaggtaagtgttctgagcacgtttaaggtaggttgggctaaggtatgatgtttggtaggttaggtgtattaaatacttttttttttttttgagatggagtctcactctgttgcccaggctggagtgcagtggtgcgatcttggctcactgcaacctctgcctcccaggttcaagtgattctcctgcctcagcctccagagtagctgggattacaggcactctccaccaggtctggctaattttttgtatttttagtagagatggggtttcaccattttgaccaggctggtcttgaactcctgagctcagtgatccacccgcctcggcttcccaaagtgctgggattacaggcgcaagccaccgtgcccggccttaaatgcatttttgacttaggatatgttcaacttatgatagatttatcaggatttaaccttatcagaagttgagcaggttctgcattttaaacaagggcaaaagaactgaaaggtaagcagcttctagaatattgaacttgtaagtctttatctattcagtcataatgtcaacattcagcaacactgacaggaaagctatctcatatttaattggaatccttatatttcaaactctattcctcagttcttggtgctggtaaagaatgcatcctttatcagagctagatttaccaatggagtctagcttctcagcttctcacttgcaggggtcccttacagggccttgggagggatcccagcattgtgttgcatggacgtatattttcataacatttgcaaaattaagatattttaattgtgcttagttggattactgtcactcatccatacttactgttatcatgctttctcttggtgctagatagcaggagaatggtcatgggcatttgcggatcagctaaagggaagtctaatgttgaatacgtgtattttggtgtggtggacatatttttgtagttcacagactcacttctatgtgtagttcagttgttgctagttatcccatgacaggaattgtttccaggagtattactacttggtacccactggtgacttacatagtgtcatgaaataaagatgtaggaccagacattttaaaatcaaatgagcttgtcctgtgacacttgccactggacctacatgggaagtgggaacaaataagggttaaaggctttgcagatgccaccgccgctgtgagccctgtactatcagccatggtcaaccccactgtgttcttcgacttcactgtcaacagcgagcccttgggccgcatctccttcgagctgtttgtggacaagtttccaaagacagcagaaaactttcatgctgtgagcactagagagaaaggatttggttataagggtccctgctttcacagaattaatccagggtttatgtgtcggggtggtgacttctcatgcataatggcacttgtggcaagtccatctacggggagaaatttgatgacgagaacttcatcctaaagcatacaggtcctggcatcttgtccatggcaaatgctgggcccaaaacaaatggttcccagtttgtcatctgcactgccaagactgagtggttggatggcaagcatgtggtctctggcagggtgaaagaaggcatgaatattgtggaggccctggagcactttgggtccaggaatggcaagaccagcaagaaggtcaccattgctgacagtggacaactcaaataaatttgacctgtattttatcttaaccaccagaccattccttctgtagctcaggagaacagtcctccaccccatttgcttgcagaatcctagaatctttgccctgtctctgcagttccctttgggttccatgttttccttgttcccttccatgcctacctggattgcaaagttaaatttatgattatggaataaaaactaaataacaaaaaaaatgagtgttgaaatgttcagatctagaagctgatctatggaagatttttctatttgtcagacatgtaaaattataggcagagaattggttctcatcaacacctaatccaatacctaatcaaaatggaaaatctcccttattaggaatatttgataatgtagcatatacaatgatcagtgtatcatatattttttcatttttgggggaattatacaatggagaattgatcagaatgtgtttttatagggcacaaacctatgggtactaaaaaaagcacatgtctgtatgaagttatatttttgtgcatcctaacttcatttttaaaaaattcaattgaccatcctagaaggcagattgaattatctctctattttttctctataaagttacatagaaccattgtcatatgatgaggcaaaatatggaacatataaaggtacactacacagtcaataaaaatattttttgaatgtctgatgtttgtgatagttgtcagttttttaaaattttgcagtttattgtgatttcatttttcattctgaaaatattgttctcctgagtaactaatttgttattcttttctttatgtatccccccaaattatatgtttaatgtctcagaacatttatatttgcccttctgcactatgtaatgatatttaaagcatcttatcaatttagttaaaaaattgagtgagacactgaaaccattttttgaaactatatagaaacagcttaaaaattttcacattgtatgctcatttcatatgctcattcctttttttctaagaacaacaatcttagttttaaaaatatttctttgtgtgttatattctgaataccattgctgtccaatagaactttctgtgatgatggaaatgttctatatctagactgtataatatgatagccactaaccatatgtgactgttaagcacttgaaatgtagctggtgagtctgaggaattaagataataactttatttaatttacatttacacagccaagtgtttggctatgtaacagagtttatacctttaatcaacttggggattaatccttcatctcctatccacatttctatctagtcattgagtataggattctatgtctctatgaagtaaaatcctaactcataactaatataacatgtattattcagaagattgtgttttatttttcaatatttctcaaatcaaatattcttgtattctgattatgttgtagacatttttatagacaggtcttatttattttgtttatagtttgcagatactggaaagcttaacacagttttgtggaaattccccattaaaacatgcttttcaacatggtaaaatcaatcaactcaaagatgctttatttggggaaaacgatgcatggaatccaatcaataatgacattccgtttgcctaaaagttgtgcttactaaactgagcttggcaaaagtttgacacgttcaataaatggagactttgtgctatatcagaattaacagctcttagccggatatttcatatattctacaaatatagagtgatagacaaggcagatgcagccatgacctgccccctggaagatgactgtttatacccaagaacaattcctggaatgtaacaggaaactgcacatgaccatatatctaagctgggtatttctctggcttcctgttagagaaatgacggattttcactcccctccaggcacagaagaaaatcactctgaaaaccatacagaagaaaatatgtatttaaaacaaatgtgacttcccaatatctgattcttaatagaataatctccagatagctattgaaacagtaggagttggaaatctaaacaaaagcttcagaagaatcaagagcagtctagagtttcagtataatgcaaaattattctgaaattcagtagtagtactaaacaatctctcaatctttaggcccacaaaaatttacagaagtttgcaaatttgagtcaagacatttttccttgttacttcttctctatttacataatatgcctatgttttagtctactgttttcatgctaatgattgaaaaatcacaattattctattaataccctgtatgcatatgtaatgttaagtattgggttaaaactaaaatggttaggcaaacatcaacatattttcgttttagttaattgtgtccttgaggcaagtgggtgatgaggcatttttttcaattttctcttagaatgaaccctagtgctgggtgcacacaaattcagtttgcttataaaaaggaatgcttataaaaacccagagtaataaaagattttttagaggctccattttctttatattttgatatttaggttctcagcatgtaagcatttgctaattttttgagcagggttcacagtttatgtagagatataattactttctaaaacttacgtgtccatataagaaaaatcctgacttagcatttatttaatggatttaaaggcttaaaaacattgggacccctttccaatataattaaataataacaaattttgaaagaagaaatgaatatttgtcaagctgaggaagataaagccacctaggattacaatgtacactttagcagtggagtcatagttttacataaagctgagagttaattaatggaccatgaaaaagtaaggttaaaaaaaaaaacagagaaaacactatgagaaaacctcaggaatgagagtgtttataacgttcttttacgtgatatttcaaagttattaaaaaagttataaggaaatattatgagccactttatgccaatggactcaacaaaacagataaagtgagtaagttcctagaaaggtaaaaattaccacagttcactcaaaaataaattgatacacaagtagccctgccttcactatagaattgaacttttagttaccagcctttctgtaaatatagttccaggcccatagagcttcactggtaaatccttgaaaacatttagagaggaaatgccatctacacacaggctctttcagaacattgaagagaactgaagagaagaaacactatctttagctttttaggcagttatgcaaacatcttgtagcaccctttcttcagatggcctggaccgtaaaaatattcttggagaattgtctcccaaaatatattagtaatggagacttggaaattaaaattaaaaaaattattttcataatcgcaatacaagttgtttatgtttaaggataaacctgaaaaaggtgtgcaagatctgtacactgaaaactacaaaacattattgagattattctaaaatatttaataaatgaagacatatgccatattaatggattggaaaactcaagtattattaatatatcagttctccctaaattgttctatagattcaacattgtcccacttgaagtcctggaggcttttttgtagaagttgttaacctgattcttaaatttatacgaaaatgtagagaactaaactctttgaaaaagaacaaagttggatggctgaaattacctgtcttcaagacttaaaaacgatagtaatcaagacagtgtagtattggagtaaagatagacaaattgaatcataatacagaatagcgtccagaaatacactcacacatattatcaactgattcttgaaaaagtttagaaaggatagtcttttcaaaaattaatactgaaacacatggatattccataggtaaaaaataagaaagttaagtataatcttacctcatacaatttcaaaatttaactcaaaatttatcattgacttaaatataagttctaaaactataaaacttttagaaggaagcacaggaggaaattatcgtactcttgacggagagagtttttagctgtgatatgaaagcacgattcataaaacaaaaatgtgataaatcggacttcaccaagattaagatcttctccgcttccaaaaacatggtaaaagaatgaaaagataagcctcaaactggaagaaaatatctgcaaatcgtatgtctaataaagatatggatccagaatatttaatgaattctcaaaattcagttggaaaacaagcaaaaaagccccgattttatgggcaagagatttgaacagacacttcactaaagagggcatatggctctgtacaatatgaggacacaggtagaagacatcttttatgagccaggaagacggccctcaccagacactgaatctgcttggaaattggactttccggtctcctaaaccgtggcttactagagacgttgtataccagttgtcagaaagaaggtctaaagttacgggagaatgatcatggcctgagtggagtgctgagggaaaggagttggaacccgtcagagaactcacaggaagaagctgaggtgcagaaaagcaaagcagcaagagtctggcaaagattaatccctgaggaaattggagtcccatggaaagggtagatgggggtgtatgtttattcccacatcccagcggtaaactgctgactgctgaattgtcagagaacccctctgtccctgagaggcactgctgtgagtggcagtttgtgaacttctggaaagcagatcacagggcagccatcttgcacaagtttgctggctcttccttcaaatgcaaggtgaggtgaccagtgccatattgctgtgcaaacattgtggaccactatcctgccaaggaaatctcagcttatgtttctctgcatcactagatcccccacaaacacttctcagaacccactctgtggcagccacaagggactggcagcaccctggggagctgtggaatccccggagatctagctctcagcatgggcttctcctagaggaaggggaattgcagtccactaaaagacctcttgaaacaaaggaaaccagattgtctgcttttccctgcatgagagccctcctgcttgtgaccagacagtgactggacccctcccaatggagacatgggtgtggtgctagtctctgaagccgagaaggtttgttctgcctcagcagcaagcagcaccattggccaggaattaacatggagaggaagtcttctcctgctccccctgtccactgttatggacacaactgtgacctctcctactgggagctggcatgggtggacttggagaaagtccttccagtgccatgcagggtgatgtacccccactgaaagtgagcccactggcccaggcttgcacaaagggaaggattcatctctccctttctatgcagagtggcagtgttcctgcagtggcatgtagaccagctgagggctgtctgttttgggctgaggaaagaggttccaccctgaagccatttcagtggtagttgtgggatacgcatttttcacagacctcagttgcactgtggcctggaagtaaaagacagtacttatgtgaactgaaggttgtaagccctgggatggggtctgatagggaagtggatcatgtttcttcctggcaggatgagaaactgatgcagccccctcttgcacaccccctacaaagatgtcagagcatcccaccaggaggtatccccccaatccctgtcaagacaagtgatttcattcattattggggtatccgaggaagagtcagctcttacttgtaagtgccacgtactgggctggagactgaaatgcacaaccaaaagaaaaacctactgacacaagggcatagtgctaaggaactagataagcttgctgagacatctgcagccctgtggaagacagttagttggcttatacactccatacattgttacaacaaccagaatttgagaaaaccacttatgcaaaagtca

SEQ ID NO: 97972 - DNA, 12497 bp, Homo sapiens
gccttgtagtatagtttgaagtcaggtagcgtgatgcctccagctttgttattttggcttaggattgttttggcaatgcaggctcttttttggttccatatgaactttaaagttgttttttccaattctgtgaagaaagtcattggtagcctgatggggttgtcattgaatctataaattaccttgggcagtatggccattttcacgatattgattcttcctatccatgagcatggaatgttcttccatttgtttgtgtgtttttatttcgttgagcagtggtttgtagttctccttgaagaggtacttcacatcccttgtaagttggatccctaggtattttattctctttgtagtaattgtgaatgggagttcattcatgatttggctgtctgtttgtctgttgttggtgtataagaatgcttgtgatttttgccattgattttgtatcctgagactttgctggaggtgttatcagcttaaggagattttgggctgagatgatggggttttctaaatatacaatcatgtcatctgcaaacagggacaatttgacttcctcttttcctaattgaataccctttatttctttctccttcctcattgccccggccagaacttccaacactattttgaataggagtggtgagagagggcatccttgtcttatgctggttttcaaagggaatgcttccagtttttgcccattcagtatgatattggctgtgggtttgtcataaatagctcttattattttgagatacatcccgtcaatacctaatttattgagagtttttagcatgaagggctgttacattttgtcaaaggcctttttctgcatctattgagataatcatgtggttctattctttggttctgtatatatgatggattacatttattgatttgttgaaccagccttgcatcccagggatgaagcccacttgatcatggtggataagctttttgatatgctgctggattcggtttgccagtattttattgaggatttttgcattgatgttcatcagggatattggtctaaaattctctttttttgttatgtctctgccaggctttggtatcaggataatgttggcctcataaaatgagttagggaggattccctctttttctgttgattggaatagtttcagaaggaatggtaccaactcctatttgtacctcttgtagaatttggctgtgaatctgtctggtcctggactttttttggttggtaggctattaattatttcctcaatttcagagcctgttattgttctattcagggattcaacttcttcctggtttagtcttgggagggtgtatatgtccaggaatttatccattccttctagattttctagtttatttgtgtagaggtgtttatagtattctctgatggtagtttgtatttctgtgggatcagtggtgatatcccatttatcattttttattgcatctatttgattcttctctcttttcttctttattactcttgctagcagtctatcaattttgtctatcttttcaaaaaaccagctcctggattcatgatttttgaagggtttcttctgtctctatctccttcagttctgctctgatcttaattatttcttgccttctgctagcttttgaatgtgtttgctcttgcttctcttgttcttttaattgtgatgttagggtatcaattttagatctttcctgctttctcttgtgggcatttagtgccataaatttccctctacacactgctttaaatgtgtctcagagattctggtatgttgtgtctttgttctcattggtttcaaagaacatctttatttctgccttcatttcgttatgtacccaagtcattcaggagcaggttgttcagtttccatgtagttgagtggttttgagtgagttacttaatcctgagttctagtttaattgcactgtggtctgagagacagtttgttataatttttgttcttctacatttgctgaggagtgcttttacttccaactatgcggtcagttttggaataagtgtgaagtggtgctgagaagaatgtatattctgtcaatttggggtggagagttctgtagatgtatattaggtccactaggtgcagagctgagttcaagtcttggatatccttgttaactttctgtcttgttgatctgtccaatgttgacagtggaatgttaaagtctcccattattattgtgtgggagtttaagtctctttgtaggtctctaaggaattgctttatgaatctgggtgctcctatattaggtgcatatatatttaggatagttagctcttcttggtgaattgatccttttaccattatgtaatggccttctttgtctcttttgatctttgttggtttaaagtctgttttatcagagactaggtttgcaacccctgcttttttgtgttttccacttgcttggtagattttcctccatccctttattttgagcctatgtgtgtctctgcatgtgagatgtgtctcctgaacacagcacactgatgggtcttgactctttatccaatttgccagtctgtgtcttttaattggagcatttagcacatttacatttaaggttaatatttttatgtgtgaatttgatcctgtcattatgatgttagctggtttttttgcttattagttgatgcagtttcttcctagcatcgatggtctttacaatttggcatgtttttgcagtggctggtaccagttgttcctttccatgtttactgcttccttcaggagctcttgtaaggcaggcctggtggtgacaaaatctctcagcatttgcttgtctgtaaagtattttatttctccttcagttatgaagcttagtttggctggatatgaaattctgggttgaaaattcttttctttaagaatgttgagtattggcccccactgtcttctggcttgtagagtttctgctgagacatccgctgttagtgtgatgggcttccctttgtgggtaacccgacctttctctctgactgcccttaacattttttccttcatttcaactttggtgaatctgacaattatttgtcttggagttgctcttctcgaggagtatctttgtggcgttctctgcacttcctgaatttgaatgttggcctcccttgctaggtggggaagttctcctggataatatcctgcagagtgttttccaacttggttccattctccccgtcactttcaggtacaccaatcagacgtagatttggttttttcacatattcccatatttcttggaggctttgttcatttctttttattcttttttctctaaacttctcttctcactttatttcattcatttgatcttcaataactgataccctttcttccagttgattgattcagctactgaagcatgtgcatgtgtcacgtacttctcatgtcatggttttcagctccatcaggtcatttaaggtcttctctatgctgcttattctagttagccattcgtctaatcttttttcaaggtttttagcttctttgtgatgggtttgaacatcctcctttagctcagagaagtttgttattactgatcatctgaagcctttttctctcaaatcgtcaaagtcattctctgtccagctttgttccattgctggcaaggagctgtgttcctttggaggagaagaggcgttctgatttttagaattttcagcttttctgctctggtttctccccatctttgtggttttatctaccttggtctttgatgatggtgacgtacagatggggttttggtgtgggtgtcctttctgtttgttagttttccttctaacagtcaggaccctcagctgcaggtctgttggagtttgccggaggtccactccagaccctgtttgcctgggtatcagcagtggtggctgcagaacagtggatattggtgaactgcaaatgctgctgcctgatcattcctctggaagttttgtctcagaggagtacccagtggtgtgaggtgtcagtctgcccctacttggggtgcctcccagttaggctactcgggggtcaaggacccacttgaggaagcagtctgtccattctcagatctcaaactccgagctgggagaaccactactctcttcacagctgtcggacagggatatttaagtctgcagaagtttctgctgccttttgttcagctatgccctgcccccagaggtggagtctacagaggcagtcaggcctccttgagctgtggtgggctccacccagttcaacttcctggctgctttgtttacctactcaagcgtcagcaatggtggacgcccctcgtccagtcttgctgccgccttgcagttccatctcagactgctgtgctagcaatgagggaggctccatgggtgtgggaccctccaagccacgcgtgggatataatctcctgatgagccattcactaagactgttggaaaagcgcagtattagggtgggagtgacctgattttccaggtgccgtctgtcacagcttcccttggctaggaaaaggaattccctgaccccttgcacttcctgggtgaggtgatgccttaccctgcttctgctcattctccatgggctgcacccactgtcctgcacccactgtccgacaagccccagtgagatgaacctggtacctcagttggaaatgcagaaatcacccatcttctgcgttacttacactgagagctgtagactggagctgttcctattcagccatcttggaaactctctaatttgtcttttcttaatagaagtctgagctgtgaacctaatgatgggtgagaaaatatgttactttttttcccctacagcccttcatgtttttcactttttaattttcttataattgtttttggttattgttgctgaggctgatatcttgctaaaattattcatgtatttggatgttactaatcattttaatggataagtatattttatttatttaatatttcatatctatttgtaaattatctattgtcaccagatcttcaacacaaaattcgataggataagtaaaagcaacagaaaaggaggttttcatgatatttcattgaaattactggttagtggctcaacataaagctacttttatcatctttctatttctgcaagccatgtgacgcgtacaagtctgcaggcagattatgactctatgtaaacgaagacaagaaaattaaaactgtgggagctttttcaccccataaggagcttagtttaaagaaaaaataaagggcttttcttacttgcatgtcacagagaaacaggtttaaatcactacagcagtgtaatgtgaggcatgtttaggaattcagcaaagcataagaaggaaaagtcttcactggtaagtagcaggatttaactgacacagctgtctttttaaaatttctaaatgcttcctttgccttacactggagttcagatcactcaaaaataaaaaaaaaaaaaagcagaagagagatttctgtgacatgaatccataaggattaggtttagattcaattcctttagcaaacatagttatttggcttcattttggtttctcttgaaaaggtatgacttctttaaatttgaaggaaatggacatgtatcatattattctgggatagaaaagattaaaaactgtattgaacctattcgccaacagatttttgaatggactctacaataaaagctacaaaaaaggtaggacatatttgcttacctttaatgagggcaagctcgtgacctgttaaggagacccattccagcactggacactaacttcttaaagaagataaaacttatattgaattgaatttggctccctagaattgccaatcactactgaattcttcaatttgtagacatctatcacaaatctaatatttttctctattacagagacatattcatttcacaatacagagtagtatcttgattgttagcctaaattaacttaacagttatttctgcctgatcttaaatgttatataatagaaatattatatatttctaagggcctcagaatcgtgcaggcgcaattgtgccctgggtcgccaagatgttgttcccatagtataagccgtcgagcctggccactgtgcctgagaccctcgacccagccgaatacaacatatctctggaaacccagcgggtgcaagccgagcggttggccataagagcccggctgaaacgagagtacctgcttcagtacaatgatcccaaccgccaagggctcatcgaaaatcctgccttgattcgttgggcctatgcaagaacaacaaatgtctatcctaatttcagacccactcctaaaaactcactcatgggagctctgtgtggatttgggcccctcatcttcatttattatattatcaaaactgagagggataggaaagaaaaacttatgcaggaaggaaaattggatcgaacagttcacctatcatattaagtctggcaatgatgactatatgtatccctgcataaataaattgactattaataaaaaaaaaagaaaagaaatattactctccagggttctctatagtacacaggtgagtataagtgacaaaaattgtatctataatgaattcccctaattaattagtatatttttaaaaggcggtggtttgatttaactttccaatttatattaacttatgatgaatagaagcaaacacagattgattattttcaagcaatgctgtagtacctatgtatgccaggcactcttctaataagttcgcaaaaatttatttatttaattcttaaacctacaaagtaaatactttaattatccctattttatgaaagaaaaaactgagaatttgagaataaggcattgaagatcatataactagtagagttgatatttgattgcaggtagatggcctccagagcactttctcttaactaagcaatcttataaaatagctattactagaaatgtagaaactgaggtagaaagaaaataattttctcatgattatagataagtagaaatctgagatccaaactccaaaaaaaaagaaaacttaaaacataaattagtatgaattaatataaaataaagataattgaaaactaaggctttactaaacttcatcaaattgaattgatgaattcaatctggtgatattatagataggctatttagcagtttatgctcaaatccactaactcaacagctttcactttccaaacaacaaaaatttaagctcatctttttttttctttttttctaatctccaagagtcaatgggacccactaaaacacacaactgacattcatggcattgcctctacttcacatctgtttcaactgctgcttcagatacctgtcttgactgctggcagacgttgcttttcttatttctttaatgcaccactctgctgggctccctgatgcttttgtgcaaccatgcacacaatgacaatgacttcctctgattttgattcacctagaaatgtctttttatttctgtgcttcaccaattacagctatgttcctagatgcttctgatttagaagtttgaagtaagaaaatgcttattctatctctgatggtattttataacacaacagcttgtgtcctatgtggataacaaatgttgactttgcagcagccactcagacctcttcttacgaccaaacttcaatttccctctggtgaaacaccattgctctcactttcaggccattaaagttcaagtcaagctgacaccatctctaatgcaaggaatgagaacatatcttaagctaatattacaaaagtgtttggtaatttggtagaaatatgactcaatcaggacaattacattaaaaatacattggcagtatgttatgtgaaaaggtcacttaattttgctctgagacctggaattcaagaactacataaacactatcattttgttgttaaacgaagcttcagaataaagacaagacattgcaaaacaagcaagaattggatagaaatcacatcctgctgataatgtttctgccctgaattgagtcatttctaaaacttgcataccaccaggcatttctggtttgaatgttctgcaacttgcgacagcaacaacaaaagttcgaactgagtatcttacctgtgattcttagaaagccaactctcaggcaaatattttatttgctactacttcattaggtgttcaatccaaggaagcaaacgtgaggacaaagaaaatcacaggcaaagacagagagccgatttgaggccattagggatgactgattcttagccactttggatcttcttctgagaagtcaatatagtacacaatctatatatcagaatagtccagtgatggaaggtgtggagaaatggaatggtaaatatacccatcagctcctgtttctcattggtgaaatgctaagcccacagacagactgctatgtctccccatatttctgggttgaaaaacatgggtgctaaacagggtcccaaggtgtcctgaaaatttatattgacaatgactctctccaaactctagccaggcttctctcatccctgctttgactagtctctgtcgttgggccttatactcaagaggaagaattctgctaagtcagtttagtaagaacccccgcaccattaatatctgatcactctcagtatcttactgggtttctcatcctccagcatcccccaggtgatacctaattaccctcacttgccttcagcaagcattatgttagatcggtttagctagaaattttcctgatgtttccacttagtaactttctatcccctgacccccagtctgcttattggctataaatccccacttgtccatgctgcattcagaattgagcccagttttataatgaggtctcttttcccctgctgcaatagaaaaatatgttttcaccactttactactgtcaggctcttgcttttcttttaaaaacatcaaaagaaagtctggagtgggaagtaaagggctgaggtattgtcagatgcaccttcttggtgctgatcagtgccaagaataggctgatcatggtggtggtggttagaacaaaaggaggctgcatgaggatctaaagtgcttcacagcaggcgcctaacaaactgatgcaccctagtgatttagttcttaccattttattacatggcactaggagggtctcaccaaagaatttcaagaacctctaaaatctccattctttccattttacttcacacacatctcttttgtaggccacataggaatgttctttgacagaagcttgagttggagttgatttaagtaaatatctacactctatttaaattctctggtctcttacaccataaatatactaaagatcaggcacatctttcctcacttttggcactttttgtgttatgaacttcattgttcagtagtttcctttaggatctatcccctggtcttcaaattcagtacacatagctgtatataactggaacctgattgtagacacggcatattattgttttacccatggactctggctccatatgaaaatcagatggggttagctgtcagtggagtttcttcctatgaagactagacaaagagaccagacattgcataaaatattctaaatagatacaaatttaaatataaaaatatttataacaatgagagaaaatcacaacaataaaataacaaatacattaaatgattaaagtaattgatagtagacaagacataagaactaattacttaaaaagaattagaaagtcaagtaaatagaagtatcatatatagatagttatatataaaataatatacagttgattcttgttattcttggtagctatattttataaagtcatcataaatgctaaattagcatgtactgaattatttctcctagggaaaatatagggttagcttcctgtgagcctctgttcacaacagttttgttaactgatcaatacatagcttggttttatgtgtgtctctgtttagacatcttatttaatatatattttgattaattaaaattgaactcacaaccagaagcaatataactcatatatctaacacacttattttctcaagaagtcctagtgatatggaagaggggcagggaagtgctgggaggagaaggtgggtccatggcgagggctccaccccatcacaaatgtaggtgaagacattcactcctgccttcccactcaaatgttacatttcccaagaacaccctggtccactatgcccccatcccgttcctataaaaactcgagaccctagcatgcacacactcaagcggctggacatttagaagagcggatcggtggaggaagacacaagtggctggacatcaagagagaacatcaaggggagcatgccggaagaagagcacacaacagatgctggcacattggcaggccattgaccagtggaaggaggcagagtttggccagggcagtcagaggagagtccaggctgccaagcaacctgactccaggggaatatcatctcccttctggctcccccatctgctgagagctacttctactcaataaaaccttgcactcattctccaagcccacatgtgatctgattcttccggtacaccaaagcaagaaccctgggatacagaaggccctctgtccttgtgataaaaaagggctctaattgagctgactaacacaagccacctatggatggctaaactaaatgagcaccctgtaacacacacccattggggcttcagctctaaacattcacccctagacactgctgtggagtcagagccccacagcctgcccatccgtatgctcccctagagatttgagcagaagggcactgaagaagtgagtcacaccaccatcgcatgccctgcaagggggataagggacaagagaacttctgtttcaactggaggcttgttcgggatctctgtagatgagtgtgagcaatgcaaaactgttgggtctgcctctcttcccaaaccctgctgcctctctctcttttctgcaggtaagaggctctgtttcccttcacggagttttaaactgccctcactgggccggtcaaaacccccaatttcgtctcttttctctcgcagtttggaatggctcttatctctttctttataacattaagagtttggctaccagctgaggcaacgttactaagtaaaatgagcaatttgctcagccaccaaaggtgcaaatcagatcagctgttcctagaagtgccatgtatgtctctttctcgactgacagctgcaggcacatacagctcagggcacctctccttatccttccccctcccagcttgggtgtctgggtgtgcccaaggcaggcaaaggcccagccaaacagccgcaaggggggagggagaaagccaaggcagtagccaggaccctacagggtgcttcttggctgtgccaatggaacctttccttccttggccaaagaattcaacctggtctgaactaggggaaggatgggaaagttataaggattagaggggcttacttgcactaagcaaaagattcccccagaatcccctgatttttgcccctttaactatttttctttctctctctctcttttttttttcctttttttaagtgagaaggctctccctcccagctctgtttctgatagggcagttaatggatgaacgacccttgctggctgagaactgcaaactcagcagggcacatttgagacactacacagacacaaagggcctctgaaataccttttccttcccaaacttgattccaagcttcaggcagaggccctagaaagaaaaaccaggtctgagggatccaaagccagacaacaggcacaatgtaaatgagcaggacaaattcctgccaactgaaccccaccacatggaaggaggccatgcttcatggcataaacaggctcagggaactcaagatttgcttagcagggagaaagggaagaatgggtgagggtggttgattcctattctccagattttccctgcttcatgggtatatactgcattggtacctatggctggcacctgccaaggtcaccggggctcacggacaagaggtagaaggtgaagggaggatgctcgctttctctctccatcacatcctgagtttttcactgaaagaaggaagggagtgagggacacgtctattccctgtctttcagaatgggccaccagttctcttcaccaccctcagcttacactcctctggagtgtatcctgaactattaggactgctttgaccctccgaatctgaaggaaaagcacctcatagccctctgcacaaagatttggccaaattatgatttactggaagaactggcttgccctcaggaaagaaccatccattttgatatcatccagcaattggaacttttctgtagacatgargacagatggtctgaggcccatatgtgcaggctttctataccttgcaaggcaattcagccctttgccgacaatgtagggttgatccagccctcctgtttgttgtctcagggaaggctgcaaggggcaagcccagtgaatt

SEQ ID NO: 97973 - DNA, 45712 bp, Homo sapiens
atagaggtttaaaaaataataataattggccaggcacagtgactcacacctataatgccagcactttgggaggccaaggcgggtggatcacgaggtcaggagtttgagacccgcctggccaacacggcgaaaccctgtctctactaaaaatatgaaaattagccgggcatggtggcacacacctgtagtcccagctattggggaggctgaggtgggagaatcgcttgaacccaggaggtggaggttgcagtgagccaagattgtgccactgcactccagcctgggcaacagagagagactccatctcaaaaaaaatttaattaataaaataaaataataataaagggatatttattaaataagaaaggacaataatgcacacattactgtgcaacttgcttttttcactcacagtgtttcacacacactcctcaacaacgacagttacaaacccttttattttttcattttttatttttttattttttttgagacagagtctcgctctgttgcccaggatggagtgcagtggcgcgatcttgggtcactgcaacctccgcctcccgggttcaagcaattctcctgcctcagcctcccgagtagctgggactacaggagcctaccaccacgcccggctaatttttttgtatttttaatagagacggggtttcactgtgttagtcaggatggtcttgatctcctgacctcgtgatccacccgcctcagcctcccgaagtgctgggattacaggtgtgagccactgcccccggcctaatttttgtatttttagtagagacagggtttctccatgttgggcaggctggtctcaaactctgacctcaagtgatcgacctgcttctgcctcccaaaatgctcggattatatacgtataatttaaataaatgtttccagattactttccaacattatgtcaacaatgtatcagtttctccatattctgcttagcaacagacagtgacaataaaaactttttttttccttttgcctatttgaggggtgaaaagtaataccttggttttttgttgttgttgttgtttgtttttttttttggtgagatggaatctcactctgtctcatgatcttgcgatcttggctcactgcagcctctgcttcctgtgttcagcgattgccttgcctcagcctcctgagtagctgggatcacagacctgtgccaccacacctggctaatttttagtagagacagggtttcacaatattggccaggctggtctcaaactgttgacctcctgcctcagcctcccaaagtgctgggattacaggtgtgagccaccactcccggtcatgttttaatgttattttattttatttttgagacggagtctcactctgtcacctaggctggagtgcagtggcgcaatctcggctcactgcaacctccacctcccaggtccaagtgattctcgttcctcagcctcccgagtagctgagattacagacgtgcaccaccatgcctggctaattatcgtatatttttagtagagatggggtttcaccattttggccaggctggtttcgaactcctgacgtcaagtgatctgcccacattggcctcccaaagtactagcattacaggcatgactgaccgcacccggatgttactttatttattttttttgagatggagtctcactctgtcgcccaggctggagtgcagtggcgtgatcttggctcactgcaagctctgcctcctgggtttccgccattcttctgcctcagcctcccgagtaactgggactacaggcgcccaccaccacgcctggctaatttttttgtatttttagtggagacggggtttcaccatgttagccaggatggtctcaatctcctgacctcatgatctgcccgcctcagcctcccaaagtgctgggattacaggcgtgagccactgcgcccagccgtattttatttttttgagttagggtcttgctgtgttgcccaggttggagtgcagtggctagaccgtggctcactgcagcctcgaccttcaggctcaaacagtcctcctgcctcagcctcccaagtagctcggactacaggcgcaaagcaggatgctggactaatttttaaaggttttggagagatgaggtctcactgtgtggcccaggctgatctcaaattcttggtctcaagccatccttccacctcagcttcctaaagtgctgggattataggtatgagccattgtacttggctaggacattttttcactacgtatccctgactactaataggtttgagcatattttaaatttttatattgtcaaatatttttatcatttaaaaaatggctcctgccttgctaaaaagttctttcttgatccaaagttataaatattctaaaatgtcatatttttatttttgtattttttcatttagatcttcaatccatctggaatttttaattttttatatttttgagatgaagttttgctcttgttgccctggctggagtgcaatggtgcaatctcggctcactgcaatctccgcctcccaggttcaagcaattctcctccctcagcctcccaagtagttgggattacaggaatgtgccaccacacctggctaatttattttttagtagagtcagtagtagtttgtccatgttggccaggctggtcttgaactcccgacttcaggtgatctgccccccctcagcctcccaaagtgctgggattacaggagtgagccaccgcgcctggctggaatttattttcgtatattgtgtgaagtagggatttccatttgtgtttttcagttttgacaataacattttattagtacaaaagagttgatactaactcccttactaattgtagtcacatgagactgatatcagagctattaggccaatttatttttttatttattcattttttatttattcttatttttattttttttgcgatggagtctcactctgtcgcccaggccagaatgcagtggcgcgatcccggctcactgcaagctccgcctcctgggttcacgccattctcctgcctcaacctcccgagtagctgggactacaggcgcccgccaccacacccggctaattttttgtatttttagtagacacggggtttcaccgtgttagccaggatggtcttgatctcctgacctcgtgatccacccgcctcgacctcccaaagtgctgggattacaggcgtcagccaccgtgcttggcaggccaatttattaacttaggagaatagaactactaagtcagccagaatattaatgttttttttttttttttttttttgagacagagtttcactcttgttgcccaggctggagtgcaatggcactgtctcaggtcactgcaacctccacctcctgagttcaagcgattctcccgtctcagcctcccgagtagctgggattacaggcgcatgccaccactctgggctaatttttgtatttttagtggagacggggttacatcatactggtcaggctggtctcgaactcctgacatcaggtgatccgcccgccttggcctcccaaagtgctgggatttataggcgtgagccacagcgcctagccttaatgttagttcttaaccagtggtagaccagaagtctaattgggattttttgtttttgtgtttgttgtaatacaatttctgtttctcatttatcctacctgaaaagcatactgcatctctgacctctcagcatactaacaataatattgatcacatagcatttcttgtagttcataaacttcacgtgtcaataatatactataaatataaatgaattaatgaacaacaggatgctcataagcttacagacatctttttctcaaaaaagctgggaattttgtttctgttttattgggatactgactctcaacatttcatatattgcattccaccaacgtagctgagagtcaatttatgaaatattttgtagtgtaagacagaaagtggggaggaccaagtatgtcaaccactaggagtgtggtgcctagtcaggaattgggaggagtgtagcaagaaaggaaggacaacaggatttggtcattgattggtcagatggatttcagagggattggtatgaaggaacgcttcaaagattttttttttaatttaagttccaggatacaggtgcagaatgtgtaggtttgttacatacttataggtgagccatggtggtttgctgcaccaatcaacccctcatctaggttttatttatatatttttttgagacggagtttcgctcttgctgcccaggctggtgtgcaatggtgcgatctcggctcaccgcaacctctgcctgctgggttcaagcgattctcctgcctcagccttctgagtagctgggattacaggcatgtgccaccacgcccggctaattttgtatttttagtagagacggggtttctccatgttggtcaggctggtctcgaacttccgacttcaggtgatctgtccgcctcggcctcccaaagtgctgggattacaggcagcagccaccgcgcccagccaggttttaagtcccgcatgcattagctatttgtcctaatgctctccctccccttgacccccacgcaaccaaagatggttttaaggcttctaggactggagatgattactttcagaaatgaatagtggtgaccagatgaaataagacttttggatgtagataggaccttagcgatatatttccagctttttattttttattttaaggatgaagaaacagctttaagttggttgcctaaagtcacgcaggtaattgatgcagtatggccagaacccatactaggcttaagggacagtgtaccataaactcgtagaggtcctttaaacagatagaaacgctgtgctccaggcagatgccataacaaacactggctctagatctaccatgggttatatgggtccttagttaagattagatatggagtcacagtgtgccagaatttcagggagagaggaaagtggaagggctttccactaagccttttgaactactaggtacccctcgttttacatctggttatctcatttaaatctatgacgttttaaaatacttattaccatttaagacatgagaaaaattaagtttagaaacggctagatagctcacgctagaaaggaaggactccaaattttaaccaagggcagatgtgcatggaggccaagtcatttccttcccatgctctcatactgacccaacaaacccattctgcacgtgagaaaactgaggcccggaggagggaattcacacacgtttgaagccaagctggggccagaaagtagatcggctgatctccaaacctccacgtcaaaggtcttcccaggaggacatatgccttcaaggattttacaatgtataccaccctacaagtgatgggagagaggggaaaaaagcaaccgactaaggagaaaagcaaggagcagaaaaaggagcaaaagaggagctgtcagaacggtgtgaggagagtgggaaaggagccgcctccttttgcctctcttcctacttattaacaaaacagaacgactatccaacgtatttcagggagctaagtcttagccagcttcagctgtgttttaacccttagctaaatatagacaaggctaaggcaggccaggtgtacacttcaggaagacgtggaaattcccagggcggaccaaaacttgagctgttccggcggtagtgatttgaggtcagtttgaaagagaagttgagaaagcggccgaggggcgaatttggctgcactacacgctcgccacaaagaggaagggccgccggccgccggggccgagtgcgcttccagcccaggcggagcggtagacgcaacagcctccgcccgccacgtgacccgtagtgttgtggtctggcccgcgtgggtggcgggagcgcccagagggcgggggcggcgatggggcgggtcacgtgatggggtttaaatctcccgcagccggagccgcgggggcgccagtgccgcgcgtcgagcgggagcagaggaggcgagggaggagggccagagaggcagttggaagatggcggacgaggcggccctcgcccttcagcccggcggctccccctcggcggcgggggccgacagggaggccgcgtcgtcccccgccggggagccgctccgcaagaggccgcggagagatggtcccggcctcgagcggagcccgggcgagcccggtggggcggccccagagcgtgaggtgccggcggcggccaggggctgcccgggtgcggcggcggcggcgctgtggcgggaggcggaggcagaggcggcggcggcaggcggggagcaagaggcccaggcgactgcggcggctggggaaggagacaatgggccgggcctgcagggcccatctcgggagccaccgctggccgacaacttgtacgacgaagacgacgacgacgagggcgaggaggaggaagaggcggcggcggcggcgattgggtaccgaggtgcgcagggtgcgggcggccggaactgcgcatctcctcctccctctccccgggctcctactggcctgaggttgagggcggctgggggctcggggcaggctccgcggcgttcccctccccaccccggccctccgttcagccgcgctcctccggggctgcggttcctactgcgcgagctgccagtggattcgctcttttcctccgtccgtggcccgcctgggcggccttgttctttccgcagcagccaggtcgggagactctcgcagtcgctttaaaataagtttctctccccctcttactcttttagcatattgcttttgttagagctttttttttctttttctttattttttattttcattgcttttctyctctaccccccagcacacttaagtctgcaactttttggctgtcccgttggtctgcgttttcaattgctttttgcaaactgacacctgtgcagtttgctttttttggtctatatttttatgactgaaattacaatttttgaaagaggaaagctgtttctatagtcacagcttgcaaaatttaaagaacgtggctgttcctgaagacattaccattctgtaatgcagttaggagtgggtatgggagagagagtacttttagagctgttcatattacttttattctaatcttgctcttgtgcggtaatggtgtttgggctaaacatgctttttttgtatgtatgtagtattgagacacaaacttaacacttctagcataatgaagcagatatgttgcagttgtcatgttcttgaaggtttctttttttttttttttttttttttgagacggagtctcgctctgtcgctaggctggagtgcagtggcgcgatctcggctcagtgcaacctccgcctcccgcgttcaaccgattctccttcagcctgccgagtagctgggactacagacacccgccaccacgcccagctaatttttgtgtttttagcagagacggggtttcaccatgttggccaggatggtcttgatttcttgacttcgtgatccgtccgcctcggccgcccaaagtgctgggattacaggcgtgagccaccgcgcccggtcaggtttcttatttttgatctgaggagtttctatccttgataggtgttcatctttatcaatatttgggtcaggccgggcgcggtggctctttcgtgtaatcctagcactttgggaggccaaagcgggaggatctcttgagcctaggagtttcaggccagcctgggcaacatagcgagacctcctctctactaaaagtaaaaaaagcgggacgtggtgtcgcacacctttagtcccaggtactagagttcgaggttgcagtgagctgtgatcctgccactgcactccagggtgggcaacagagtgagaccccgtctcaaaaaaaaaaaaaaaaaaagtaatatgtgtttttagggactgatttagtaaagagaccctgatttcaagcaacacagttgagtactaatttattatttacctaataataattgtgttattaatactgtttatttaatagaggaaacaatgcagaggtacttgtagtattgtgtaagtttaacgtgcgcattgccaaggttatatttgaatgacgtttttatgtaaatgtccatttattacacgtttcacgaacgctattgtttgtgattgtatgatacattctagctagattattatcttttctttttttttttccttttctttttttttaaaaggtggagtttcgctcttgttacccaagctggagtgcaatggcgtgatctcggctcaccgcaacctccgcttcccgggttcaagccattctcgtgcctcagcctcctgagtagttgggattacaggcatgcgccaccatgcccggctaatttttgtattattagtagagacgagatttctccatgttggtcaggctggtctcgaattctcaacctcaggtgatccgcctgcctcggcctcccaaagctctggaattagaggcgtgagccaccgctcccggctatcttttctgttttttaagtagacttaatttatttttagattttggytgaaactgagtgagcagaattcctaaagatgaagaaactgttccaatgaacagtgcaagctgaccccataggcatgctttacacacgccgtgtaaatgttaaatgctgtactcgatgaaaatgattgctctataaccgttcatacattttaggtgcatgttgttttgatagccttgactgacttggtttcttttgcagataaccttctgttcggtgatgaaattatcactaatggttttcattcctgtgaaagtgatgaggaggatagagcctcacatgcaagctctagtgactggactccaaggccacggataggtatggctcagagctgttaattttagagagtaaatgtacgktttttggtttgtttgttttgagacagagtttcgctcttgttgcggaggctggagtgcaatggcgcgatctcggctcaccgtaccctccgccttccaggttcaagcgattctcctgcctcagcctccccagcagctgggattacatgcatatgccactacgcccggctaattttgaatttttagtagagacggggtttctccatgttggtcaggctggtcttgaactcccgacctcaggtgatccgtccgcctgggcctcccaaagtgctgggattacaggcatgtgccaccttgccccacctcacttgtcccctttttgtgtagtgttcttcatccggttagaatatcttcctccctcacttcatattccttgttttttcactttattgtacacttaccacttcttgaaaagctctgtatcttactttttaaattgtgttgtttcctggtctagaatataagttctacgggagcaggaatttttgactgacttgtatactcctgtcttttcagtgcctaaaaaagtgcctggcacatagtttgtgctcaataaatatttaataaatatgtgaatgaaatgggaaagtatttcgatgtagaaagcattatcagttttttataccaaaggtataaccatcttgaaagtggatctttttrtgttctcactcttacaaatggcttgattatttaaacatagtgaagatcagtttctctttggtgtctgtaatttatttatttatttatttttgttttctcaagcctagggagctggtttgagcaatctcagggtaaaagaaaatgattagttctcagaacatcaacattgtatgtattatcttggaagatgggttaagatcaaattgaaaaattaccggaaaaaaattaagatggcagttatgtatagattttcatttctttttcctgtgtggttttaatgataagtagtacaggcttttaggactggtacgatttttctatgtcgtagaacccttttgtaaatacttttggtattatggtgtgtgtttctagatattaaccataagaacttaattctggttgttaattaattagactcttgaaatatatacttacagctgaagggggtcttcccaactcttcattagatcttcctaatctcattgggatatagcattaattctgagtgtaccgagaatgaaataccattaaattgcattttcttactttgcaaaaaaccctcacagaatgctaactcatwacttcagaaaataaatgagattttgaattacttgataagttgactttaagccttttcccccttattgtaggtccatatacttttgttcagcaacatcttatgattggcacagatcctcgaacaattcttaaagatttattgccggaaacaatacctccacctgagttggatgatatgacactgtggcagattgttattaatatcctttcagaaccaccaaaaaggaaaaaaagaaaagatattaatacaattgaagatgctgtgaaattactgcaagagtgcaaaaaaattatagttctaactggagctggggtatgtaagactagtacatggggaggtcgtatatgtattttcttatgccttttccaagtaggaaacatttttctggtttagaaggatttatccttacatgataatggatgtttgggaactgccaaaaactgagtgcagcagcagttgctaaattagttcagatttttaaaacctctccagccttaaaaaaatatttgcttctgcttatttatagcacagtgggtaaatggagttaaggcaagatttctacctacattatatcatagctcctaaaggagatgcagggaattgaaactctgcttttgttaagggatgtcagtctgatggagaaattgggtrtttgttagatctttatgagaaactggaaacctaattggtattcacaagtgaaaagcttagtgttgggaagagtaacagattcctaccttccctccatattaattaagatgatgtgattgtggcgacttgacattttctatttgatctaccttagggttgcagctaattagttacctaagactattgcatagtgtgtgttttatacagagtatattacatgttagcaaccagagcaactgctgtagtaaaattttgtcctgttttctgccatttcgagttgcgaaagggtgttacataatcttagatgatcatcaggagtatgttttgctcacagataacgatgtagacaagtttgtttaacttaaattgaccttgactccaggtcaaattggagtcaactctggtaagatgatgaaacaataacttctgaaatctctatttgaaatgtcaggatttttttgtacgattagtgggcacgtctcaaagaaatgaagaattgaaatattatacaccttttttttttttcttttttttggatacagggtcttgctgtgttgccctggctggagtgcagtggtgtcatcatggctcactgcagtctcagcctctcctggcctgagtcttgctctgttgcctaggctggagtgcagtggcaggatcttggctcactgcaacctctgcctcctgggttcaagcaattctcttgcctcagcctcctgagtagctgggattacaggcgcacaccaccacacctggctaatttttgtatttttagtagagatggggtttcaccatattggccaggctggtctgaaactcctgaccttgtgatccgcctgccttggcctmccaaagtgccaggattacaggcgtgatccaccgtgcctggctatacattgttttttttaatgaaaatagagaattgttgtagtattgaggtaatagaatcctaactaaaggagcaatttctttggaattacttctctgtaatagaaattcttggctggtggagtggctcatgcatgtaattccagcactttgggaggctaaagtgggaggatcacttgagccctggagtttgagatcaccctgagcaacatagaccctgactctacaaaaaattagcctggtgtgctggtgcgtacttgtagtcccagctgctaaggaggttgaggtgggaggattgcttgagccggaaaggttaaggccataatgagccatgatggcaccactgcactccagcctgggcgtcagagcgaaactgtctaaaaagaaaaaaaacaaaaagccggrcgcggtggctcacacctgtaatcccagcactttgggaggctgaggcctgcggatcacgaggttaggagatcgagaccatcttggctaacatggtgacaccccgtctctactaaaaatacaaaaaatcagccggtcgcggtggcaggcacctgcattcccagctaatcagtaggctaaggcaggagaatggtgtgaacccaggaggcggagcttacagtgagccgagatcgcaccactgcactccagactgggcgacagtgtgagactctgtctcaaaaaaaaaaaaacaaaaaaaaaaagaaaaaattcttccctacttaaaataatttgttgaaatggtttattttcttctcaagttgcatttgctttaatttgttggctaaatgcttaaaaggcttaaaattggcctgacttaaaaattccttatctgtgttaaagatggaatatgaggtatrtttaattttactcagttatttgggagttttatttctgaaataagggtagggttgtatttttatttcttaaaagaagtttcagactaaaattttctttctcaactcttacctaattatatggtaagagagctagctagttcctataaaggtagaagrtttaattttacaaattatgccatgcacattttaggtgtctgtttcatgtggaatacctgacttcaggtcaagggatggtatttatgctcgccttgctgtagacttcccagatcttccagatcctcaagcgatgtttgatattgaatatttcagaaaagatccaagaccattcttcaagtttgcaaaggtactaygaactcttctggttgtttctttggccttctctcatgaaaaagtattttgttcacatacagccaccttaaggttatcgttcattgtttagtaaagtgaatgctgctactgtggcggagtaagatcactcattatggctagaattcctttattcctagaggaggactattatctacttcattttaggagtgagcttattttcaaagagatagttcatatttttaaaatttgcactgcagcgatggtcgttattctgcctgggcttttttaagaggtttgcacaccatataaaagtaacataacttgtgatttttaatattttattagagattgtaaaggttataacatcactttggtgtttcgtagtcaagttttaacataaggatgtgcctgaaaaatcatttgtaattagagaatrggaagattcttgggttgcatttttgtcagcaaattgcagaggatcattattctgctctagagttgcaccgtccagttcagaagccactagccacatgtggctgttgagtacttgaaatgtattgatatgtrcaataagtgtagaagacatattggattttagagatccagtatggaaaatacaaagtatttcattagttttattcatcaaatattaaacaaatattggtttttatatggaaaaaatacttaaaattaattttgaattmttttgaaatacttttgatattgggttaaataaaatgtattttgggctgtgcgtgttgcctcatgcctgtaatttcagcactttgggaggccaaggtgggaggatcagttgagcccaggagtttgagaccagcctgagcaacataatgagactccatctctacaaaataaataataaaatttgctgagcatggtggtgtgcacctgtagacccatccactcagtagtctgaggtgggaagatcccttgagctcaggagctcaagactgagtgaaccatgatctgccattgcactccaccctgggcaacagagcaagagtgtttccaaaatatatgtatgttttttgaagtttactttttttttttttctttttttgagaagtagtcttcctttgtcccccaggctggagtgcartggcatgatcttggctcatagcaacctctgcctcccaggttcaagtgattctcctgcctcagcatcctgagtagctgggattacaggcgcccgctaccatgcccagctaatttctgtatttttagtagagacagggtttcaccaggttggccaggctggtgttgaactcctgacttcaggtgatccaccctcctcggcctcccaaggctctgggattataggcgtgagccaccgcgcctggccagttttcaccttaatgtggttactaaacaatttaaagttatatgtatgtctcacattatgtacctattgtacagctctgctttagcatagaaagtttaataatgcattacaccattctcaagagattgagtcattagaaaactgttttctttcctgtatttcagtcttttggaaagaaattacaaaatttgttattgttaaacttggaggtatatatatttgaaagagtcattttattttattttactttaagtgccgggatacatgtgcagaatgcrcagatttgttaacataggtatacrtgtgccrtggtggtttgctgcatctatcaacctgtcatctaggttgtaagccccacattcattaggtatttgtcctaatgcttttccaccccttgccccccacctcctgacaggcctctgtgtgtggtgttccccaccctgtgtccatgtgttcttattgttcaactctcacttatgagtgaggacatgtggtgtttggttttctgttcttgtgttagtttgctgaggatgatggcttccagcgaaggagtcttgtattagtggctttttccccacctaatcgttagaagttgtgaatagggacttctttaatgaatccagaagttaatgaacctagcttttttttttttttttttggagacggagtctggctctgtttcccaggctggagtgtagtggtgtgatctctgctcaccatacaacctccacttcccgagttcaagagattctcctgcctcagccttccgagttgttgggactacaggcgcgtgctgccatgcctggctaatttttgtatttttggtagagacggggattcactatgttggccaggttggtcttgaactcctgaccttgtggtccgcccatctcagcctcccaaagtgctgggattacaggtgcgaggcaccgcgccccgcgccctgcckatgaacctaaattttaactaaacagtggccttatctactttcagaccatgtggtatatttacatgactacaggagaagctttgctaattcagaataaattatgttacttaaattggcgactgtctttaaaaaaaaagtgattttttggatgcagtagctcgtgcctrtaatcccagtgctttgggaagctgagataggaagatctcttgaactccggagtttgagaccagcctgcgcaacacagtgagaccctaatcactacacccctccaccccatgtaacttttgttttatccaggttgtggtatattaaatgggcattagtgtaaagtgggaaaattatattaattcttgaatatgattactaaactgaatttgaaaagttttcaggctatcaagagaatttttaacttaaaacttatataatttgaactttttacttcatatatccgtaatgatgatggtcatctatatctagcttttagagcagacaactggttcatacctggattaaataaataatgtaaagttattttttgttaattatggattagtgaagatttactgttttaacctactcctgctagtggcactactgcatggttttgaagaccagtgaagtatgacttaaaggtttcttgaattggagctaggacactggcatttataaaatctccacgtagcgcagacattgacactatcagaagaccagcaagtaactagaagttactttgatcttaaatcaactacaaaaaacttgactcactagttatggagaatacattttttattgttaaactgaaaaaaaattcagtcacttataaggtgtagcctcttctaatcctgtttatataaatttatttattattattattttttgagatggagtcttgctctgttgccaggctgtagtgcattggcgcgatctcggctcactgcatcctccacctccygggttcaagcaattctcttgcctcagcctcccaagtagctgggactacaggcacgtgccatcacgatcagcacttttagtagagacggggtttcaccatgttggcaaggacgtgtctcgtcgtgacctcgtgatccgcccgtttcagcctcccaaagtgttgggattacaggtgtgagccacaatgtccagctgataaatttaattttgcttttctgagttttcatttatggtaatggttaaatcagctagsctttacagttgttactcacatataattctttgtccatcctttaattctcacattgggaactgactaaaaaaagaaagcttccagtctgggcacagtggctcacacctgtaatcccagcactttgggaggccgaggtgggtggatcacctgaggtcaggagttcaagaccagcctggccaacacagcaataccccgtctctaataaaaaatacaaaaatcagccaggcttgggtggcgggcgcctgtcgtcccagctacgcaggaggctgagacggggagaattgcttgaagccaggaggtggaggttgcagtgagccgaaagcgcttaaggagaaataagtaaggacaaagagtgcaggatagtatcctgacayggaggatggggagggtatgtaaatattgtcgatattttactgaatttctaaatattacaagaatagaatattcataggataacctaagcttttctgtgagtcagtgtactaggcagaaagttcactaaagtggtttatgatttttgctacttatgagaaaacattaaaaatgaagccatgaaaaggaaatattggtgaaatttagatacttcagaaggaaagagagactttcttttttttttggaaagaatttctataccatctattatatcattgattgtatgtgattattgagaattaacttgttttttttttttttgttttttttttttgagacagttttgctcttgtcacccaggctggagtgccgtggtgagatctcggctcactacaaccttcacctcccgagttcaagcaattctgctgcctcagcctactgagtagctgggattacaggtgcccatcaccacgcccagctaatttttctaattttagtagagacgggatttcaccatgttggtcaggctggtctcgaactcctgacctcaggtgatccgcccgcctaggccaaagtgctgggattacaggcgtgagtctcccacgcccagcccttaaatttcatttagactggaaatttcaagtaatggagaggtgtgttaaggaagttattgctctgttagagcagtttcttaaatttggcactattgacattttgggctggatttttctttttgtttctgagatagtttcactctgtcgagccatcacagctcgttgcagccttgaactcctgggctccttgaacaggaggctcctgcctgagcctcctgagtagctgagaccataggcaygtaccatatacctagctaaatgtgtttttgactttcttttttctttgtagagtcaagttctcactatgttgtccaggctggtcttgaaatcctgggttccagcaattctcctgcttagccttacagagtgtcgggattgtaggcataggccactgcacccggccttgggctgatatttatttgctatggggaactttcctgtgcgttgtaggatgtttggcaatgtccctggccggccaggtgcagcggctcacacctgtaatcccagcactttgggaggctgaggtgggcrgatcacttgaggctgggagttcagaagagaccagccaacatggtgaaaccctgtctctactaaaaatacaaaaattagccgggtgtggtgacacacatgagaatcacttgaactcaggaggctgagtttgccgtgagctgagatcgcgctgctgtactccagcctgggtgacaaagcaagaatctgtctcaaaaaaaaaaaaaaaaaaaaaaaaaattcgctggtctccacctacgtttgtatccccaccccaagtcctgacaataaaaaatgtcttcaaaatgttccttgcaaaattgctcattgaggctaactgaggtggctcacaactttaatcccagccctttggaaggctgaggctggcagatcacttaagcccaggtgactggccctggccaacttggcaaaaccctgtctctactaagaatacaaaaaatagccagacgtggtggtgcacacccgtaattccagctactcgggaggctgaggcagcagaatcacttgaacctgggaggcggaggttgcagtgagccgagatcgcaccactctactccagcctgattgacagagtgagactccatctcaaaaaaaaaagaaattactctctgagcaccagtgtgttacagtgtgcttagctgtggtaccactttggattctttcacacaagaacagttaaggccagttttaaagctgtggggccatttctgaactgtattttgtttttttttttttggagatgaagtttcactcttgttgctcaggctggagtgcgatggtgtgatctcggctcacttgcaacctccgcctcccaggttcaagcaatctcctgccttagcctcttgagtagacttgattatgggatcttggctcactgcaacctctgcttcccaggttcaaacagttctgccttagcctgctgagtagctgggattacaggtgcccgccaccatgcttggctaattttgtatttttagtagagacggggtttcaccatattggccaggctggtctcgaactcttgaccttgtgattcacccacctctgcctcccaaagtgctggtattacaggcatgagccactgtgcctagccaattttttgaatttttagtagagatggggtttcatcatgttggccacgctggtctcgaactcctgacctcaggtgatccacccaccttggcctcctaaagttctgggattacaggcgtgagccacttcgcccagcctgcactgtgttcttatcctgcataatgacttaaattgataataagttgtggtcatggttctcagaaacctaaaataattcactgatgttaataaaaatgagtggttgtatttagagtcaaggcgaaactgaattaggatgtataaaataactttttttttttttttttttttttaagtaggactgttgttcggctgggcgtggtggctcacgcctgtaatcccagcactttgggaggccacagcgggcggtcaaaagtttgagaccagcctgaccaacatggtgaaaccctgtctctactaaaaatacaaaaattagatggatgtggtggcgcatgctgtaatcccagctactcaggaggctgaagcaggagaatcacttgaacccaggaggcggaggttgcagtgagctgagatggcaccactgcactccagcctgggcgagagagtgagactctgtctcaaaaaaaaaaaaaaagaaaagaaaaaaaaagaaaagggactatactatgttcgaagagtgtagtttctgtcccatactgaattcactgttctttccctagtgattaaaatacaagaaaaggtagagggagaaacacgaactgaattttatgaacttaattccaagaatgtatttttacatttgttcaaaaaattattactttattgataatatgcaaacataccagattatgtattaatagttaaaaatttgagttctagaacaagcttattaaaaatcaacgtcagtaaaaagaaaatagatggtagtcacagtgccattcatctgaaaataatgttttaatactcaacatgtatatggattatatatctatacgtttatagtattgtagctggatttatgttacatttttagcataaaatttggcttttgctgggcccagtggcttgcgactgtagtcccagcaactcaggagggtaaggtgggaggattgcttgaaccaaagagtttgaggctgcagtgagctgtgacctcacctctgcacaccagcctgagtgacagagcaagacccatccctgaaaagaaaaaacttggctgttttactttgctttcaatttgtagtatattctacttartataataaacttactttctgtgaggtgcttgaatactttttaatggttatttatgaagtggtgaactgtaattctgtatttgtacatttggatgtacaaatagtgttgctacagttgtccttttttggtatgtctccagtgttcttaggataaattcctgaaagtgaatttcagttttgaatttcagagaaacatgtcaaagttcttctttaagcctttaagtctcctgatatgttttgtcgtattgcagcttggaaaggttgaaataaaatcttctattagggctgggtgcagtggctcatgcctgtaatccgagcactttgggatttagctgatttggctgatttatcatgccactgccacctgtatccacccaaaatccacaaaaaccccaggatacattcttagcattaaaaaaaaagttatataaatatatataattatatatatatttgagacagggcctgtctctgatacccagacgtgtgcagtatctttcaaaaatcatatatctatatatagtttgccccttccttcagtctttgctgcccctaatatctgtccttaatggttaccatggtgaaactcttggaaatcattcagggggaaaaaaaatttgtgttgggataggggagggatgtcagcataagtttttaatacttgataaatgattgccaacagaatcaaaaacaccttgttttctatcttttttcaccatataatattcttgagaataatttcgtaacagcasttaacagatataccttatttttcaaagaaggctgtgtagcattctattttaaagttgtttcacagtatatgagtctcctattgataggtatctgcatttttgtctttttgatctagggttgtttttaaggcagtttaaaaactatagtaagtaaaagaggccaggtgcggtggctcacacctgtaaacccagcactttgggaggccgaggcgggtggatcacttgaggtaggagtttgagaccagcctggcaaacatggtgaaacccttctctactaaaaatacaaaaaattagccggccgtggtggcaagcgcctgtagtcccagctgttcggaaggctgagggaggagaatcgcttgaactcgggaggcggagattgcagtgagccaataatatgctgctgtactccagcctgggcaacagagcgagactctatctcaaaaataaatacaattttaaataaaattataaaaataaagcagcacccagctttattttttatttatttatttattttttgagacagagtcgcattctgtcgctcaagttggagtgcagtggtgccatcttggctcactgcaacctctgcctcccgggttcaagtgattctcccgcttcagcctcccaggtagctgagattacaggtgtgtgccaccacgcccagctaatttgtatttttagtagagatgggggtttcaccatgtttgccaggctggtcttgaactcctaacctcaggtgatccgcccaccttggcctcccaaagtgctgggtttataggtgtgagccgccgcgcttggctcaacatcttattgtttgagacagggtctccttctgttatccaagctggagtgtagtagtgtgatcttacagctcactgcagcctccaactcttgggctcaaatgattctcctgtctcagcctcccaagtagctagtactacaggtgtgcaccaccatgccctgctgtttctttgttttttttatatggacagtcttgctatgttgcccaggctggtctcaaactcctgagctcgagtgattctgctgcctcagctactcaaagtgctgggattgtaggcgttaactatcaggttaggcctgttctgtttttattagcgtggatgactgctggttactactggccgtttgtatatccttgaattacctctttgtttttagccatttttctccatttgggtgctttttcacagtgacttctgggaatattatgttcttttcttttgatttacctttcaaattttatttttatggatatataatagttgtacgtgtacattatatattcttgaagagttaggcttattgggattccagcctttagtagtcccatgaaggtgagcaaactgaaatgtacttactagtcttagtcatttggttcgtaatatgtaatagaaatggtgcttatcctaaaagaaaaatagaaaacttgagggtgaaggatcagaaattgaagacagtaaatactgcatagaggtttaaatgctagggtttttaggttttcttttttttttgagatagtcttgctctgacacccaggctggactgcaacctctgttccctggcctcaagcgatcctcccaccttagcctcctgactagctgtgaccacagatgtgcaccaccatgcccggctatttttttttgtatttttggtagagatggggtctcgccatgttgcccagtccagtgctggattttcatatcaaaacagggctctgctacttacttgctcttgtgaccaaaatggcaagttaggtttgttttgtatttgttttcatctgcatcggggtatatgttcacagctggatcagcaaactttctgtagtaaggtagggcctggtagtaaatatgtagtatgctttgcagactgcatagggtctctgtcatatgttctttgttttctttacagccttgaacaaattaaaaaacccagtcttcagccttgtctgtagcataataaagaggaaattaaaagtgcttatgttatacgtggtacatactaaaatttattaagtggcgactggcagtttaactaattgacattctcttgtgttaggttaatacaggggttggcgtactatggcctcagtccaaatgtggcccactccatgtttttgtataggctgtgagctaagcattaagcattaatttattacttaaatcaacaaataaagtttatgtggtgtacaacatgatgttttgatgtgtgtacattatggaatggctaactcaagctaatattcattacttcacatacttttttttggtggtgagaacatttaaaatgtactcttaataattttcaggtatacaatatttgttttgtttttgtttttgttttgagacgaagtctcgctcttgtccccaggctggagtgcagtggcgctatcttggctcactgcaacctccgcctcccaggtacaagcgattctcctgcctcagcctcccaagtagctgggattacaggcgcctgtctccacgcccggctagttattgtatttttagtaaagacagggtttcaccatgttggccaggctggtctcaaactcctgacctcaggtgatccgcctgcctcagcctcccaaagtgctgggattacaggcgtgagccaccgcgcccggctacaatatgttcttaattatagtcagcaatagatctcctgaacttattcttcccagcgtcttcccaatcccacctccaccccctgctaataattaattttaaatgactggggaaaaaattgaaagaactgtttcatgacacttgaacattatataaaattttcatgtcagtgttcataaatacaaacttttattagaacatagccatactatttatatattgaaatacagttgaatttgtcatatgaccaatttattagtattgattaagatgttgagcagtttattcaagtgtggttttgtggaatgaaagagacaggagggattatgaggactctccttagcaggattgatgcatttcactttttttgacaggaaggaaagtttaggttctattttctcagcaactctacttaactgcctccatctgaactatatataggagggggtggatatcagcaaagattaacatcagtaaattttgatgaattctctaaaaattctgatttttaaagagggaattttggctgggcacagtggctcacacctgtaatcctaagcactttgggaggccaaggcaggtggatcacctgaggtctggagtttgagaccagcctggccaacatggtgaaaccctgtctctactaaaaacaaattagctgaatgtggtggcgcgcacctgtagtcccagctccttgggaggctgaggtgggagaattgcctaaacccaggagaggtggaggttgcagtgagccgagattgtgccattgcactccatcctgggtgacagagcgagactctcaaaaaaaaaggtgggtgtgaattttgttatgttgtgcgggctggagtgtagtgcccatccattggcacgatcatagagtactacagctccctaactcccagactcaagtgattctccctcctctgtctccccagtagcaggaactacaggcctgtgccaccatgcccagctttcttagtcttgagggactgcatttacacctatgccttttactctagggtcttttattcatattgctagaaatttggagaagaaagaaaggcataatctctgsagaaaagccattatttctgcagatagttctttttttttttgagatggagtctttctttgtcacccaggctggagtgcagtggtgtgatctaggctcactacaagctccacctcctgggttcacgccattctcctgccttagcctcccgagtagtgggactacaggcacccgccaccatgcccagctaatttttttttgtattttttagtagagacggggtttcaccatcttagccaggatggtctcgatcttctgaccttgtgatccgccgacctcggccacccaaagtgctgggattacaggcatgagccaccacatccggccaatttctgcggatagttctaagctttagttttgaccacgttggttgcctatggccaattcctggattatttgcatgtttccagacacagctatgtgaaagcagggtttgttttaatagtgttttgagcctttgattccagttctgcttccactcttggtctataaggatccctatggcagcaacagaatggcccagccctcatgattggttgcttaaaaaggctttaggatattcaaactgggtggcctgtcttgtttggaataggactaagcatgtcacactttcaccatggaagagttaatccatattctatctgtaagttgtatctccagtcattggttttcaacaagtggtcctatcttaggaggagtggtatattagaacagtccttccagagtaatttttttcattatttcagattttttagttttttttgttttttttttttttttttttttttaaaggctctcactctgtcacccaggctggagagcagtgatacgatcatagctcactggaacctctacctccctgggctcaggtgatcctcccacctcagccttctgagtttctgggactacaggcatgaaccgtgaggcccagctaatttttgtgatttttgtgttttttgtagagtcagggtttctccatgttgcccaggctggtctcgtactcctggtctcaagtaacctgcccgcctcggccttccaaagtgctgggattagaggtgtgagccaccacacctgtactactacttttagtttgaacactatatttaaatctaataattcagacatggcccatttcatacttgacagaaagtatgagtcaaagactcaaatcattcagattctcacatatgtaaaacgtacgcttggccgggtgcagtggctcacgcctgtaatcccagcactttgtgagaccaaggtgggcggatcacctgaggtcaggagttcaagaccagcctgaccaacatggagaaaccccgtctctactaaaaatacaaaattagctggggtggtggcacatgcctgtaatcccagctattcaggaagctgaggcaggagaatcacttgaacccgggaggtggaggttgtggtgagctgagatcgcgccattgcactccagcctgggcaaaaagagcgaaactctgtctcaaaaaaaaaaaaaaaagcaggcttataaaataaaacaaaaatgtcccttatgatttgtcttaaaggtagttgaattaataagagctaaatctagtgtcccatacatctttgtgtttcttactctaccctttagaaagggtgggggtggacgtggataaggcacacagttaattcagggacggtggagtcttggtacttgctctttttccctgaccttgctttggagttattttattttttaaattctgcatttggcatgctattatcacttgcttactactataggtcctattttatctgttgcctagcatattctcatagtgcctaaaatactctaaaagctatttccagagggagctttaatgagacatacaatgcttaatctctcaaatgtaaatgtactagaacaaagcattctggggaagaaaacagtggttgatttaactgaactcacttttccaaaacagtggcttttgattttctgtaaacattgactttattaagcttttcccttgctactatatgcactctctatttcttaaattgcaaagagttattcatgaaatttgtgataaatatttgaatctaaggcaacgtttttggattctttatacgaggtttttagcagcatgtgtacatgtatgtgatagctgttaacggaattcacttaagttttacttagaagcctgggtagtagaacctagaagttgcagtgggaatttttttttaatttgaaagattaaataggtaaaaagtcatctttaatctctattaaacttttttgtrtaatgtcagaagtgaaagttccccacatctgcttacagcctgtttgtatccttcctgacttgattgattaaatggacatctctatatacatatgcatataatttcaatttttgcttagtaacaaaaacaaaagttacacatactggtgactaatttgcttttttcacgtatgtcatgaaccattttccagggcagttcatctagatctccctcaattctttttaatggctacatattccactattatggatgtaccatatttatacaaccggttccctattgatggacatatggttgtgtctagttttttgctagcattgtgatagattagagcctgtaatgaatggtaaggaagtaagtagatgatagcactactactttgaaggaaaaagtagagaataaacttcctttgccatagtcacttactaaatggaatttaataaaaacactgtcaaaagttgggaggaccaaaattgatactttttctctgatctttttgccatgtgtatatctgaattctttgtttttaaagaagaaacagcattgaagcattatttggggggaaaaacacacacacaaaatccagcaactcagcattcatgagcaactctatactataccagtatgtgcctgtgcagtggaaggaaaacaattttggtaaggattaaaactttagctttaaacttccagcaggttgatattctaatgaatgataaatcaaaaaaaaattttaaatattcttgtattgacagtgcttttttttttaaatcaccctaccttgatatctgtaattttagtttaaactttcccatttttctttaaagaaaaaaatctgaatttgcagccaacaaaaattagatatcctaaggttgtattacttctgacttttattaaaatatcaacatttcttagagatgtttatgggccgactttgtctttttcttcaaggggccaagttcactaattgctgagttttatgcatatgacagcaaccgtccttttgtaggtgtgtgtcgcatccatctagatactttaaaatgctcatctatttcatttttaaaattatgtgtgtgggattatcagtatttttttgttaaacatatgacatctgtagtttatttcactaaygtaaattttttctaccatttgcttgatacaggaaatatatcctggacaattccagccatctctctgtcacaaattcatagccytgtcagataaggaaggaaaactacttcgcaactatacccagaacatagacacgctggaacaggttgcrggaatccaaaggataattcagtgtcatggttagtaaacttcagagtggttttctgtaatttattttagttttataggaagatatttcctataaagctgactgccatcgagaagtggagataaagcattatttaatcatgttatctcatttatcgataacctcagaaaagtagaaaacaaaaataataaaaacagaagtattggccttgacagttaattatagaaaacctcagatrttaatttgcttttgatttcaaaagatgctgcagttgcatgcattcaattattttaaataatcttttctggctgagtgcagtggctcacgcctgtaatcctagcactttgggaagccgaggcgggcagatcccatgaagccaagagttcgagaacagcttggccaacatggtgaaatcccaactctactagaaatactaaaattagccgggcatggtggcaggcgcctgtaatcccagctactcaggaggctgaggcacgagaatcacttgaacctgggagttggaggttgcagcgagccaagattgcaccattgcgctccagcctgggagacagtgagactctgtcaaaaaaaaaaaaaaaaaagaaaaagaaattctgaatacaagagtagtattagctgttaatgaagaaatgtgacatctttagtttatgaaactaaaagaactggatagttgagatgtacaggattcagagattcagaaatgtttaaaacaagtatcaacaggccattaggtatctaaagtgtttctaagaactgccgagctaaggtaatagagttggaactgtccaactctgcaggattttagccctggaggagtgagctgttacagttttgttgaaaagagtagctttagaaggcatcattatattagtgtctcagagattgagaatcatattcattctatgtataaatatataaattcttcatcccctagattctcctgtagtatatcacaaaatctgcagtgtgttctgaggtttaaaatcaaagttaaaaacaaaaacaaaaatccttaaaccctcttaacatttgtgatgttaaactttataacgtttgtggtgtgttcaagaaacagaaatacttctttaataaagcatatatatgttgtttgtttttaggttcctttgcaacagcatcttgcctgatttgtaaatacaaagttgactgtgaagctgtacgaggagatatttttaatcaggtaatttgttgcccatattttaggaattgttcatgtctctgaagtatttcttcttttgcctcaaaatccttttttacccctttaaagtatatatggtacagaaagattcaggaagaaaatagttagcatttkggaattttggtaaaatacacgagaacctttcaataccttatatagaaaacagccctataaaggctcttcaaattatgaaattggcttcwtagtatctaagccgaacataaaatgtcagatcataagcaagttgttgttgtagtagtttttctccttcctctccctttttgtgcctgtcagatttggaccttaaattagttatggtaatctaaaattatttcatacatgttcattgccaaaaaatataggaaaatttggcagaaaataaaaattatccagaaatatgtcctgtgtgcttagcaatatatggaggtaatcatgtcattacgaaagaggaagaatagtatattaaaatggagtcattggtcgggtgcagtggctcatgcttgtaatcccagcactttgggaggacgaggtgggtcgatcatttgaggtcagaagtgagaccagcctggccaacatggcaaaacccygtctctcytaaaaatacaaaaattagcctggcatggtggcatatgcctttaatctcagctgcttgggaggctgaggcaggagaattatttgaactcgggaggtggaggttgtagtgagctgagatcatgccacttcactccaggctgggcaacagaacaagactccatctcaaataaataaaatggaatcattttatttgacaaatgtctatttttttttgaaaggatcaattcccatttagtgtatatacacacattatgtttttcctcttaatatatgatggactcttcaatgtcaagtgtttttctacatagatattataacaagagcatagtatttcattgtttcatagtatgttaataaactacccatcattgacagttgctgtttatccatagcttttctgttttgttttttttttaataattctgaaatgtattcttagaggtatggaaatgttgactatttctaacttgggcttactctttgcttctctacctcaaccaaaatctgaaaatatgtaggtagttcctcgatgtcctaggtgcccagctgatgaaccgcttgctatcatgaaaccagagattgtgttttttggtgaaaatttaccagaacagtttcatagagccatgaagtatgacaaagatgaagttgacctcctcattgttattgggtcttccctcaaagtaagaccagtagcactaattccaagtaagttggtgatggtttttggagaacatttctatatataatgtcatgggttgtgggtctgtataatagacgctagtaatcttaactctgcttctgtttgaaagagtggtgaagagctaattttagaaattgtttgtttgtttgtttattgagatggagtttccctcttgttgcccaggctggagtgcagtcgcatatcttggctcactgcaacctccgcctcccgggttcaagcgattcttctgcctcagccttctgagtagctgggatcacaggcgtccaccaacatgcctggctagtttttgtatttttagtatagaccgggtttcaccatgttggccaggctggtctcgaactcctcagctcaggtgatccgcctgtctctgccttctaaagtgctgggattataggcatgagcccccatgcctggccagaaattctttatttttagtagagatgaggtcttgttgtgttgcccaggctggattcgaactcctgggctcaagtgatcctcctgcctcagccccttgagtagctaggattacaggcacgagcctccacatctggctgaactgtttttttaggtggcattgttcattgagactggtgaatctgacattttgatggggggtggagggttgtcaaaacgcaagtaatgttggtggctcgtgcctgtaatctcagcactttgggaggccgaggtaggtggatcgcttgagggcagcagtttgagaccagcctggccaacatggtgaaaccctgtctctactaaaaatacaaaaattagctgggcatagtggtgtgcacatgtagtcccagctacttgggaggttggggcatgagaatcgcttgaactcaggaggcagaggttgcaatgagccgagaatgtgccactgcactccagcctgggtgacagagtgggactctgtctcaaaaaatcaaaaasaaacccagaagtaatgctaaactctacttctaatttatgtgaaaaattaagacaaaggtagagttcaacttagactttttggtggaatgtgtttttaatgttgcaagggttagcatcaattaatttatgaaatggtcctttatccttatattttttgattacagttttgatctttcaaatttaattgatttcacatttaataaattcaaatgtatagtttggtagaagtgtaacataccatgtaagatggaatttgggggctcagaatgattggttcattcttgtagtaacagccatgccataacggtgatatgtcgatatagtttacccaaaagggtgtgtatataaaagtgttcacataaaatttaaatccytattactctcaggaaaatttctttgtcatatatattctcatactgtctgtttcctcctctagtttagaatcagaggaggagagagagagatttcagttgcatcagatgtgtcctttcataagtgagggaaagaggagaggaaaaatattaaatccctagccagagaattgaattagaccccacatcagcagtcaaggcagccagagtaaacagttggaagaaacatggagtcaagctcttcaattttgtgtctatcccatatctcgtggctttagcagttaactcagtcttacctaattagctgtgaaattctgttaaagtagaatacaagacaatttgcaattaaatgaaacatgaaaatttaatatacaaatctctttgttcttgagttgctcttcttaaagcaaaatcaaaggcactctgcttaaaagcttttctttttattttttagagacgggtgtcttgctgtagctcaggctagagtgcagtggtgcagtttcagctcactgcagccttcaactcctggggacaagcagtccttccacttcagcttcctgagtagttaggaccagaggcgcacaccatgcttggcaaatttttaaatttttttttgtagaaacgggattcactttgttgcccaggctggtcacaaactcctggcctcaagtgatccttcctcctctgcctctcaaagcattaggattacaggcatgagctaccatgcctggtccttaaaaacttttctttcaaaagctttctgtgggatagtatgatgtgttgcaaagataattaaaaaaagaaacaggtttataatagcgtagaatatgtttatatgactttttccctccccccctcccctccctccctcccttccgtttgtccttccttccattcatccttccttctgttagtccttccttctgtccatccttcccgtccgttcttccttccttccttcgtccatccttctgtctgtccttccttccgttcatctgtccgtccttccttcctcccaccctccctccctccctcctatcctccctccctccctcattgcccaggctggagtgcaatggcatgatctcggctcactgcagtctcccgtgttcaagcagttctcctcccaagtagttgggattagaggcatgcgctaccacacgcccggctaattttgtgtttttagtagagatggggtttcaccatgttggtcgggttggtcttgaactcctgacctcaggtgatccgcctgcctcggcctcccaaagtgctgggattacaggcgtgagccactgtacccagctcaccttctttatatcaggagctacttaagtagaacatttatgtaccaagaactcttctgtgcacttgactaactcatttaatcctcaccacagtcttgtggagaagtactattatcatccccattctgcagacaaggaaatttgaggttcagagtgggaaagtctgggaagattgctcaggggtaaccaggtgataggagcagaacttgagcgttttataaaagacacttaactgcccatctgcttgcttgatgaaatgtaatggcttggttaagtatttagtgcatgggtcttttttgggaatttggagctcaagcccttgttggatttttgcataatgtatctgttgtggttttattagcttacttcctcctccctttttctaactcttatttttcaccctattttaggttccataccccatgaagtgcctcagatattaattaatagagaacctttgcctcatctgcattttgatgtagagcttcttggagactgtgatgwcayaattaatgaattrtgwcataggttaggtggtgaatatgccaaactttgctgtaaccctgtaaagctttcagaaattactgaaaaacctccacgaacacaaaaagaattggcttatttgtcagagttgccacccacacctcttcatgtttcagaagactcaagttcaccagaaagaacttcaccaccagattcttcagtgattgtcacacttttagaccaagcagctaagagtaatgatgatttagatgtgtctgaatcaaaaggttgtatggaagaaaaaccacaggaagtacaaacttctaggaatgttgaaagtattgctgaacagatggaaaatccggatttgaagaatgttggttctagtactggggagaaaaatgaaagaacttcagtggctggaacagtgagaaaatgctggcctaatagagtggcaaaggagcagattagtaggcggcttgatggtaagaaaggcagtcggaccattttgaaagtataaatgtcataacagtatttccaaaaaattagctatttcggcaggttaatcgatagggtagctttatgtagttgattctgtttagagaaactgtacagttcgtaatcagaaaggtaaatcttctggtatcttaacatgatatggagaaggaagtgtttaatagtgctctgtatgttgtrtttctctaggggatggaaaaataagaatgggttattagctggcagaaatgatgacagatttgagtgcttactgtaggtcagctgctttacatatgttacctgattttaatctgaggtaggaactattactcttcttcaggtgggaaaactcaggaccatagaggttaaatacctcatgcacagtaactactaagaagtggaagaaccagattaaaatccagtctatttatgcttagagcctgcccscttaactactatgcggtgttgtctcagatgtagaacacatctttgttttctctgaggacttagaaaaaacacgcgtgattcttctccactgaatataggaatagtttctaccctgtttagaacatgcatagtctttatcaataagtgttaactgacatgtgaaatcactttctactctttggaagccgatgttttaagtccaagtagtctgtatggtggaaattcctaacttatgttaaaaaaaagaaaaccactgtaacttagctataacagtcttatataacttagaactttaagtctcattccatttaccatacttggcgaaaactgacaaattttagacaactgtatttgagtattccagtcatttgctgtaaatacattttagttcagttgaataaacctttggcctttttcatattaggcactgtggtaagttatggagacacagtgattaatgttgtgtataattataaatgtgagtgatactcattaatactttggtataggtgctgctgaagaacaaagtactttattattgttttgaacaaaacatcacacaaaaggtagattttttttttttttttttttttttgtgacggagtctcactctgtcgcccaggctggagtgcagtggcacgatctcagctcactgcaacctctgcstcccaggttcaagagattctcctgcctcagccttctgagtagctgaaattacaggcatgcgccaccttgctcggctgattcttgtatttttagtagagacggggtttcgccatgttggtcaggctggtctcaaactcctgaccccatgatccatccacctcggcctcccaaagtgctggaattacaggcgtgagccacggcgcccagccccaaaaggtagattctacttggagattagattacagaaggctttctaaggagcaaaatatttaacaataagtagggatttaaaaagagcagacgtgttcacaggggaaactagaaaaagcatagagggatgcttacgtttgcaaatcgtggcagaagtcagaaagtagaaaaattgctactgacttagatacacagttgtctctagcgtatacaaagtctacctatgcactaagacttgcactgggaacttttcttgaatgtcattttgacagatgtgtcaaacggacaatctctttgcccaggaaacagagttaacctggaacagtcatttttttttaaatttatttattttttgagacggagttttgctcttgttgtccaggctgaagtacaatggtgtgatctcggttcacggcaacctccgcctcccgggttcaagcgattctcctgcctcactctccagagtagctgtagctgagaccacaggcgcatgccctcatgctcagctatttttttttttttttttttagtttttgtagaaacaaggtcttgccacattgcccaggctgataccaaactcctgggctcaagcagtctgccagccttggcctcccaaagtgctgggattacaggtgtaagccactgtgccctgcctgtggtgtcttgggaaactcatgagtactatgtgtctgttgtaatagagggaaataagtggttttcacagtgatttgtagtggactgtgaaattttagggattcaggtcagagttgtcacacaggttgtagtcagggtgagaactgggtcatgatgcagtatgaaaaagttcgagagccactttggagagaacttgagataggccacctaccagtgtggtaaccaggcttttgagaattcgtctgggatacggtacaataaatactayatctattatgtgtgaagagatgttaagttagggacatactgtgaattcaaggatagaaaacttttccatcagtttttagggatcctactctttcacttaaaccccaartggccaagctaggattgatttggtgtgctgtagaaagaacttcattggtattcatggattcacattacatcttagaggagttttcaaaagcgtcttagactgtatgtgtatatacacacacattctgaagcagtaggtgggtcttggggcctgagatctcgggtgaatstaaatttaggttcacaggtgatactgtagattcacagtgtctacagagtacactatgaatttgtggtgactacattattgacaaaatattttaggtttataatcagaaaaaagttaaaatagttaatgaagatgctttaaaagcctgtgtactttagagaagctacttaacacaaattgggtatctaatgtaggctgggctggatacttcattttcatcaaatctttttaaaataattggtgaaataacctttattgaatatggttttctacatttttcacacttccctccttcatagggttgtgaaaatttatttcatattctagatgaggaaattgaggcacagaggtacacttacaaagatacaataaatggcagaactaagatttgaacccaggactaagtgtattgcttgtatttatttaattaattaatttttaagagacagggcctcactctgttgcctaggctggcccttgaactcctgggctcaagcagtccacctgcctcagcctcctgagtagctgggactgcaggcacaccatgcctcccagttgtttttaaacactaatagtagtctttcataaggacacttataataaaggcagagctggaacccacacttcattccagactgctcagactgagttagtgttagaaaactgaaagtaacatttttattactgtatttcaggtaatcagtatctgtttttgccaccaaatcgttacattttccatggcgctgaggtatattcagactctgaagatgacgtcttatcctctagttcttgtggcagtaacagtgatagtgggacatgccagagtccaagtttagaagaacccatggaggatgaaagtgaaattgaagaattctacaatggcttagaagatgagcctgatgttccagagagagctggaggagctggatttgggactgatggagatgatcaagaggcaattaatgaagctrtatctgtgaaacaggaagtaacagacatgaactatccatcaaacaaatcatagtgtaataattgtgcaggtacaggaattgttccaccagcattaggaactttagcatgtcaaaatgaatgtttacttgtgaactcgatagagcaaggaaaccagaaaggtgtaatatttataggttggtaaaatagattgtttttcatggataatttttaacttcattatttctgtacttgtacaaactcaacactaacttttttttttttwwaaaaaaaaaggtactaagtatcttcaatcagctgttggtcaagactaacttcttttaaaggttcatttgtatgataaattcatatgtgtatatataattttttttgttttgtctagtgagtttcaacatttttaaagttttcaaaaagccatcggaatgttaaattaatgtaaagggaacagctaatctagaccaaagaatggtattttcacttttctttgtaacattgaatggtttgaagtactcaaaatctgttacgctaaacttttgattctttaacacaattatttttaaacactggcattttccaaaactgtggcagctaactttttaaaatctcaaatgacatgcagtgtgagtagaaggaagtcaacaatatgtggggagagcactcggttgtctttacttttaaaagtaatacttggtgctaagaatttcaggattattgtatttacgttcaaatgaagatggcttttgtacttcctgtggacatgtagyaatgtctatattggctcataaaactaacctgaaaaacaaataaatgctttggaaatgtttcagttgctttagaaacattagtgcctgcctggatccccttagttttgaaatatttgccattgttgtttaaatacctatcactgtggtagagcttgcattgatcttttccacaagtattaaactgccaaaatgtgaatatgcaaagcctttctgaatctataataatggtacttctactggggagagtgtaatattttggactgctgttttccattaatgaggagagcaacaggcccctgattatacagttccaaagtaataagatgttaattgtaattcagccagaaagtacatgtctcccattgggaggatttggtgttaaataccaaactgctagccctagtattatggagatgaacatgatgatgtaacttgtaatagcagaatagttaatgaatgaaactagttcttataatttatctttatttaaaagcttagcctgccttaaaactagagatcaactttctcagctgcaaaagcttctagtctttcaagaagttcatactttatgaaattgcacagtaagcatttatttttcagaccatttttgaacatcactcctaaattaataaagtattcctctgttgctttagtatttattacaataaaaagggtttgaaatatagctgttctttatgcataaaacacccagctaggaccattactgccagagaaaaaaatcgtattgaatggccatttccctacttataagatgtctcaatctgaatttatttggctacactaaagaatgcagtatatttagttttccatttgcatgatgtttgtgtgctatagatgatattttaaattgaaaagtttgttttaaattatttttacagtgaagactgttttcagctctttttatattgtacatagtcttttatgtaatttactggcatatgttttgtagactgtttaatgactggatatcttccttcaacttttgaaatacaaaacyagtgttttttacttgtacactgttttaaagtctattaaaattgtcatttgacttttttctgttaacttacattgtttaaggtatataatttttaagtcttgcagaatttgtacagcttcgaatgctatagtattagatgctttctttctcatactacatttcttcatttggtttattacattagtctcaccagaccagtacttgcaaaaccctgatggtgctgatcgtagcaggtgatgcatcaccaccaagcatttcaaaaactatttcagccattctaggctagaggcctgagcaagtaaaacatggagaaaaggcagggcagggcctaagaaggatgtgacatgtcctatgataaaggaccaggagtttgggatttgagagagaacaggaagtggtggatagtgaaaatccatctgatgcaaaggctgggttaactgaaaatctgttctgggatgctaggtctttcaagtctgaagactgcagaccacatttggtatcaactttctgaggctgacctgagaacctacttaagccattaaaggttttgagggcgaaagtattactgaagaggccagcagtgtaccccttaaaatgtatgtgtaacttggtcgggtgcagtggctcacgcctgtaatcccagcactctgggaggcctacacgggcggaccacctgaggtcaggagttcaagaccagcctggccaacatggcgaaaccccgtttttactaaaaatacaaaaattagtcgggtgtggtggcggcacctgtagtcccagctatttgggaggctgaggctggagaatcgcttcaacccaggaggtggaggctgcagtgagccaagatcgcgccactgcactccagcctggtgacagagcaagactccgtctcaaagaacaaaaaagtatatgtaatgaataaagctttagcaatttcctgttcccagttctgcctccctccccagcaaactttctaggtagacctgtcctgtatattgttagcactagagaaattacctgtaagatgatatcctcaaaatattacaaaattaaggaacattctatatatgcacaaattgaagaagtcaggtagttgatacttttaaaggtacatagtcaatttaagtggtcaaaaggtatttggcaaaacctaatttaactcaagccctatgcataacgttattgctgaaccactggctaatgcagcatgtactgtatttcactgattgtaataccctaattaatgtcacatggtttaattagcgtttttttttgtagtggtacataaaatgacggtggaccttcaatcaatggtgttttacataatccccaactaagctttatttgaaacacaacttctgacctgtaatctagaaaggggtgggggagtatgtatatgtatgtacaccaaaacctctcccccaaagatctaaagccattctaggccttcagctcaaactaggatactagtagaaagtacagaaaaatggtctaatgacctccccaccttttgaagtgactgtcaaatgagactattaaaaaccacttgaaaacttttaaaaagcaagaatagcctgagacctcctagaaatacagatttaattggtgtaaggtggggtttgtgcagagtattaaaaacgcccccaggcgattcaaaagtatagccagatttgagaaacacccttagctggaaaagaattgaggagctctgttttgatgacttttaacatacactccttagggctggcctaaaaaaggaggttaacttacattagcctcaattcccaaattttacctagaaatgcttcataaattaggtaatttggggttcataagcaaatacagcagagtagggagctatcaaaatagagtgaattcttcagcaaaggaggacaaaactaccataaggcattctggatggtcaaagtgcaaaagaggttggggagtggaggaagagactgatgacaggaatattttgctcttgttttagcaggcttaccatgcactcttcaggggaagactgctctatgccatattacaccttgattcacagctttactaaatgtagtaaaaagctgtaaggaagagcaacctgatagtaaaaattgaccccaatgaatggtccttaggaacagatcctatgagaaggctaaccgtgggaatctaatttaggtctctcagtttttacacctacattctggttttattgttttatttatttttatttttttgagacaagtcttgctctgtcgcccaggctggagtgcagtagcgccatctgagctcactgcaacgtccgcctcccaggttcaagtgattctcctgcctcagcctcccgagtagctgggagtacaggcatctgccaccatgcacggctaattttttgtatttttagtagagagagagagggtttcaatatgttggccaggctggtctcgaactcctagactcaagccatctgcccacctcagccttccaagtgctgggattataggtgtaagccaccacgcccagcctgcattctggttttatttccttttaattgaaaggagtgtcttggttctgctgtcttattaatcatcctgaacaatggctaatagcttgaatgactactaagacaggagagctacacacacactatgtatttgtaccttacaaatagatgtgtggaggccaaatacttcagtatttagccaactcaataatcatagtccctacaatttagcaaatgatctgcagccttgctgctctgatctacaaagctcgagacttcttcttgttttttaaaagtaagtggcaatttcagaaatcttcaatggtattttaactttctaccatgaatctccttgctgttaatacattgtatcacagttctggagtaacagggaggaaaagtccccaaattaaactttgtacagtgtgctcccagatgctattctcttgttaaaatatttgttcatggaactattaatccaaagtgcctgctatttcacaaatcagcttcataatatacaaaggttactactattgagaaagagcatctgacatgcttttgatttgaataattactacctcaagaagtggatgaacagggaaaatggtataatatcaggtatgtggaaacactctcatggggaagaatgctactactttgagacaaagtaccttaggtgagaatattgttttagtgcttctatctatagaagagttctatggttcgccaatagttttttaagttaatctactgaaaagtacaagtccacaatcccttatccaaccccttgggcttatttgcattttggaattgtgaattctgaagaattttttaaagcacccaatagcggtcatagtcttatttagtgaataccataaatagcttcaacaattcagatcaggtttttctgcaaagtgagagatgacaatattcttttcagtttttttaaattttagaattgcaggttaagagactgtggacctctataaattcatgtgggaatagaaacaagtcatccgaaatttaagagaccttccctgaaccatccctctttttgaaaaattttgactcttatatgagaaccactgaaagtttaaatattaaaacaataaatctttattaaacagttttcacggcattttaaaataaatttaaaaaataaatatttgcattatagcagaaagtcacatgtattgcatcaactcacttttacaatttaatggcatgagacaactaagcatcagcaccataaaactgttaagatttgtttcttaaattcaaggaaatagctctaaagcactgcagcatcaataattttgaaagctataacccagtgattggtgctcatagtagccaatgtttctttttattactggcaactgtggagacagagttcttccagtactaaatattaataagttctctgatcgacaatcccccatctatcagtgtgtcaggattcacaaagaaaagaactgcaggttatgtagtatattccctatctgtgatttaggtttgcacaaagacacttattctagcaaaaaagaaaagatagtgtttccaccatgctaccttttttttctttttatagagtctcagagtaagatttaaatcataatttttaacctttaaaagtctgttcaagttcaattacaaccatagaaactgtactggtatcagaacataactattttattacaaaacttaacattatttacaaaatgaaaaaataatcaaatgactattgcaggccaaagttaaaggtttttcactcaatgattgaagaaaaattaagcaatatttccatgcactcacaccagatcatttctgaaatatgcaaactcttaaaattcatgttagtaaaactttaatgtattcataatacttgctatgtttattagaagatggtcaaaaaaaatccatggttctgtacaataatattaacagtttgttcattttcctttaatattttttggcttccatgaacactcgtagattgaacattctgcaagtaagaattataatagtacctctgtcaccttgctgaattcatcaccacaagaaaaacacaaatagtttaatgcttttgcactaaactgaatagttataactccaaagttatattaaactgaagccttcattgtgatcaatagcttggatcagtttagagcgtagagtttctttttctgtatattttggaagatccagaagattaaaacaagtatgggaaactgggagatactcctcaccacctcctgtggactggatgactagtttcagactcttcataccaagaataggaatgcgatcactacctgtcaaaaatactgccaagaaagaaatcattcagtcaaccacttcaaaacaaaaagatacagtagcaagtaatatttggtacagtcgctacagcagagcttcactttaacatctgctctaacgtgttatcttacttcctaatttgtggaagacaagttttttgagacacattctaattgctcatccacacaatattttttctttaaaagtataatcttaatactggcacaaaggaagtgcttaataaatgtttgataagtgagtattttgccattgccaaaacattttgagagcccttttttggaaaagccattcagaactagttgacaaaccaaatacaaaatgcagttttgattatgatttctttttctatttgcttcgtttctgttattttttttaaatcagaaatttataatgggcagccaaaattcaaatcattcttttttttttgagacgagtcttgctcagttgcccaggctggagtgcagtgtgcggtcacagtcacagcagcctcgacctcctgggctcaagcaatcctctctacctcagcttctggagtagctgggagcacagtcaccaagcccagggctaatttttatagagatgaggttttgccatgttgcccaggctcaaatcactcttaaagagtaatgatttctcatccttatgacacacagaagaatttgaccaagattctcggaggttgccaaatcattcctggcaaaagcaggagtatcaaaggaaatgtcaccgatttggacacataaattctgacaactttaaaaataagtcaaatttcaattagaatacagactttaacagaagaaagatacacaggcatcagttataaatgagggaactaaggcctgaaaaagctttattttatatagaaattgccaaagttttagtcttgaagcaaaaagaaaaagaaaaagaaaatgaagaccaaacagagaaaagagcaatacagttggccctccgtatctgtgagctctgtatccatggattgaaccgactgcaaatcgaaaatattttcaaaaaatggatgcttgtgactgtactgaatgtgtcaactgtttttcttgacattggtccctcaacaatacagtataacaactatttacatagcatttacattgtatgaggtattaataacatgtacattcatgtgtcacttaacgatgatgatatgttctgagaaatgcatcattaggtgatttcattctgtaaacatcatatatttacacaacctagacagtatatag

SEQ ID NO: 97974 - DNA, 14465 bp, Homo sapiens
ttcagcttccagtgggtttatcaggacatagtcccatcataagtggaggaggatctatactcctatatgctgtttgtgggaggacaagggagatacatttatactaccactttatagggccatttggagacttaaactttaaaatgtggagactgctagaattgacccagcagtctccattgtttttctatcacttggggaagcacctccacacaaacacaaggaaatccatctcaatactgtaacacctagaaatcagacctgacccaatgcccatccataggggacagctgaaaatactggggcatgttcatagccagaaatactctgcatcggcagctgagaaaatccaactatttctacgtaggctaaaatggatataatgttgagtggaaaacaagagaaatacagaatgatacatatataacgaaatttatgtgaatatgtacttgtttaagtataatgccactcatgttaaattttatatgagctcatatgtatgtatggaaacaaatttagaaagggtttggaaaacgcacaccaaagcagtaagggtggtggcatctgagaggtgaccaccactcagaactttcatggtgctctgatttctatgaaaagaatgcatatatgtatgaattacatgattaattttcattctaataaatgtagagatggatttttaaaaaccactgacacatcagttctcatgcaaaatgctatggccagtgctgtgcagaatgcctaacaagcagaatacagatcttgtctgcaaggggctctgaggtgtaggggaacacctccaacattgtgtgggatacatttcagaagaggagtagaaaatttgattggatgggggcatgttcacaatgtattgggaatcagggaagaatatggcaaccaaggagaggcaaaactgggcaggaaccaaggcaacattgattgaaaggtgtggagggaggagctcctggggcctgtaagggaagatgaagatgggaagggtgggaggcattgtggaaggaaggccaccatgtggggagatgatgctgactccagtcccaggcagcaggggtccctgagaggtctgtgaacagactggaagcttgcctgaaactttgcagagaaaagaagcttggcatccctgcaggggtggattgtcagggtctggaggcaagggacaagtgaagggattaactgtcccactgtgggggaagatgtaggatctgggctgggggcaggcagggagtggtctcaatggaggagggaaatgaatctgagacattaattggattgagacggaaagaaagtggagagaacagaaaccaaagggatttggaggccatgcttccaacgaatgattcatagttagtgtcagggagccagaaaaaaagcaagtgagcaaggtcctgtccctgggagctgtagagaggagccctggggcccacccacaaagcagcacctgcagtctctttccctctcgaagcccagctatgttgtgcacaaagcaagtctgggcaccgaggacaggctggccaagggcaggcaggcaggcacgtagtcctctggcttccagccaccacactcacaggtttctgggaaaggctgactggggccactttgttcctttgaatctgagaatatatgactggggaagcctaaattaattaaatgatgctgaggcccgcctgagccggtgcacaggggatgggttatggagccctgagcaaactgcacccccagcccccagtgctggaatccagagaggctcatgagctcgattggaacgaagcctgtgcttaagtgcttccagagagacaaagaaataataaatcaggagcaggtgccccacccacacactgccatcaccaacaccagcctgcttctccacagaaatacagtggtttcacctctctggaaccagatgtttcagggaagcaacaaatggcaaagccctggaaatgacatggccccacaaccttctcagaaatgaggccaggctgggctggcacctccatccacagcagcaccccaccaccacaacccacccaagacctccaaacaccccctagacctcacccaggcactggtgcagcatggctatccttccacccctcccaaactcccacacaccaggactcccccatccccagcaagcccccctcccctgacagggcactgatccagcaaggaagaaattttagtccatcagactgtggacacagttgtatcttgtggataaaatgagaagaagtgttgtcagctagaaatcaccaatttgtctctatccatataaaataataacaattaaactcctactaggtatcaagcattgggctagacatgttcaagtgagctatctcgcagtctttagccatcctgcagcagggccacatggtggctgggagcaggaagctggaactaaatcacctgcatgggaatcccatctttaccacttgtgagctctctgactgaatacattactttacctaagtgtctttgcctataagaaagtaatatgaaggttggtgagagaattcaatgagttagtgcttatcaaatgcttagaacggtgcctgatgccttataagctctactatgtgtctagtaaatacgttccttccttcctctactcattcaactttaattgagtaccagatatgaacgctgccctaacagctgctatttctggttgagaaaggagagaaaaatgcttccgttttctcctacaggattggacaggaagttctctgttgcctgcaagttatgctcagatagaggagtccggaaaggaatttaccaagcgttcaagtgaagaggaagccagaggggcggggcctccgtgggaggcttcttggttgcggtggggccggggccagcaccctggacagctcccggcggctggcggggagaagaggctttgccaggtcccatctcggctcagaccctcccgtagccttttgctgcaggggcctgacgcctccttgcaaccccggcactcccgtatttggagccacgatggattgggggggcgttgccctctgatctgaaagttagagaatgagggagtttagtgtctttggagcctccttagggagccagcccaggaccttcctcctcccatgggtcttgatctgctcctcacccctacactgccagcgtgcggccaccttggagatggagcagcaggagcacgacgccgtgccgggaatagggaagcagtgtgaggaccacaagacaggtcccccagcctgggtttaattccaggatctgctgctgggagcttgggcaagcacccagcatctccacgcccagcttcctcacctgataagaccaggggaatagcacctacactgcaccaggattgcaggagaatggagtaaaacagcacacacaatactcctggcacaaagcaagtaataaatgagtgtgcctcctgccatacaggaaccgaggactggagagctagtcatgagcccagagatacctggcttcatgctcaggaacagccatgtgggccagagggctggagatgtggtctgcaccttgaaggccctgggaaagttcctgtcctctatgattcctctgttcttcagccactagacataaaaaaaaattgtccttcaagtcctccttcctcctttctttaatcagacaggggaaatagcatgtgcataaataataattgttttgtaggctgggagactgcccctttaagagcctcataatgggagagtcagaagagcccagaggtctcaaacggaaatgactggagaaccagcaagtggcataagtgtgtgaagtcagctggggcgagattgggatgtgctggagagtgtgcatgtactgacgaaaggccatcaaatacaatttaaaataattagcccactccaaagagtcttctgcagcacgcacttctgctaagggctgcagtgagtgggctctcacctcaacctgaaccagacggaggctgaggctgggccccactgaggggctgtgacttgcccaaggtcatccagggccaggcctgtgcccacattgggactcttttcctccctcagacagagggcacttcagtcactgcagagcaggtggcagcagcccttcagtggatgagtttctcctttcccagggtgactgggtgggtgaaggaattgagcaacaggtggccaggctgccgcctctcaccctgacacattggtccccatcccctcatcctacagccatctcagggacagatggagacattccaatgccctccgggtcctccaccaacccagacagagcctggagtcacaatgcccacctagccagagggatcagccagctagccaagtgccccctgtgtctttcatctgttcttcacaagacccacaagtgaaaaatgaggataaaccgcacattctacacacgataacaacatagcaagtccttatactgctcttactgtgtgcccggcccccttagcagtaggtactattattattcaattttacaaagaaactaactgagggacagagaggcaaagtaattccctgcaggtactctaatgagtacgtggcagagctgggagccatcctggttgtctgcctcgaaagaccacactctttgcactgcatcgcggcacttcctgcggggtggggggcacaatgggagaagcatctgcgtctaatgctgctttacttttgaggccagaaaaatgggaaggctcccctctgactctggaagagagacgcaaaccgtaatctcaacaacacaatccccacctccaacctcagccgccctggagcctctctcccgccagtccgcccactggaacacgggttccatgtgccatccagggtcaacgccgctctggggacgcgtcaggcccagcgcacagcctgggcagctcagcctgtcagctgagcacgggcgcctcaaggggtgcggccctctcagaaggaaggtgagtctccctggagcccctgacgacagcgaagcggctgggcgctctccggggagtgggcgcggcacccaagaagggtttcttacagttccaagagaggaccccagccacagtcactccagagcccacccggggcttggaggaggctctggaaaatgagggatgggggagtgtgcagaacagggggcggaggctggcaggagccgagggagggcttggtcgggtgcgaagagtgcctgggaggagttagagtggggagggggtgcggcggcggggagagaagaggcggagctgggggaccagaccgctaaaggagaaagggggattccaggcaaggggaatgtggccaggcagtgcgggagggcggcagcggccaggctaatattcgcgaccccgactggggcgcggcaacttctgccctcagtccccacaagctcccggccgcgattcgcggccgagaaattctgcggaggggccggtgggtcagagccaggccaggcagttgctgagccttcccctcccctcctggcgggagtgtgtgtgcaaggggccagggggcggagtcggagaaagggttgggggtgtccgtgtccagcgctcctccggacgcggctccacaatccagctgcgagaacagatggacgcagcggcggctcacctcgggggcttcctgctcgctgtgcgccgaggtccaggctgaagcggagatcgcaagcctctggctcccgcctctcccaaggggcctcgaggaaccggctgccgcgcccccttccccaagaggagaagagcgggcgctgaccccgcgagtcctagaaccgcgggcggggggcaggcagggggcggggggcagagggccagctaccggcgcggaacgcccatcccaggggctggttcaagacttccacaccgagagcccttcctgggcctccagccctggagcatctggagagcggacccctgcccggccacgccccgcccccggcccccgccccgccgacgtcgcattagcatgagcgacgtaagtggcccgggcaccactcgggggctgggactcgccgcgtcacagccccgagtggaagggaaaaaaaaagaggaggcggcggaggaggcaagagccgacgcgaggggaggggagcgcagcggcggggctaacgggcgggcaagcgggcgggcggcaacagcatgtccctcggccagcgcgggcggcctcttagcgcggcgggggctgctctgggcgcgccccgggcgaagtgckcccagtctccggccccggcccctcggcgcgcccgacttcccggccgcccctgagcccagcagccgcgggtcccgggatcggctaagagtagctgyaacgcctcgccggacggagtcctttcctttcccgggacgctgggccatgagctccgcggccacctgaggcacaggggagtctgctcggccaggacagcctccccgaagtcccgtgccctcgcctctgcactgcgggacgccagcgctcggccctggcggaggcgtcytcggaagagcatcggggtgggggcatggaatccgcggaacctgcgggccaggcccgggcggcggccaccaagctgtcggaggctgtgggcgcggcgctgcaggagccccggmggcagaggcgcctggtgcttgttatcgtgtgcgtggcgctgttactggacaacatgctgtacatggtcatcgtgcccatagtgcccgactacatcgcccacatgcgcgggggcggcgagggccccacccggactcccgaggtgtgggagcccaccctgccgctgcccactccggccaatgccagcgcctacacggccaacacctcggcgtccccgacagctgcgtggccagcgggctcagcccttcggccccgctaccctacggagagcgaagacgtgaagatcggggtgctgtttgcttccaaggcyatcctgcagctgctagtgaaccccttgagcgggcccttcatcgaccgcatgagctacgacgtgccgctgctgatcggcctgggcgtcatgttcgcctctacagtcctgttcgccttcgccgaggactacgccacgctgttcgcggcgcgcagcctgcagggcctgggctcagccttcgccgacacgtctggcatagccatgatcgccgataagtacccsgaggagccggagcgcagtcgygcactgggcgtggcgctggccttcattagcttcggaagcctagtggccccgcccttcgggggcatcctctatgagttcgccggcaagcgcgtgcccttcttggtgctagctgccgtgtcgctctttgacgcgctgttgctgctggcagtggccaaacccttctcggcggctgcacgggctcgggccaacctgccagtgggcactcccatccaccgcctcatgctagacccctacattgccgtggtggccggcgcgctcaccacctgtaacattcccctcgccttcctcgarcccaccattgccacgtggatgaagcatacgatggcggcttccgagtgggagatgggcatggcctggctgccggccttcgtgcctcatgtgctgggcgtctacctcaccgtgcgcctggcggcgcgctacccacacctgcagtggctgtacggcgcgcttgggctggctgtgatcggcgccagctcgtgcatcgtgccsgcctgccgctccttcgcgccgctagtggtctcactatgcggcctctgttttggcatagccctagtcgacacagcactgctgcccacgctcgccttcctggtggacgygcgccatgtctcagtctatggcagcgtctacgccatcgccgacatctcctattcggtggcctacgcgctcgggcccatagtggcaggccacattgtgcactcgctgggctttgagcagctcagccttggcatgggactggccaacctgctctatgctcccgtcttgctgctgctccgcaacgtgggcctcctgacgcgctcccgttccgagcgcgatgtgctgcttgatgagccaccgcaaggtctgtacgatgcggtgcgcctgcgtgagcgtcctgtgtctggccaggacggcgagcctcgcagcccgcctggcccttttgatgagtgcgaggacgactacaactactactacacccgcagctagcatccccactcctcctccagcccacccaaccgccttggktcaagggggctgctctgcaagcccactggccagctctggctcagggcccacctcctccagcgagtaccccagccactcctcaaccttgacttctgcccaaatcccctccctgtgacccrttccatatccctttctctcttgtccaatggggcttggagcaccgaggccagcgaagccatcgcgctccttgcggaggtgaagaggaccctgagtccccacctgcggctcccctgtgtagagcctgcatctgtctgtccttccttccattgctcccagtgccaaacttgggccgctgcaccgcgrcgcctccgcccaaatcaataaactgtgtctgtcccaggaggccgagtctctttactggtggggggtgcgtggaggcgcgcagggccagagcagaggggagggtgaactgggtctccaagtcccaatccagacctaagccaaactaacacgtaggcacctgtagctgtttttctacctggaaaaggggataggaaggaagcaaacccaacaaaggctgtcacccacggtcaccaaggagcaccatgctcccctcagcccaggatagaccctcttttccaggcctagcgcagagcccggggatgccgcccgggggagcctgaggacccgctccagctaggcacgccaggccccgccctttgaggacacgccccacaccagcctcagagctctgaggtgcctgggctgagcttcccttcagaccagaatcccgccccgttgaggctttgagaaaggagtaggagccgagcattccggcagaggaagaaaaacggcccatcttttagagtccgacctctggaaatgtgtgtatgatgtgatgtgtgtgttcattagagaacttgtcctaggaggagtgggggagccgtggttggtgtttgctgtatccctgtcagtcccgagggtctgagtcttgaagggagagatgcgagtgtgggatctggtgccaacccccactgccaccctgtcctgagtgggagcagcggcccaggactgtcaggaaagtttcccatccttagtcccagccctgagagcctcaagccagcgttcgcgcaacactccatgtcccgaagaccgtagtctgatgatcgaggcagagtcttcccatcatagcgtgaagaggcggctggtcagggtcgcctgtgtgttagctgcgcctgtgagggtctgctctgctgttgtgcgcatgtctgtcctcgatctgcgagtcgggctgtgtgtgcctgggcggagtctgcctttgtcggtctgtctgtgctatttctgtgtgggggtctctatctggggtgggggatgcttttgtctgagaggagagcctgcctcttgccgcagtccttaagcatcctcaggtctgccatcaggattgtcccaagtctgtagcaccccacctctgctccccaccccatagtgccagcaggaatgggatggtaacagaaagggaagtcctgcagtgaatattgatcccagttattgtttcttattattattttgaaagatggtgtagcagggtttgagactggcctggatggtggggagaggagggcagcgagcagagacttcctcagacccaaccctctccaggattcagcagcagcaccccaaggctggaataatggggttggggaagtgcggtgactgggaaatgctgagctaggggcaggaggcatgggcgggacagtgttctgtgcccccttctagagcctaaatttgttgcccgagttcctccgggaagcgctccgggtagattctgggggccgggagctgagatccctgggcggggagcgggggaagggatggggctgaggacagcgaagaagagggggcttgggggaggggggaaatggaagagagaggagggaggaggtacaagaggaaggagagaagtgcggccagcttgctttctccagtcgggtggccgcggggacccgggcgacgtcggaggccctgccgggaacccaggctgcagcccccacccccgcgctgcgacacgccccccaccccttccggctcacacccccgcccacactcctgagtggtgcggtgcagcgtcggccgaggcagcagagccgaggagagcaggtgagaagaagggctgggctgggctggcggagcgcggtgccgggagcaagggcggcggtcgggggctctatccagggacagcaccggggccgagaggccccaggactcgtggagtcctctgagtcctgcgcagcagcggccgtcgggggtcagctaggaagctgcaggattgcgttgcttcggtgcctgggcttggggaggcttaaccatcagggcttcgggactccaagcgcatgttctcacttcacttggcccagcatctgctaagtgaccaggtccgcgctttctgtgtctagtcggagggtccttgggtctgacccgactcgcctgaattgctggttggcaaccgcttctcccgggagcagggggtggggaaggaggagcagtggctggtggcaagtctgagccaggacatagccgatgacagcctgtgaatgaccggccagactggggttggaccttcggggcagagcaggcagcccttggaaagccaggctggcaggagcatgggtgggaggcacaaaacacagacaaacagacatatatacacatacatcctctaggcatctgcccaggagtgatggaggaagaagagttggtaggtgggaccaccaggaaaccatcccacccagctctgccttcttcaagctcagggtccctgaagcctgactagtgtctcccgaatgggggggaggggggggctctgggccagagcaaaaggaggcattggctgcatggtctgtagggcctttaccaacctgaccttgtccttgctgtcctctcaaaagactgccatgctccggtgaatcctcaccaggacgccacctctttcactttgcagttgggggcagcccctacgaacccacagcactgggaggcgtgggaacaagcctgtggagagtgtccctgcactgtgccagcaagggctttacattctctgcccagcactgcaaggcagccccaggctcctccatccttgggcctggttcatccatctttctggactctctgttcctggcaacaaccctgccaggtgcccatacatgggcggtgcttgcctctgggtaggggtggtgttgggtggggagaggggtgaggaaattagctaaacctcagctttagacttgagagaatagagggtgggctggtggaaaacatgagtatgtgcctgtggaggcttaggttcagggggatctcagagggtagcaattgtgacccacagcctaataataacagtctttgccctcttggcctggctcacttctactgtaccttcaaaattaatctgcctctccccagactaaggcaggtggcccctaggggccctggctgcccagcctccctgcatacctccctgggcactcctatggcatctacactggcagcctgcagacccgagactgcctaggtcacaacgcctccagcaggcccagagtctccctgccctggccacaggccaggctcccaattagcccagatgcatcctggagcacagggccttaaaggcctccattcacccacgcatgcattcctttccctccaccaacggagtgagggaattcaccctactccacaccagagatgtggccggaatgcagagatgaagcactgagcacagtaggtatggtcttacccttgagaagctagtgggaaagagagagtttgattggcaaagcacttatctattgggttccaggcaggaacaaaggcagcactctgccagcaacccctggtggatttggattgccccagggtggtcagctggccttgggtgacaacagactcatgagagcagaccctcactttaggaaccactctctcccatatgggggcccagagagaacactgtggtcagcacgtacaggtggaagtagagactggggccacgcctgcaatgagacccctatacacagctgtcaggctctggcctcctcatggggctggggtgggggtctgttggcgggaggtggagggtttgtgacaggcctatgtggctgctgtgttgatgcttcccacttcttggtccccaggtccacacctctgcatccctgcaccaggactcaccaagacgcccatcctggaaaaggtcccccgtaagatggcagcaaaaactcccagcagtgaggagtctgtgagtgacttttggagccctctctcaaccctgctttccccacctacatgcccttgcttctagaacagtcctgagtgggactggcccccagcatttgcctggccccagccctgccctctactggcacaaggcccaggctacagctccacccccagcttgctgaggatcccagaagggcctggaggggctgagacgggcctcagggtgccaaggaaatgctaagagcttaacttccaaatcccctggccaggctaggccctatctttccttccagggcctctcttcatcccagcttccacttctgatagctttgagcccagtgattttgccttagggtggggctgaattcctactccaagccctgcaagtcccagctccagctgctatcactagttcagccttggagccttaggcaccatgttctccactggcctgagacaatgccatcctccctgggcaggcatcctccctcccgccccagccagccttcgggtggcagagcaacacacctgacttcaggtggttgcatgtgtttcccctctcccacacttgtctttttgccactcctcttcccccttcccccttcccctttcccccagccctcatttgaaaccctgagcagaattttctggcttctccccaagaagctgttcactccattgccctgaattctgcagctgacaaacatctattgtcacctctggtccactggcatgcttctctacccaccccattgggctgtggcttccttcagagcaggctctgtttctccatcgtctctgagtccagcccaggatctgactcacatgaactgcccaggaaacatggagttttggagcattgatctgagactcccaggtccaaagacactccttagcacagggccagaagtccaggagagtctggggaggatccctggggggttgagatgtctgagctgcgatttcctgctttattcctttttacccactgctgattccctgttagccaggctaagtcacagcgcactgtcagagcctggaagaaggggagcagtgtctggcagaggatctagccagacttgtgggcccttttggccaggtcactaactgggctgggctttctgtaggtgctcacccacccatcacacagaccaccccccccaccgcaagagatggaagaacaagatcagctgggttgggggcccagacctggctcactggggttgggcagggcagtctgggatgctgtccagatccatcctcgcatcattccccagggcaggagcagcccgtagttggcactgacaccccactgttgccagagaagtgaaccctagaggcaggatcagacaggcagagggccgtcattcatccatcagcagcaggggcagagaaggaggtgcttttaaggggccccttcactctgcagcctatggggaggaaccctttactgtctcatggaaactcatcactgcacaaagaagcccctgaaggaaggtgcctcactgtctaccagtgtgtcccaggaaccatgttgcagaattctggtcattagggcagcaatgaattatgtctcttatccaaagccatcttttatccttccaaatctctccacaagagtacacccttcaggtccggagatcagctagattctggagccccagctgagaacagtttataaattaagactgaccaggagacaacaatatcaataacaggactatttcatcttagatctatcctttatggcttaaaagcactttcacgtacattagctctttaatcctatgaaaggcagggtttgctacccccattttacaggagaagaaactgtacaatttaagcaatattattataagttctgccttcctattgtcactggccaagtgagggacaagaagaggaaacgaatggaaaagggagtgaaagggaagggagagaacgacccaggagaaagaagcagagtggacatggaagactgattttagctcctagtctgccatcagatttgtatgtgaccttggaccagctgctccactctctgggactcagtttcctcattcataaatgggaagtcacaaaattgaagccacacagaagccttctgtggtgaacgctgctggtgaactgagagg

SEQ ID NO: 97975 - DNA, 36461 bp, Homo sapiens
acctttttgtttaaaatgtttttagctccttgcgtttgttgtgcctccagaatttgaactatacaatccctccaggcccagcataagattgtaagggccaattctgaggaataaaattaattcagatcctccaactgaattaatggattcagtcattaatggtcacagagatgcctcagcagcttaacaaaatgcttgtgttttgtatagctaattgctacaaaccagattatggtggctcaatgcacataatttataaataagtcaattatgttaccttgtcttttggcttttggtttttggttcttatgttgcttaaaagagattcgaaggttaatgagtgcctgcgcacttccattccatttggcttagaataattaattggttataagtcttttgactctaagtcccttagccgtaggggtcccactgagggacatgatagacctggcacaggtagcaccccccccccccccccccccccccggcatcaatatgggacaaaataaaagcttggccattgacactgcctctggcatacctttacaaaaagcggactataaactaaaaaaaatctgcatcctccctagtagaatggacacgcctcttgcccaaaggggatccaattaaaaaaaaaaaaaaaacctgaaaaactagttcaggccatgatggaaagctgggggtcagacacgcctcactccactttcccccatgccttggaattcaggcacaaatgaccaggcaaaatgcctttgcaccctcgaaaagaaaaaccctcctgctgattttatgtgggatgctgttaaagctgctgtaccttctagtacctggtttttaccacttttgggcccgttaagggtgagctcatcgttaatatttggcccatgcatattcaacttgcttgtaaagtgcctgtctctggttacagcagatctaggtaaaggtgatcttcaagctagggttccagctgcttcctgtcttggaatcagacgctcctgctgtcccctggggacccttagatcaagcagctggagattcccatgccctcggtaggcagggccagtgctcttaaatcagcaggaagatgacacggaagactgacctcctccctcatctccctcaagaataagggatggaatggctgagcacggtaggtggctcatgcctgtaatcccagcactttgggaggccaaggtaggcagatcgcttgagctcaagagtttgagaccaccctgcacaacatggcaaaaacccatctctaccaaaaatacaaaaattagccgggcgtggtagcacacacctgtggtcccagatactcaggaagctgaagtctgaggatcgctggagcctgggaaggggaggctgcagtgagccatgattatgccactgcatcccagcctgggtaacagagtgagaccctgtctcaaaaaaagaaagaaagaaaataaataaaagaagaagggatggaaatctccaagggggaaaatgaaatgggaatagcactgggtggtcacaggaggatggaaaaacccaaacaacagctagaataagaacgaggcaaagaaaccgcaggttaacagaaaacccaaaataaggaagagaaaatggtcaaatcctggtcagggtgatatgtccatgatcctgggaaaacttgaataagggtaaaagtctgtggtaatggggggagggagtccctgaaatcactccttttccagaataccttatgattattccaccccctaattaaaaaaaaatccataaaattagaaactcaaactctgatgtgactcactctgctgagcacgcccgcaattctcttttacgtgtgtgctttcgctttgcagtaaaagcttcttgcctttcgtttcattctgacgtgtccctgaattctttctcatgctggtgtcaagaacttggaaactggctggggctggggtctcagtggcatccagagaccctccggagacctccgacagctgtaggtgattgggggcgccaatcacataggggtcggagagtgatggaatgcaccttaattttaatctgagtgtcatggaaaacagttggatggttctatgcagaggagtgacatgatctgacttataggaaagatcattctattgctgtaggaaagcagggaggttaatttattaacagaaggtattatgggttgagttgtgtctcctcagaatatgttaaatcctaacccctagtacctgtgactataaccgtaactggaagtgaggtctttatagattattgaattaagatgagatgagatcattagggtgggccctactccaatatgactggtgtccttaaaggagaggaaaatcccacgtgaggacaaggagaccatcatgtgatgacagaggcagaggctggggagggtgccaagggcattttacagtaaacctgaaacactcgttcaggccgagatggaaaggggggatggatgcctcattataccctcctccctttggaattcaggcacagttgaccagcattaacgttaaaacagagaccttaagactgacaaagcagaatttttgtagcaataagataccaatgtgacagattgcaagccctgaaagaaactggagtattttaccccaaatatattcatttggcatattttgaaatagccttgcaaaactgtctctttggggaaaaacatctacattctgaggagactccccttccttttccaggtctttttcttgatccaggagataatttactaagagtccggcacctgaagtttgataagaaacatttacaaagtccaggtgaggtgggccacacctgtaatgccagcactttgggagtctaaggcagaggatcacttgaggtcaggagttggagaccagcctggccaacacagtgaaaccctgtctttactaaaaatacaaaaattggccgggtgtggtggtgcacgcctgtagttccagctacttgggaggctgagtagggtggatcgcttgaacctggggggcagaggttgcagtgggccaagattgtgccattggactccagcctgggcaacagagtgagactctgtctcaaacaacaacaacaacaaaaagaaacatctacaattcattctctttgaagcctgctacctggaggcctcatctgcacaaccccttatcttaacccagacacttccttctactgattccaagtctttaagtaaactttctaccaattgccaatcagaaaatctttgaatccacctatgactggaagctcctctcttggagttgtcccacctttctgggctgaaccaacgtacttcttacatgtactgattgatgtcttccgtatccctaccatgtataaaaccaagcttagcccgactaccctgggcacatgttctcaggatctgcaggggctatgttacaagccatggtcactcatctttggatcagaataaatctcgaatattttagagtttgactcttttcattgacactcatgcagcagactattgccatcatccaggccacacactgttaaatggaaaaaccttagacacgtgtatgttttaactgagtgtatttgagcaaaacaaaacagattcccgaatggggcagccctccaaaccagagcagataagagaactccaatcaggaacctgatctgacagcacctataggaaacagaagtgtgtgatggagacagctaatttgattataacttcattgcttaactggttacagagtttcctgccatgaagtaaagctcagttactgtagttaaactccttactggtttggtctggtaggtgtagttcagggtttcactctgttatcagaaaggggttccaatccagacctcaagagggttcttggaccttgtgcaagaaagaattctgggcgagtccataaattgaaagcaaacttattaagaaagggaataaaagaatggctactccataggcagagcagtggcactggctgcttgactgaatatacttatgagacttgaagccagctggacttcctgggtcgagtggggacttggagaacttttctgtcttacaagaggattgtaaaatgcaccaatcagcactctgtagctaggattgtaaaatgcaccaatgagcgctctgtagctagcaagaggattgtaaaatgcaccaatcagtgctctgtaaaacgcaccaatcagcaggatcctaaaagtagccaattgcaggaaagattgaaaaaagggcattccgatagggcagaaacagaacatgggaggggagaaataagggaataaaagctgccccacccccccacccccgccagccagcagcagcaatccacttgggtccccttccatgctgtggaagctttgttcttttgctcttcataatgaatctttttttttttttttttgaggtggagtctcgctctgtggcccaggctggagtgcagtggcccgatctcggctcactggaagctctgcctcccaggttcacgccattctcctgcctcagcctcctgggtagctgggattacaggcgcccgccaccatgtccggctaattttttgtatttttagtagagacagggtttcaccgtgttagccaagatggtctcgatctcctgaccttgtgatccacccgcctcggcctcccaaagtgctgggcttacaggcatgagccaccacgcccggcctcttcataataaatcttgctgctgctcactctttgggtctatgccacctttaagagctgtaacactgtgaaggtccgcagcttcattcttgaagtcagtgagaccatgaacccaccggcaggaactaactccacacatagttatagttatctcttgattataggctaaataaggaggggattattcatgagttttctgggaaagaggttggcaattgctggaactgagggttcctcccctttttagaccatatagagtaatttcctgatgttgccatagcatttgtaaactctcatggcgctggtaggagtgtcctttagcatgctaatacgttataatcagcaaataatgagcaatgaggacacagaggtcacttttgtggccatcttggttttggtaggctttgggccagtttctttactgtgtcatcttatcagtgcggtctttgtgacctgtatcttgtgcccaccacctcatcctgtggccaagaatgtctaaccccctgggaatgcagcccagtaggtctcaccctcattttacccagtccctattcaagatggaatcgctctggttaaaaggcctctgacatgttgagccatcctttcacctcagcctctcaagtagctggactacaggtgtgccacaccatcccctgctaattttccaaaaaaattttggtagagaagggggtctccttatgttgtccaggctggtctcaaactcctgggctcaaacgatccttccatcttggcctcccaaagcattgggatcacacgcgcgagccaccgcacctggccccacaagtttcttttagcaccatgacggtggcttcaaatagggcggcagtggaggtaagaggccatcagccacaggaggagcgtgggtgggagggcaggagaggtcagaatgccttccaggggtttgggcctcagcgttggagtgatggagctgccctgacctgagacggtggaaagcgaaggggcctcgcagcgagctggtttggggttcagggcagaggttgcgcctggagcagaaaggcacctgactgctatactgggggcacatagtgggcctcggcactccacctgccagcaaaatcattttctataacgccgcaagcctaaaaatgggccgataaacacaaaccagaccctgaaccagatcgttgttaactcttcaacctgccttccagccgaacctcttaggccagagctgggaccaggccgggttgggcgtcgcgcttgtcaatcatctagaaccgggtgtgattgagcgagttgggatcccactgccgacagccgcgcggaggcggtcgggaaaccggaaaacgcttccaatggctgtgtttccggcgacggcgcgggggcagctgggaatccggaatgctgcccgatggycctgggtcctcgctgtggggcaatccgggcttgcagacgaggtaaggtcgattccatttggcccggggatggtcacacgcgcgggggccggaactgccgtcgccggygcggtcgttgtcgcattgctctcggccgcactcgcgctgtacgggccgccactggacgcaggtacccgaccgctgaccgcctctgctggctcgcgggggggaagcgccgccgaggggcagcccgcgcgcggggccrgggcgccgtgtggcctgcggggcggagtagggagaggacggaggcctcctggaacggcgcggcgacggctgggcgcggcttgggtgatgggagcctccgtgcggggtgacagaggggcagagggtggcgccgggccggagccagtgcgcgtcccaggagcggcggagcccgcgcggtggccggggaacggggggccgagggccgaggacggtaggagggccctggggcgccgtggtgcgctggtcggatccgtctgctctgctctgtccccgctcccggtctgggaaagatgctcgccaactgcgggcttgctgtttggtcggagctggatacgggggccctcctggggcccagggacgcggcgggcgtgcaggcgagctggccggctgagcgggcttcgcgcacaccaggagcagggccgtgtctgcatccccaayttgaagtcccagtgcgactgggcaagtacagaccctgcacgtccttggacgagagggactggatattgcgacgcctgggccgcagaaaaggactccaccagccaggcctccttcgcccgcccccggttcggggtgtgtgtgtgcgtgtaggaggtcccttggggagggaggctcacctgagtcatccccagaacctgaagtgctggccagatgtccccgagggccctgccctggccttggctggtccttgcacgctgagatgccttttcaaatagaacggataaggtagaaagaatttaaacaggagctgagcaagtgcttggagccccatctcttcatagggtttttttgtctttctgtttgccttgttggtattggtgtatctaacatattttatacaggaagtagttcgtgtatatctcatttctcataaggagagattgctgttatccaccttggtatagaagataaatagaagctcagagaaagtgacttagccaggattctccagccagtgagtggccgaaatggttaaacgcaccatttgttgctgtagtcattagatagattttaccttgtgtgtatgttgggcatcgtcagagagtttggctttttgttttcatcagcacacactgagaatgcaytgggtggcgctgagagggtactctacactgcacctcactcacaccagcagggaggcttcttaacactttatttagagatttatttgtagctctttaccttaaattcacacaccgtgattagtagcaagatttttcattgcgcttggttgaggatttattatcagactgcctaaacttttacgaaaagccaggtagagttgtatattactgaggctttaggaaatatttcagttaacttagggattgtggttaaatgctctaaattagttataactcacattaacttaaagtatttttgtttttttaagtagaattttccagtactaaaagcacttttagcacaaagcagcagtgatagtcttccccagacacgcttccttaaaacaaaagccaaacaaatttaacctgttcttccagactcagaattgtctgaagagttaccgaatgggatacatcttaagtcrcctattgtcaaggcctttttatccttcagaactttgatctttatatgtaaatgtttctgtgttaacatttgaaatgttaagttcaaatggtgacgtcagtaagccagctggaacttgcttcactgccaagtgctgggaagtttagttgacctgctttggcycttttgctaacagaagctgtttatcttaggtgaatgctggtgagcagcctggattttactttgtgttaatacaattctattcaagtgaaaatgctatacttcttattttgccttaaaatggcagcattttacacctactgtgtgcccacaaaaataaaaacaaaaacatggcagcactttggtaaaatagtgtcttgtggcctggcttgtccattactaaccacagcatctgcacaggtttctctctgggccccagtttccttatctgtaaaagaaagataaagtgctagtgaggagagtgaatcacgatgtcttgacttcatcgaacatgtatcaagtgtcttgttctgtgccaggctgtgttcgaggtgattgagtcccacatggaagcagtcagtgctgcagcttgcggatggtgccacattcctcgtgggcaggcagtagtagggtgctgattctcygccagtccagacataagaacttccttcttatgtccaggtcagcccctaccatgtaggttgtctgtgtgctcgaaaggtttcagaaccccacatgtaataatagttacttttggtatcactttgaatttttaaaattatgtagcaaaaaagttactattaattatattatgagtttaacataattttaagctagcttccatttgagagccgttgttctcatgtgtaaatcttgaaatattcagtttctggatggcgcttcttgttctccagggttcttagacccagcccttacggtagcatcatggccagggaactgggaatctcacaaagtcttaagatttcacaacggaacaggagcaggaggaggcgactcccgctggtgggttgatcaagttgctrtgaaggtggtttgcacattttgggcttcaaaacactaccttctgtataagataaaggaatagctcagaacaggattccccccgtgttttcttcctagctatgataaagattgcygtgtgaatgcagtgggttttacacactcagaattgatatttttggcttgtggtaaatgggactttaatgcttaacctgctgtagaaaaatcygccttagaaagtggcccttattcgtatattgtattcgatgtttgagccccctgatatcttatcattwtaacaaagcttaccttgaagtgcaggaaaaattgtatgtgttcttgtcattatttgaataacaacaaaaatcagtattagctttaaagcctgtaggttttaagcgtatccwtgcctggactagcatatytcctctttctcaaccaaaaagatcagaaaggtgctatcccagtaccaaaagtactgggaggactttcagcagagtgtgacgcagaagggaagcttttccgctctgrggagcagatgcggagaggacaagcacttggaacacagcatccctgggagctctggtgctgcagttgtgaccccgaggcggccctgctgtgccctcctgggagtgstgggcgacactggttgcagaggggcattggtgctcccctccacctgacaggtgctccacctggactcgtggctgcagcttaattttgtgtcagatcctttccggtaatgtataggttatttcaactatgaggcaaagtgcaaatgggtagttcagtgtgggtttatggtatttgccctttttgatataaacattaaatatttcatacctcacctatagtactttttttaagacttaaatctgaaatttaagatacagatgtttgtaagatatgaatcttggatattgggagaaagaagcctcctggaaaatatacagtattatctggtggaaccattttattccttttcttattgtgagaaatacacatttatgaagtattaccatttaggagttgttttcatcaggcagggtacattgatataaatgttgatttttaacatccgtaagttgaagtctgactaaattgtttttctctgtgatttcataagtcacaatttatattttatatgacyttaaatatttaatttgaagtactggtatatttaaaggtgctaaaactacacgcatgcatctctactagtggttcttaacccaggctcattttgccccatccagaagacatttgggagtgttgagatattgctggttgtcaccactgggtgcgtgtacatgcactgctgactgggtagaagccggggatgctgctcagcatccttcagtgcatagaacagctccccacgacaaagacaggatgctgatcgatacccataaatgtctttttttttgagacaagagtctcgctgtgtcacccaggctggagtgcagtggcataatcttggctcactgcagcctccaccttctgggttcaaacagttcttctgcctcagcctcccgagtagctggaattacaggcatgcaccaccgtgcccaactaatttttgtatttttagtagagatggggtttcactatgttggccaggctggtctcgaactcctgacctcaagtgatccacccaccttggcctcccaaagtgctgagattacagcggggagccactgcgcctggccccataaatgtctcttctagacaagtgtattgttttaaaaccataatttagccctcctggagggatttcaaggatgggtgcattggtcccctgcaggtagctcagcaagcttcattgtgtctctccttggcccacagtttatagtgattctgtgccgggtcttgtgtgttggtctggaagaaggtgaaaagrtttggggttgggctgagcgcggtggctcacacctgtaatcctagcactttgggaggccgaggtgggcagatcacaaggtcaggagatcgagaccaccctggccaacatggtgaaaccccgtctctgctaaaaatacaaaaattagctgggcgtggtggcatgcgcctgtagtcccagctactcaggaggctgacgcaggagaattgcttggaccagggggtcgtaggttgcagtgagccgagattgtrccactgcactccagcctggcgacagagtgagactctgtctcaaaaaaaaaaaaaaaaaaagaatttgggytgatggggattcataggatctttttatcttggggaatcccagcatctgctctatcagctaaggcagttacwtctactcataaagaaaattccttcaaaagttttgttgagtaaaaagtaaaactgtaagagttaaaagacaaagctcttttgctgtgaaacgctcagtgagctttggactgcagtcagtggaacttgtgacactggtttttctctgctgctgagataattggaaggataaaaatattgagtgccttgtttgaaaaaatactgtttatatttgcaaagatcctttcattctagggagaatgtatgctttattcattgagctctatagaacataccagcatttctctcatagccgagctgttttaaatattaaggtaaaatatataacacaggaagctcttcaagaaaggccaattgaagtgtagctgtttagagacaactcaagatgatgaaaatacattaaatgccactttgaacccaatttaagaggtgtgccatatttagaatgccatttctaggttatttaattaatacccagttgartgttggaatacagttgggagtaatatgatgaatctgtcagacttctgagcaccccagcggattacaggtgggagcttgctttccagtttgtgaggagagaaaagacctaataatcctaaagggaaattgaaatgaagtgatagtttattaagtaataatgcatttttttacttgataaaactttctggaaaattaaatggtcttccaaaatttcagrtacatttcaaaaataaacctgatagaaatagcatatgttgtcctggtggggtggctcatgcctgtaatcccagcactttgggaggctgaggcgggcagatcacttgaggtaaggagttggagaccagcctggccaacatggtgaaaccctgtctctactaagaatacaaaaattagcagggcagggtggcaggtgcctgtaatcccagatactccggaggctgaggcaggagaatcgcttgaacccaggaggtggaggttgcagtgagcaggatcgtgccactgcactccagcttgggtgacagagctagactctgtctcaaataaataaataaatagcatgtgttactatatgtgttaattacatgtgttcaggctgggcatggtggttcacgcctgtaatcccagcactttgagaggctgcagctggcagatcacttgaggtcaggagttctagaccagcatggccaacatgatgaaaccctatctctactgaaaatacaaaaattagccaggtgtggtagtagacacctataatcccagctrcycaggaggctgaggcaggagaattgcttgaacctgggaggcagaggttgcagtgagctgagatcacgccactgcactccagcctgggtgacagagtcagagttcgtctcaaaaaagaaaaaaaaaattgcatgtgttaatgtaattttgaacatcatatttgcttacagaaatccattgggtaaaaatctatagcattcrtaataactttggagagggttttggttaatgggctattatgtgtactaacaatatctgtttacctttctgaattattcatttttcttgtctttcagttttagaaagagcgttttcgctacgtaaagcacattcgataaaggatatggaaaawactttgcagctggtgagaaatatcatacctcctctgtcttccacaaagcacaaagggcaagatggaagaataggcgtagttggaggctgtcaggagtaagtagctgatgtgcagtgttggtgtttaaaaagtcagttgctggctggctgcttacctgactgtcattcacgctgtctagtttgacctcagtaatcatttccaaatgcagcctgataggacactcagtatttttcagtgatccactttttgattaactaggaaataactctgaggagccctgactgaattactccctcrtgtgtgtcagtgttaagttttgtygtagtggggaaatgagcctgttttttccactttctgcttttctgtatttaactggacttcataccacaagcatgttttttgtatttaggatagaaacactcagcaacctcttggtttactttgtcaatttaaagatgttactgaaagtcatttatgaaatttgacaaatccctagcttgcttctgttctgttttgctgctgtgkttggtacgtagctgtttgtaagttgtccttgggtgtgaaggataccttctgcctctgacggaaagcctgccgtggctcctctgtttctgcttgctttctgtttgcatggatgtggtatctctctttgcccatccctccatttgcagctgttgatcgtgccatagggtgtgttagagttgttactggatcaggtatgtgtgcattttacatgctggtgacgctgccgaattgtccccccattgcgttagtgtgtgttgcctcccaagagcacctgttccctgcagcccttggaggacaacctttgctagtgaagtcgacaagctttcttgttgttttaatgcatttctcttattagtgaggcttgttttcacatgatggaagagtgtgtgcatgtatgttgcctgttctgtactgtcttttgcatttacaacgctattgacaccgctttgcaggagaaggccatgtaaggtgatgggtatcagcatttgcccaggtctctctttcttgggttagcaaaacatttcactgctcggaatggacataaaggttgcatttgcccatctgacggagggcagggctcttcctttctgtgcctgaagtgcccttagacctggagagccagggattccagaacagccaggcggaagcagctgggtggtgggtgccgtttcttgtttgtcccaggtggcccccatctggcctctgctgactgtgactcttggaggacggggtctgcccactctgggaccctgtccatgcccgactgctccgaacatgtggttgtcactttcttctctccaggcagaagcctgcggtcagctccttaccttgaacattcacattgcagggagactgcaggcattactgccagagattcactctcctgaaatgcatgaaggttttatgtaaaagatcgacatttctggctgggcgcggtggctcatgcccgtcatcttagcattttgagaggccgaggcggrcggatcacctgaggttgggagtttgagaccagcctgaccaacatgsagaaaccctgtccctactaaaactacaaaattagccgggtgtggtggcgcatgcctgtaatcccagctactcaggaggctgaggcaggagaatcgcttgaacccaggaggcggaggttgcaatgagccaagatcgtgccattgcactccagcctgggcaacaagagtgaaactctgtctcaaaaaaaaaaaaaaaaaagacatttctagtcgaacctggttcatgttcattgaacatttgctgagcatcttttaggtgttgggtttgtgctgtgtgcttcatgtctctgttatttattgataaaccatgtctatattatttatgtctattttttattgataacctatttattgatcaaggtatgcttaccttattctcagaagtttttgactctaaataccttctttttaggtacactggagccccatattttgcagcaatctcagctctcaaagtggtatgtttacttaaaatttctttattgggatttttctggtagagagtttgattatttaaatatgattaaagcaaatgttttctgatagaaatctaaataayatcttagggtaatcatagctaatagaaacaccgttaagtctatcctgacatctgtgcataaacaagatcacttcagttgaagctcatttttttttgagacrgagtttcgctctttttgcccaggctggagtgcaatggcgggatctcggctcacagcaacctccgccgcctgggttcaagcgattctcctgcctcagcctcccgagtagctgggattacaggcacctgccaccacgcctggctaattttgtttgtatttttagtagagtcaggttttctctctgttggtcaggctggtctcgaactcctgacctcacgtgatccatgcgcctcggcctcccgaagtgctgggattacaggcgtgagccactgcacctggcctcaattgaagcccatttttaaaacctaaagcgtgatttgtattgtactccaccaaagtgcacctgggatgcctttgtaggtcscagctgaagccgctgatcctgcagtttcccatgagctgagcaagtgctaacggccggcctcttcctgtgacccttcctcctggagggtgaccagaccgagctgggccgtgctggtgtgtgtggctctgaccctgcctctgcagtggcggcaaaagtctttctttttaggtattgtgctctgcgccctggccctttgctaagccacctggctgggtgtaatccgagctagtacgtttctcatgcacgtcaccagggctgagtaatgagcgctggacgcctgtgtctggcgggtgggcagcgatgccrgagcgatccctgagtcrgcctcttgtgctccttcatcagggcgcagacttgtcccacgtgttctgtgccagtgcggccgcacctgtgattaaggcctacagcccggagctgatcgtccacccagttctgtgagtcgctctgcgccggcttctcgtaggttctctttccctcctgcatcatttggggttttggcactgacaccgaaagcgycctgatggattttccatcctcagagtttctcagcaggtgctgtagaggaagtagggaaatgaaggagcccgttcttctggggtcagaataagacagagacggmggggtggagaggtgggtgggggagcttgggcctgttggaaatggccrgggcccagctccagaggcagggaggccctgtgggctgtgtgtgacaggtttgcagaaggtggaaacgaagggcctctgagcaataacaagacccttcctgcactcggcacatatgtctggtgccaggccctagcctgtgttccatgggtcagcgtggaactgggcaggcaaaaacctgcccccgtggggctcccccagaccgcctatgctatagagcttgctgtgtggaggtgttctctctgccgtccaggattgtggccactgagggcttgaaatgtggctgggaggtgcgggagcagagcgtttgctcttgtttacttttcattgtgtgtgtttgcaccgactggattgggctgtgctgctctggagacaagggagaggaggatgtcaggtggtgaaggaaccgtagagagcggcagcagggagggggctgtgagagtgggcagaggggcrgttggggcggcagcacagtgtgatgaygcctgggtcgagcccggcctctccacaccagagaggagccggcgcggagctccaggtgcggtgctgtgatgtgtcgggtgaccaagaggtgcagggctgggccccacagggtgtggggctgctgtcagggctgtggctctggccctgagtaagcagggcagggccagtgtgggtcataaaggctcctasgcggctgtggggctgggccggaggctgtggtaaggacctgtgggagggaagggtgcagtcagatggtgagaggggccggattctgggtatgtttggaaagtttgggggtggaatttgccgacagattggattggaaaaggcaaggggcacagactccaccaagggttttggtctgagcgagtggtcactccatgtggtggaaacgggcttgggtgggatgaagatgaggcgttgggtgtagggcgcagtttggctgccagttagacatccaagggacgtggctagagggcattggacagtggggacacgggcttgggagtcatgcacatgtggacggtgcttaaagctggaagacgagggagtaagaggcggaggggggctggggttgggggcaggggggacttggcactcagatgctgggagcacgggctggggaggaggcagcaggggcctccaggagtcagtgaagccgctgtttccagacagctccagaagggcctgtgtgtgcgactctgggtcagttggagatgaggcctgagaacagttggtgcatctcacagtgcggggtgaccctgacaagggagcttgtcggggaggaaaggggacagaagccttaacagtgggctctaggagaggtcacaccgaacaggaaggagttctgaaaaagcaaacccctgccytgttctgaatgagaaactgcagcagggtcagtgcgttgtgtggggcctggtctataagcacacaaagtaggctttacagccacacatgtatgtgatggaaacaaacgggctaactttagagggcaaagatgattttgaaaatagccatcgttctttttctaacttgtcgtaactgttgaaagctaggcatgtaaatctgggcattaaaagagagatcagggagaggcaatggccacatgcagtgtggggcctggtttgggtcctgacatgggaagaggacatcaagaggaaatgggaaatttggaaaatgctgtggtttaatgaatagtattaaccaatgtgaacttggtcatgctgatccggaatgtgggtgtgtgaggcgttaacctcggggaggctaggcgaagggtacatgggagccttctgtactgattaaataataaatctaaattacagaaattatttaaaagtcattactatttataagttattttttcaaaataaaatgtaaacaaatacatgacagtaagtaaatgaggaattgtgggtaaccatcctggccttcctttccttctttagtgacagccccaatgctgttcatgaggtggagragtggctgccccggctgcatgctcttrtcgtaggamctggcttgggtagagatgatgcgcttctcagaaatgtccaggtaatgtgtatactcactcacttccctcatgacaggcttagccttaggcgtgaagttggaacagaggcatttctcttgcattttgtgtagtgttccgtgtgcctcttygtggcatgattgagataagatttgagggacggaggagaaactgagtgcaaaggtggggaggaactgtgctgagatstgcttctctccgggcccgactgttttctcatggagcagctgcaggaggtgtgtgtgtggagttgctcagttgttttatgtctgatgtgaggagagggtgagcaggactgagraggtgacagaggtttggggtcaggcctgggtgtatctcccaggccacccccttcttgctgggggatcctggggttccctcagcctcctgggccrttgttcccacacagccctggcgccatgctctgctgacatcaggctgtgaggtgacacgggcctgcttgtccgtgcccacatgcatatgcgcatggactctcatttatgctggtatttctttcttaaagttcatcttatgcccacctaaatccaaaagatgaaagttattctgatcactttgtgcctgctgtaaataaataccacctgggatcaggggcgataaaaagatggggatggctgccagctctgtgttccctgcgtcctctgacgctccctgggctggtgtgtctctgctgggggttgtgctcctgtggggctgccctctgagaccctttctcaagttccgggggacccctgttagagctcctgggggaagacacagtgtgccagatggcttggtgccacagggtgctcacatgtgcaaggcktggtgactgcatggggatcagaggcygggcattagtgagggactacgcttgaagcccttagaaggtgcctggccattttgtgttccccagatcagcagtcaccctgaaaatgccagccatctgcatggcactctgttgggtgcttagttaatggaggggtctctgaggctgcggggcttgaaggcggcgagtgatggagccagcagtgcaggatgagtcatctgaggggcaggcagacgcaggctgacactgcacagaccaggaaaagcggcgtggagtcagcacgggagcccgtctttgagctttaaggtcttacccgctcaccgggaaggaggaggtggccatgtttaggagcagtagaaccctctgtcatccccggggagaggctctcartggggagtcccatctgcaggctgcgggtctgcggtgcacggctgctgcttcctgtccagctctgcatcctgggggtgcggatgaattagaggtgaacgagccagagtgctctgcttcaggttattttctttgtgaatttaagttcayaatttaaaaactggtatcttaaaaaaccactgtactgcgtggaagtgtgaaaggtgggaagtgagggtgtgcgtcgctgcccctgcagcccagactctggaccttgcattctggttcctgtacactgttgccgtggtcttgagagccctcaggtcatctagcgtgggctgccgcctcctcgtcagcttccagctcgtgtctggtgyggagcagaggcttcctacttcgtcgacgttcctgaatgaggtcatcatctggtgtagkcctgaaaacaacccgattaggtagattcctattcatagccccattcttctgatgacagattgagtcctggcaaggattcaagaygcccgtgggatctkgtagcaaagaaactgcagagatggttttttaaaaacgactttatttagatgatttacctaccatacccctcacccatttaaagtgaactatgcggtggcttcaagtatattcatagttgtgcaaccatcaccatgatcaaccttagaatatgtttattgcctccagaagcagcccatccccgttagcatctgctccctgttccccagtctccccagttcctggcagccactcagctagtatgctttctgtctctctggattcgcctgttcaggacatttcatatgaatggaattatgcaacgtgtgctatttagtgattagttatgtcactctgcataattttatatttagagttacctgtgttgtagcatgtatcagtattccattcctttttatatctaatatttcactgtatgcatacaccacctttggtttatctgttgattaatttatggaaaattggtttccactttttgtgtggatgtgttttcactctcctgggtgttaagtgtttcacattttgaggccctgccactgtttcccatagcggctgcactattttccattccctctagcagtgtgcgagggctctgattctccacatcgttcccagcacttgttactgttgttgtctacttagcagccactctagtgggcgtggagcgacctcactgtggtttggtttgcgttttcctggcagctgatgctgttgagcatctttgcatgtgctcattggctgtttgggtatctttttttttgtttttgttttgttttgtttttgagacatattctcactctgtcacccaggctggagtataatggcgtgatcttggctcactgcaatctccacctcctgggtttaagtgattcctttgccttggcctccaagtagcttggactacaggcgcccaccatcacacccagctaatttttgtatttttagtagagatggggtttcaccatgttggccaggctggtctcgaactcctgaccttaggtatccgcccgcctcagcctcccaaagtgctggggttacaggcgtgagctaccatgcctggcctctttgggtatcttctttggagaagtgtctattcataccctttccccactttgaaaactgttttttgccttttttttattgacttttaggagttcttcatatacgttctagacacaggttccttatcagagagacgatttgccgatatcctctcattctgtaggttgtcttttcacttcgatggttttgtttacagcacagtttttaattttgaagtccaatttagctgttttttcttttgtcccttgtgctgttggtgtcttatctcagaagcttctgcctaacccaaggtttactcctacatgttaagagccttattgttttggttgttactttagctctgcggtgcatgtcgagctgatgctggtgtggtaggaggaggctccagcrtcagtcttttgcttgtgggtgtccagctgttgcagcaccatgtgctggagagactcctttttcctcccaacttgtcatcctccctgacaatccgttgaccctaaatgtgaaggcttatttctggactgttgtttctgttttgttgatctgtacagctgtcctgcaactgcccggtcttgactgctgtggctgtgtaggaagccttgacgtcgaaagcccgagtcctccaaattcgctctttttaaggttgttttggctctcctgggtcccatgcattccagttttggatcagcttgctgatttgtggaataggcagccgcaactttggtagggatgatgttgaaactgaagatcagttgggggaatgtctaacaacattaagtcttctggttcctgggctggctttgaacccacgttgtctgaatctggagcgcaggctcttgaccaatgcacctgtcctcacactgtgctctttgcacactcgttaacagtgtgtcctggagactttttcatggaaggatatgtggatactcattatttttaacagccacatcagaatttatggatctactacagtgtatttagttcatttacactgttttcagctttttcttcatgttaacatcagtggtgtcctgaatctrtgtgttttgtgcactcttttgggtgaagttccattgctgaatcagagtaaggacgtttaaatttttgagagatgcccccagatttctccctagtgtaccamggtttgctttcccatgggtggggacacccttctgcgctgggtgctctgatgctgcaaacctttctaggagacccatgtaacattgcattttccagggtttgaatattcacttttgagtactatttgcaaatacattaaaagaaaacacagmaacagatgaaaatgtcagattgttgccaaatactgcaacatgaaatcagaaactgatctaaaatctgaattagcaaaagcctgccagttttaacagtaaagccaaactcagggcaagcagacaaagaatttttattgttaataaagggaataataaacttccatgaagtctcaggtacctgcctccctggaaggggcttcaggacacactgctaatgctcggaccagtgtcagagccaaatacacactttcctatggctggaatgtgcgtcataaacaggctgaaatgagcactttgttaggcgagcagctaatgctttgtcagctttcaaatttcatttaatatacacggctttagttttcaatactttaaattattcttagcatgtatttttatgtccagaattggtgggttcttggtctcactgacttcaagaatgaagccgtggaccctcgcrgtgagtgttacagctcttaaggtggcgcgtctggagtctgttccttctgatgttcagatgtgttcggagtttcttccttctggtgggttcgtggtctctgtctcaggagtgaggctacagaccttcgcggtgagtgttacagctcttaaggcagcgcgtctggagttgttcgttcctcccggtgggctcgtggtctcgctggcttcaggagtgaagctgcagatcttcgcggtgactgttacagctcataaaagcagtgtggacccaaagagtgagcagtagcaagatttattgcaaagagcgaaagaacaaagtttccacagcgtggaaggggacccgagcgggttaccaatgctggctcgggcagcctgcttttattctcttatccggccccgcccacatcctgctgattggtagagccgagtggcctgttttgtcagggcactgattggtgtgtttacaatccctgagctagacacaaaggttctccacgtccccatcagattagttagatacagagtttcgacacacaggttctccaaggccccaccagagcatctagatacagagtgtcgataggtgcactcacaaaccctgagttagacacagagtgctgattggtgtatttacaaaccttgagctagatacagagtgccgattggtgtatttacaatccctgacctagacataaaggttctccaaggccccaccagagcagctagatacagagtgtcgattggtgcattcacaaaccctgagctaaacacagggtgctgattggtgcactcacaaaccctgagctagacacagggtgctgattggtgtgtttacaatccctgagctagatataaagactctccacatccccaccagactcaggagcccagctggcttcacccagtggatcccgcaccagggctgcaggtggagctgcctgccagtcctgcgccgtgcgttcgcattcctcagcccttgggtggtcgatgggactgggtgccgtggagcagggggtggtgctcgtcggggaggctcgggccgcacaggagcccatggagggggtgggaggctcaggcatggcgggctgcaggtcccgagccctgcccggcgggaaggcagctaaggcccggtgagaaattgagcacagtgccggtgggctggcactgctgcaggacccagtacaccctctgcagccgctggcccgggtgctaagtccctcattgccccgggccagcagggctggccggctgctccgagtgcggggcccgccaagcccacgcccacccggaactccagctggcccgcaagcgctgcaggcagccccagttcccgctcgcgcctctccctccacacctccctgcaagctgagggagtgggctccagccttggccakcccagaaaggggctcccacagtgcagtgghgggctgaagggctcctcaartgccgccaaagtgggagcccaggcagaggaggtgctgagagcaagcgagggctctgaggactgccagcatgctgtcacctctcattttgtttaatgttttctattttaatgttttgtattatcaggtgtctgtcaagtcaggatcactttacatgctactgcagtgtataatcttgtcacaatgtattggctcataataataaaaaccaccaaatattacatatatgtgtgtgtatctatacatgtagttttttttttttaatagaaaacctttgaaaccttcactgtaatcctatcagggaaaaatgattccctgtttattattgttgttattttaaaacrtgtaagtaaagtgatatgaaaaatacataatgactaatgatttggggaattctcaggaattcagatttcctgcctccgaatgctgcgtattagtatctgttggagaactggatgccctygctggggcgggggctgtcttcatgggttagcctaggagcccagctgttgttcatagcgtttccagtgggcttcgcctttcagagttcccagtgtcctgccttgtttacgggctctgcgagttcattgggtctttctgcttctctattttattcatttacttgattattttccatttattgtttgatggcctgatgttgcattttattaagagtctgctcaattttctktcactcttgggaaaagtgtcttagtcggttttgcgctgctgtagcygtaccacagactggrtaattgataatgaacaggcgtttactggctcacagttctgaaggtggatgtccaacatcaaggtgccggcatctggcgagggcagaagggcaggagagagacccttatgcctcttttaaaggtcattaaaccaacccatgaggacactgccacatcaccttttaaaggccccacctcccaggacccttcccttggcaattaagtttcaccatgagttttgagaagacacatacccacaccatagcagcaggcatggtgctcagtctggttttctcttctggcagggcattttggaagtgtcaaaggccagggacatccctgttgtcatcgacgcggtgagttgacttctctcctcctggctcggactcccggaaggcctgtgcagtgagcacggctccttgttctgtgcaggatggcctgtggctggtcgctcagcagccggccctcatccatggctacyggaaggctgtgctcactcccaaccacgtggagttcagcagactgtatgacgctgtggtgagtcagtggaccccctggagggtagatgcaagccctgttcgtcctgaagagggtgaaggacgagctccatgcttctgcccagcctgtccctgtggacacacctgcaagtaatcgctgtgcctctcscagcrgatggcgcgtcttcccattaatgcgcttggattggatgaacratggygtagtgggcttgggacaggcagggactcgggtcagtcagcccctcctgcagtgcactctggacaggtcactttgtctgtgtcctgagtgcctcatctgtaatgtgatgatggcatcagcttcacggggttgtgaggatgagatgaggaaacctatgtaaagcygtgagtccccacatggtaagtgtcccatcaatgttagtgcccagtacgactggaatttgtattactcctgcaaagctctcagaacccagtcttgggtggtcctccttcagcctgctctgatgaggtagaggatgggcactggagcaggcaccgtgtcagcacctgctcggaggactcactgcaggtgatatcctgggcatcctcccacctacatggcctttaacaggtgcctgggtgatccctttagacacgagagcatgagtctcatggcrgatgggacagggctatctgtcgtcgtgtgtctgaggaagactttgctttttctctgtcttcctgtgttgtcatagctcagaggccctatggacagcgatgacagccatggatctgtgctaagactcagccaagccctgggcaacgtgacggtggtccagaaaggagagcgcgacatcctctccaayggccagcagggtgagtggcrgctgccctctgtgcatgggccagtgccaggtcagtcagcatggccacaccgagcatgagccctggaagacctctcccgtgcacacccgtgttcacacacattcacacagggattcctgatgagctcgtcaaccacactttcttcagagtccatgttttgacttttcactgttttgccaggggaggtgacagtggtgagggcaggctttcgagccgtgggccttacccgttggttgaattcccttgcctcagttatgagaagcagtctggcgggagggtgcctgcaacagcagggcacagtgcagggtcccgcgtctccagctgccaccttcatctcacctgtggcatccaccatccatgcagttatttgggtattttattgcatttcattctcttttatcaaaatgactggaaagtgcagaaagccccgaagctgatgctggtagtggaatctcaggcactgagtgtggcgagtctcaactggccactcccacggagcctggggaggcttcagcargagccaagtgagagcagggcagaggccgggcccagcgccagcgaggcatctggggagccgtgcccttgttagcgctgaaaatggaagcccctccattcaggcctggacagatgatgggcagcgaatgtgctcacctgctgagctgtggggctggactaggtaccaaaatcagggtagaacactgaggcgtctgtgggcgggtgtgtgcacatccacacttgtacactcacattcacatgcacatatgtgcacacgcatgcaattcatacacatgcacagttgtgctcacagcctcgcacgcccttgcacactcgcacttatacacatgcatggtcatgctcacagcctcgcacacgccctcgcacactcatccacacacagctgtgcacaaggaacacagagcagatgttctcagagggactctgacacctttgagatgagggttttttaatcactggaaggctctcttgggtctaacaggttcagagaatgtaacacctggttttcaaaacatttttcaaagaaatagagaattcccatacacaggcatacgtgacgttatgaggccggtggaggcctcgctcggtgttgccctgtatggttgagctgtggtttaaggtgaactctggagtgtgggctgcaggtgagggctccgtccctgggagctggtgggaggagctggaggctggcgccgccctgctcagagctgcctgcttgggctcgtctgaggcggttccgagctgcaggtgtctccaccaacctgctgtgctacacagcggggtctggggcagcctcaccactgcgtgtcttggtttcctcttctgtaaaacagaggctgcctccaacccttggaacaaacagggaagagccgtagcaggcaggatgtgagtggagcctcaggctgctcctggagggtgtggctctgcctgcygtgcggccttccacacccgtggctactgtcacattcacacacatggccatgctgacacctgctctcacttctgccctgtgcagtgcttgtgtgcagccaggaaggcagcagccrcaggtgtggagggcaaggggacctcctgtcgggctccctgggcgtcctggtacactgggcgctccttgctggaccacagaaaacaaatgggtaaggccacgtcttcatttattctactttgaaaccgtctgatttttctaagctgtttcagtagctcatgcgttgaataagtagccctggaaacactgacartgaactctaggcttcactggagagatctcggcacagacgaaccctcttggcagaagcttccaccccacacttgggcctgggcctgtccatcattcactgtggatggggcctggggcaggggtggtcttcagagctctccagagagttccgaggtgcaaccaaggcccagcagcacgctgttctgggaagttgagtggtttattctgtgtaacacagaatactaagatagaaaacagacagggtcaaggcttacttagacacttgttcttaaagatgtgaattttctttaagagacagcagaattctaggaccagggcccttggcccagttctgtagtcagagaactttatgaatgcaagcagttcccatacctctaagcatctccatttctcttctgtgagcccatcaaggtggtggctgcaggtgctaggtgtggcagacccgggcttctggagggtgggcagggctgtcatccaktggcctcatgtgtcctcattgccgggatggcagagtctgggaccrtcccccaaactaggtgtgtccacatgaatttgagagccgaggaggtaggggtgtgggcaggagtcttactgttcattctgctgtgttcactcgagttgcctccacccctcccccaggagatggagccctggtagcaggaatccmcattctcagacctcagatgccctctgcacctgggcactgagagcacagtcaaacagggctaagcagcttgtgccgcctggctttccccgggaacacctggcccactgtgtgccctagccctggacctgtctccgagtacatagacgtttcctgtgtgcctcctgccagggagtagtggagggttaatggtggttttcgctgtgrtaaacctgctttctcctcaggggcatatcagacttgaaattgacaatttggggtcctgagattgaaacaggagtcaaaaccagagcccagggtagctgcggcccccggaccacgacgcccacttccccacacctcctgctgtccccctctccgcaggtccagccctctcctggtggccgcgtttggcgcctgctctctcaccaggcagtgcaaccaccaagccttccagaagcacggtcgctccaccaccacctccgacatgatcgccgaggtgggggccgccttcagcaagctctttgaamcctgagcccrcgcagaccagaagtaaacaggcaccttggacrggggagagcgtgtgtgtgatgggaaaatccggacccacgcgtgtgctgaaggcgyacggtgcttgccagattttcaacttgagcataaattggttgccattgagaatttaagaatctggaatattgcagctyttggttaaacttaatgcatggttggagatgttatggcracactaaacaaagtattcctgaactttccttagctccttggtagtaactgggaagacagaaatgaagaaaatcacatgagaatgaagaattctttagcagctcaacagartttctcggcctgctcccagatcggcgaagtttctacttgttactctctctgccgrcgcccttcrttccycctcygcttcccttccctagtctttcctccggcagggagctgggcaggggtccccgggtgtctccctgagtcccgactgcactgactgggtccatcagagggctgcttcgttctccagctcatcttcttttaaagtggtgactagcttggtggtatctggctgctggtgtttggcttattgacatactccagggtaatcaatgatgactttgtttggaaacccttttggaggcaccatgggaacagaaggaaacatgagtgacgctgacccttgagtgtgtgggtggggagctctgagacgcmtcctgtcccacgctctccggtgtccgtgtctacacaggggtccccatgatacccaccggccccagcagggcagaccggaccggggamgggcacggtgaagggctgcagcctggggtctgacgtggcccctagtgctgtctcaggagaaggctctggaggacttgaggcatgctgggcctggtgcagtgatggcgctaaggagacccggggaaagacagtatcgtggtcacgtatgcttaggaagcagcacagcygtgtccttagggatgttcgcgtccagtaaagacactggtaactgcggtttcagccaacactcttcatggcagtgtcgacctcgggttagcttctgttgtctttgtggatggttttcctggagcggcctgacgttgacgtgttctctggtcccatgtcttagcggggcatggtacggtttcgtgcctgacgcgtgcattagggtgttctcttatactttcagtagcrtctttccacagcaagggccaaaccctcctggttcccttcagagtctttttggcctgatgatgactcttgagtgataccctgtgatgcagacatgccccagatggattctactttctttaaaactagggactttcaagattaaaaaaaagattgtcactactaatttgacgcctaacttcagaagcttcactgtctacatgtgaacttttccagaaaaactgtgccatggacatttttcctctggggaattaacatytaaattctggtaactattaaaagacagatctggttaatttaaattgagtattgtatttttttccttaaacagctaaagctcacctttcaactttcttaggtgaggacattgtgtgagatgccagggagataagaatatctaagcctgtctgtgtgagattggcctcctcgccagcgcctctcccgtggtggctgcaataaagcaccttgaaggataagcccaaggcagccccttctttccttaggaaatagaattcagcagtcacaggaactattcgtctggtttttgttctaagtaaaacatccctttgcttaaaggagagaatgggtttttttacaagcagctcattgcttccatgttctttctcaaacccacgtatttcacgcactcgctccagccggacacgctcccaggagcttccctggaccaggagagcaacgggaaagtgtgggggggtgggcggcccgtaatgccccagtactgagcagccctgtcgagatgcctcattgtaaggagccctctggggactttttctatgtgggtagctttactagggtgattttctaggtgagtgacttctgaactgtagacaggagacctgtacctcagggtcacggttaaatgatgagcaagcccgtatccccagtcacgggtcccgctgctgcctgtgcccttgggattcagagatgccagtgtgacagggagaggcctggcccagggtctgcgagcaggaagagtggagaggggtcaccctgctgagtcactgacagctgtggcgctgggcttaccacagaagggtgagatcaggagcaaggtgggtgcttcaggaggccaccggtcctgtagcccaggcagcctgccgtgtgctggccgccacctcccgctcaggaatcctgtctgtcacagctcgccagctggctttcagcctggctgccctgactcctccggaaccaacctttcccaggcccagctcgaccccatcactgctctgcacagaccatgaccaccaagatggcctgcagctgccaggatgttaactgcagcgggactgcagacgggttctcagctgcatttttcctatgctgaatacgttacttttgtaaccagagagaaaacgtaagattgtgttcttgctgggggaggtgtcccggggttagcattgctggcgtcccacctctgcttcagactatgctgcgtggcccacccacctcacccatccccagcccctccctcaggaggaaacaggctgcattctgccgcctcccggggtccctgctcttctgttgctgtgttgtctgttccctgggcacagggccagcaggtctcacgcacaggcacgtgtgctgctggatgctactgaatgtctgacactacttcactcaatcgacggtgagtctgtagccacagaacgcagtgagtgtttaggctcagttactaacaaacagacgccagtgggacactgttggttgccttactttaatgctgacctagcagccccgacaggaagctttaacataaagccttgaccctgagaagcatgggtgcgtcttgtcgtgagcaggttcatggctgtgctccatcctcagcccgctgatttttggtcttttgtcctttgatccagcagttcccacgtggatgttgtactgcttctgtcctggagaagaagagtgaggtccaactctgagcagacaccacgtcatgtggcacagggggctgacaggcgtaatcaggttcagggtgcctgttccctcaccggcctgtcctaaaaagcttgccaggcgcttagaaagggccccactacctccagcagaaggccaggagcttcaaggcacctgcaggaggtggcgggggctgagcaggacccacgtccccgtgctcagcgtcccctgcagccaacttggcccctccctcacggccctcccacctcattttttatgggggtgggtttctctactcagaagcatgggcagggcgcagtggctcacgcctgtaatcctggcactttgggaggctgaggtgggaggatcacctgaggtcgggagtttgagaccagcctgacccacgtggagaaaacctgtctctactaaaaataaaaaatcagccgagcatgggagtgcatgcctgtaatcctagctactcaggaggctgaggcaggagaatcgcttgaacctgggaggcagaggcagaggttgtggtgagccgagatcacgccattgcactccagcctgggtgacaagagtgaaactccgtctcaaaaaaaaagcatggtcacgggggatgtctgggcctctgatggccccacgtcctgttgacctacccggctcctggggtgatgtccctgaccttggtgcggcactcaccttgatgttgatgccgtgggcagtcaggccccggcgcagggtgtcgcatgcttccagcaggggctgcctttctaggagctgctgccgccgggcgtcccccgtggcctcgggcatggccagcgcaaactgccggaccttctgccggaaccgcaccagctcgtccaccacaccatgcaaggtagcctcgctgccgtctcctgaaacgtactgaagccagcagggcgcggttacgtcccccggagactgtggattgtggatgcccccctccccaccccgtggttgggctctgggccgacacccacccagccctgggcttccctgattccctgcagctgggcctctttctgggtctggcagggatgggtacagcccgcgagcgctgggctctgggcaaggctccactcaactctgagcatctgtcgtccaagcaaggctgagtgatcctcactcgggagttggaagaaagggctgggggctgcatgccgccccgccctgaacacaaacgctccctggcttccagacctcacgcaattgtggccgaggtatcaggagcaacctgaggatgaggctggggggcagcgactgagcgcttgcacacgtgtgtttcggcaaatggtctgagattcacagcctcaggtgctgaggacgggatttgcgcagaaggcctcgcgctgtcctcccactgagaacagatcctggggcggtgtggaaggggcagctgtacctatttgttaaatccatgtgtgtaaaataagaaacagacacaacatttgaccttggtgtcaaactacttaaacctcacacacccctcagttattgcttccatgataaaagacagtttttgttattacagaaatatgagcccagagtgggcccagacattgggccttgcggccagaggaaggtgaatgagatatctttgacaagggctaggcagagcttggccagatcccacttttcttactcaaaacagactccggaaagccacccctaaaaatgaacatgtacattgcaaaaacttgggtcatctcacaccagtcgacttttatgtgattggcaacagacgccggactgctggaaaggggaactaagtctaccaggtgatcaacaggtatacaaatgagccaaacttggaaaagacactatagttctctgttgagagccagcgagacatgtttggcccagagccaggccttcagcacacctgcttgggccccagtcccaagcggcgggaccctcggggtgctgggcagctggtctagagtggcagcccccgtccaggcagcagcagccgagccacaccccaaaagagccagagcgccttgtgctgagaattctacaagggtgtccaaagaatgacagggatgttcagggacacagcgccagccccaaggggcctctgtcagccacatacaaagtgatggtggggactttaagaataaggcaggaaacctcaaatctgtattgatagaataaacgagtttcaggtgagcctgataaggaagaggacattttcataggatccaagtctctttgcaaaaatgctcttgagttacaacggaagagaaggaatgtggagaagcctggcagcgtccaccttcactgcacagccagggtgagcctcgctgggaaggtgcaggtgactcgtgcctgtcggggagcccgtcctgtccgtacaaaacatgtgccaggcaagggggctcaggtcgccaacttgccctcaaatgggtcaggaaaaaatgttctcttactgtgcctgtgacttctgcacattctgagagtctttgaacataaacgtgtgtgcagagctggcgacattctgttgctgagatggactcatctctggttctgcgcacgagagtttgccaactgcagaagtagaattgtgcaattccaattaataagtattggctctgagtgtgtttatttttccaggaaagtaacatgtttttaaacaggtaaatacattagtgtggcatcataatgctctattccaagttaaaagggtaaaggttattgtcccaacatggagaaaattccagaattaagcatttaaaataataggacctacctgttgatttgccagagaaattccaacagtttcaaaaaactgttcaaagtaagagatgatggcaccaaacacagcaggacttctcggcccttcaggttcctgtaagagatcatgtcgcagaagctccttaaaagcagtcttgatggcagtgggcaaacggaattcaatgtcaaaagacaaaggcttcagcaggtcacttcagtctggcctttctcctggcttctatggagggaggacacagctctggcatcggctacctcactgcagaccatacaactataggtgcatgaggaatctcttgtgcctcagtttacccatcagtcatgtgggtggtgactagctcatcaggcttcgcgggtgaagcatgaccgtggagtatggcaggtggcgcatggtaggtggaggctgagtgggcactgggctgggtttctcagaaaacggggaaatcctggtacgtggctcacatcagttaccaagcacagagacccttgggtgacactagccttagtttgcaggtgccccagaattgcaaagcttgggaaggaaaagcgcaggacaaaagccagcctctttacttgtcccgccccttgccacaagaggcccctgttgccctagagctgggccagcctggtagtgccggcagcagctgcggtgaaggcaggaggccgcggatgggctgaggaggaggagctcccgtgcaggagcagcctggctgcgggacctgccccagcccggcctggctgccttcagtgcggggcagcctgttcctgcagccggctgtgactcaaatgcccgcccccctcagaggcgagccctgcgcgtctgcagtatttggaccgaaggcacccggcaagggcacatggcaccctgccccacctgctggtgctctgaaacccaacactgcacgcagccagggatggagacctccacagagatgctcaactaacagagcatgtggccagaacccccaggtgtttccagaggtgggagaggcacaaacagcctcggcttcccgggtcatcaaaggtcacggggctcctgacgcagcgcctcccagggcctggcaggggaccctcagacgtgcaggaaccaaagcctgccgccgccttcacggtctttgtcccacctgccaaacacttgcagtgacccacgagtccaggctcagacccctgggtgcttggtgtggtcatcacactggggtgcagattgcataacagtgcattggggtaaatgggtctttccttaaaaagttccccacaaaagctctctctgtgaaagggccatgaatgcagtggggacatgagatgtgtcccctgaggatcaagcacacagaatttctcagcctcaggggctcctgagagcttgttccccaggtggccctgaggcccgggagggtcaagccccaggctgggtgccatcccgtgtgtcagcggcagactcgggctccatgagttcctccacagaagctgcgggaggcgaaatcagcagagatgccacccagccgacatgagaaaaacccaccagaggacccgacccatgcccctggcagcaggaccgcaaggccacctgttcgttgagctaccttcagggacgccctgagctgtccattcccgtgg

SEQ ID NO: 97976 - DNA, 47428 bp, Homo sapiens
cactgtggggcaactccctggtacaaatctattttctcagctctggactttcactgagccactgctgctatccctcagtcctgcctcttcccaagaaatgctgccctggaaggagctgggcacctggaggaaggctggcatttcctaagcatggaccgtgcctggcatcttgggtcttagttaatcctcagccatcctgcccagtggctgtcagtgacactctcagcaccagcgatcggccgagaacacaccaaggcctctccccaacccctgctcgcatcctggggaggggaggagagacgacaataaccaagcgaaggggaaatatacagaccaatgcaaggagaagagagcatggagggtgcagtcctgagtgtgcagagagagggcccctgggaccaggatgctgacagaagaggagccttgcagggaagggaacagcaagggcgtgggagcgtcctgagagcagtccatggggggacgacagagcaaagggtttctccttgcccagggagagggctggcctgcgcacctgcttctgggagctgatcaccaagtcctggaggtgtcttgccagagggaagtggcgcttcgggtcacaccgagagactggagtctgagctcctcctcctgggccatcacccacgcctatgtggagacccagtacaaactctgggcccagcgcagtggctcacacctgtaatcccagcactttgggaggtcgaggtgggaggatcacttgaggtcaggagtttgagaccagcctcggcgacatggtgaaacccccgtttctactaaaaaaaataaaaataaaaaaaattaagggggcgtggtggtgggcgcctgtaaccccagctacttgggaggccaaggcaggagaattgtttgaacccaggaggtggaggttgaagtaagccgagagcacaccattgcattctagcctaggcaacagagcaactccgtctcaaaaaacaaacaaacaaacaaacaaacaaaaactttgtgctttgtagttggctaaactcttgcaggggcagtaataggaaatggaggaggagagagaggaaggagccaaatcgcttcagcccattaatgaactctagcttttacctggggctttcgaggaggtatacatctggcttttgttctcaaagaatcagtcagtgaagaataaagttaaggaggcaaagtttgtaatttggaggcgacttgagcaataacaataatctagacaagagatgagagtggctcaggccctgggtgctggtgacagcagtggaagcctgggaacttgctgagggattggacctgggatgtgagggaaagagaggggtcaaggaggactctgaggatttggcctgtgcctgaaaaatggcaatgcccttaattgagctggtggagacagaggcttggtttggtatgtgttgagtttaaagtgtagacctccaagtgagactgcgagtgggcagctgtaggtgagagctcgggggtcagaggagggtttgtgctgaggaacacacttttttttttttgagacagagccttgttctgttgcccaggctggagtgctcactgcagcctcaacttcccaggtttaagcgatcctccctcctgagccccccaagtacctgggactacaggcgtgtggccaccacacttggctaaacacacacacacacacacacacacacacacacacagagagagagaggaggttttaccatgttgcccagtctggtcttgggctcctgggctcaagggatccacctgcctcagcctccgaaagtactgccattataggcatgagccactgtggttggtgaggaacacacttgatcagtagcaggctccatgtggtcttccactgccaatgagcttggtggagatcacctgtcaggccagtggagggaagggaggagacctaagggctgaacttttggggcctccaacatcaggagggtgagggcaggtggggaaatggaggctggtgaggaagagagtggagccccagaatctaagtgaagaaagtgtttttaaaaagcgccccactgtaggaaatgctagtaggaccatccagtaaggtataggctgagcccagatgtgacgacatgatgttttgcgacatgatgttggagcggttgggatggaaccctgagaatgggaggtgggcatgggaggcgcccaggccaggcccttctgtgtcatcttgccctgaagagttgcagagcaggtgggcatagccaaagagggtacgtggagctgagagcacggctcctaccctgatggggcagcccagtaagccgtggggggcaggactaagggcgagccacgtgttcatggcagcaggcagggcagatgtttaggatgggatgtttagcagtgggggcagggaggagtcctctcccatctctatgttctctgtaaagttggacacagagttagcagaggggaggaggcatgatatcatcttccaggatggtggaacctgcacagacccggaggtgcagcaggcggagggttttcaggaggactaggcttccctagaaactggtgtccccaaagtaagcagccagctgcagtggtgcgtttcccagttgggggagggggctgaatttctccaggacaggcgagggtggggtgtgggaaaggggttagggaggaagtgggcatgggggagggcagcccccagtgggagggcatgctgaggcatggagctgggacgctaaagggagggagccctggagcttgaaggtggtgttcctgagtgggctgtgggaaagtggattataaatggtgcgaccacaaggcaggcgggggtggcaggctgcaggcctggctgatggtgctgcccaaggccacccagaaggtcgtgcctgggattttgttaataaaaacagaggaggatagaaatgttagggcattgcccaaaataaataagagtatgtattaaatcatgaaactttttgttcatccaaatgtgtactagatcacaatgtagactttcttttactacttttattgtggtaaaatatacataacaaaattcaccattttaactttttttttttttttgagacagagtctcactgtgttgcccaggctggagtgcagtggttccatctcggctcactgcaacctccaactcttgggttcaagcgattctcttgcctcagcctctgagtagccgggactacaggcacacaccaccacgcccagctaattttttttgcattttttttttttagtagagacggtggtttcaccatgttggccagacttgtcctgaactcctgacctcaggtgatctgcccacttgggcctctcaaagtgctgggattataggcatagccaccacacccggcccattgtaacaattttaagggtgcaattcagtggcattcacattgttgtacagccattcccactaccaattccaaatttttttatcaccccaaacagaaacgttgtacagataaaatgaaataggtcatgtggtcacgtggtcatagttaacaacacttgacgccaccaagtccgcggaaagatgctcaacaccactaatcacgaggcaagtgcaaaccaaacccatcatgcaccaggctggccactgtcaaaaaacagaaaataacagttggtgaagatgtgcagaaactggaagccttgtacactgttggagagaatgtgaaatggtgcagttacgttgggaaacagtatgtaatcgccttaaaaaattcaacatagaactaccatatgatccagcaacttcacttctgggtatatacccaaaataattggaaccaggggtgccaagggatgtttgtaccatcaagttcatagtggcattatttacaatagctaaagtatggaagcagcaagccaggtgtccactgacagatgcgtggagaaacaaaatgtggtatctacatacaatggaatatcattcagcctaaaaaaaggaaggaaactgtgacagtgctacaccatcggtgaaccttgcagacattatgctaagtgaaatgagccacaaaagtcacagtaagccacaaaaagacaaatactagatgatttcacttatgtgaggcacctagagcagtcaagctcatagggacagaaagtagaatggggtggtgcagggcatggggtagaaggaaacgggagtcattgtttcttgagtccagagctttacttaggcaagatgagttctggagagggatgatgatgatggttgcacaacattatgaatgtatttaataccagtgaactgtacactttaaaatagttaaatggggccgggcgcgtgggctcatgcctgtaatcccagcactttgggaggccgaggcaggcggatcacttgaggtcaggaattcgagaccagcctggccaatatggtgaaaccccgtctctactaaaaatacaaaaattagccgggcctagtggcgggcaactgtagtctcagctactggggaggctgaggcaggagaatcgcttgagcccaggaggaggaggttgcagtgagccaagctcacaccactgcactccagcctgggcgacacagcgagactcctgtctcaaggaaaaaaaaaaaaaaaaaaaaaaaggcaacatccagccacaatctaagttatgagtcaggtgtacatttagcgacttgaagagatctttacatacacagtgggttgcagaaaacaagagaatacgtccagaggacgctgataacaatgttatatacattgtgacctcaatagaggttttgttgttttcttggtttttttcttttctttttttttttttttgttcaagaggaagggtctcgctctgtcacccagtctggagtgcagtagcgcgatcatggctcactgaggcctcgacctcctgggctcaagtgatcctcccgcctcagcctcacaggtagctgggactacaggtgtgcaccaccatgcctaatttctttctttttttttttttggtacagtgtctcactatgttgcccaggctgctcttgaactcctgggctcaaatgatcctcctgcctcggcctcccaaagtactggaattacaggcgtgagccaccacacccagccttcaaatatatatattcaaataatacatatctattttcaaataatatatatttttttaaagaagggatacggaaccaagaaaacagtgacattagaggcgtgggggtggcgcaggctgccggggcgtcgggagcactacccagaggaaggggctttctgtagggtctgacgcggcagtcctggagcagagcgaggggccagacgcagacccggggggtcctccgtggcgagggggtcctagggggttaggtccttgggttcagagagggtggtggggacgggacagcacggacgaccgcattctggggacccggccgcggaggggtccggccaaggcgggccctggtcaggcgcacacaagctcgcctcggcctccacgtccgtcccctacaacgcggccgaccgcgcggacgggcggtacgtgcacggcgctggacgaggaggctgcgcgcaagctcgcctcagcctctggagctgcgggccctgcacgccctcggcccatccccgcgagccggaggaacgagtgaccaccaccgccagccccgccggccgagtgtccctgcccagccagcctgcgtccgagcgcggcgctcctcgcggaacccgcccctgctctcgccccgccccgcgcggccccgcccccgtgtccctcggcccttacaggctggtccgaggccgcgcccggcgggtcagccaatgggagtgcggcgcgccccgcggcacgtgggctcctgcccgtcccggccgggtgcgagctggcggagctccttggcccggagcgcgcggggcgggggcgcgcggggcaggcgggacgcggggcggaacggaggcaggatgggggcggggcgctggcgacatggcgcgctgattggccggcgccgcgctccaaggctgttaacggcgtctgggccgggctacggctccaaaacaaagggcaggcggcccgcggggcggcggcgggaggatgcctcgcgccctgcctaggcgttaacggcctcagcgcgtcccgggccgcgccgggaacgcctgagagccgagcccgcgctgaccggggcccgggccggatgggcgctgcgggccggggcgcggaccgcggagcggccgtgagtacgggcgggcctggctgcagctgcgcgggcggttactttgtggccacccaaggatactgtggctgcgggcgggcccgggaagcacctgttgggcgtccgggcgggcgggggcgcgagcagggcgggcctgtgacttttttgttccgttttggattttgatttgttgatattgggctcactccgttttggcacagacaacaacgcctaatctttgattcccccgccgtttcttctctccacctcccccgctgtccctcttctcccgccccgccgtgaaaagatagggaaaatggacaagatccctgatttttggattttccttccttaaaaaatacagcctcaactgggcaaggaaatgagggcaaaagaggtctcctaggaatgtttatcagaaaggcggaaaagcttttcaagtagccacataaagatcatgactaaaatggagcgtcctcggtatttaccacttgtggcataggtttcgttaacagagattgcaaaagcctgagcttcagagatctaaacagggtccgcctcccccatgcttggctctgattgacatctttgatgtccaaattatgtgctgaattctaaggatggaaaaaaggctgagattctattttaggcagataatgaacatggaagacatcaatttccccgccccacgctttttctgttccgttgcatttcttcttcctctatctaaaacatacccaccttaacctgatgtttcctttgctaagaatgttattcttcccacccaccagcccctgacactcctaattccctactcaggtcccaagactaggtttaccaccactggggagactttccaggcacctcacctgagcaagctatagatgtgacaaatgtttgctgagcccctgccaggtgccaggagctgtgcttaatcctgatgtcattttgtcttacaatcatgcactggtccccctcagggctcttgcgaggcaatggtagtggcatgtttgaggaataagaggatctccaggaccttcatggtgtttcctcttgggccctacagggtagagtctcatctacttgtgggaacccctacgggttgggcccatattgagcatttatataataactgagcgctcttaattaccaatctgagcaatagtcttcttttaaaataacttcttattttggaaaaactttaaatttacataaaggttgcaaagatagtacagacaatcccaatatatcctacacccagtgctccctatccttaccccatcctacactgctgtggtacacttgccaatatgaaaaacacctgggtgcattcttgtcactaaactgtgggtattaagccttttcacctttgaatcactgtaatttataaagccatttctctgtttgtttctttgtttgagacagggtctcactcttgctcaggatggagtgcagtggcacaaacacgactcactgcaacctccacatcctgagcccaagtgatcctcttgcctcagcctcccatgtagctaggactacaggtgcacaccaccatgactggttaactttacatttttttttgtagagactggggtctcacttaatgtttcccaggctggtcttgaactcctaggctcaagtgatccacctgcctcagcctcctgaagtgttgggattacaggcttgagctgctatacctcaccataaagctattttctttaggttgagagcagtgttcctctaacatctgttcttgattcttgcctgtcttcactaagttccaccagcacctgtgtcaaggggcagggatgcaggaaaagggaaagaggctaccctataggttttttccttttttctttctttttttgttggtttgttttggtttgtttatttcaacaaacaaattggttttttgagacaaggtctcattctgtcacccaggctggagtataatggcactgtctccactcactgcagcctcaacctcctaggttcaagccatccacctgccttctgagtagctggaaacacaggcacacaccaccatacccagctaattttttgatttttctgtagagacaggatctcactctgttgctggtctcaaactcctgagctgaagcgatcctccccccttgcctcccaaagtgctgagattataggtktgagccaccacccccagttagttttgttttgttactttatttgtttattttttgagacagagtctcgctctgtctcacccaggctggagtgcagtggcatgatctcggctcactgcagcctccacctccagggttaagcgattctcctgtctcagcctcccgagtagctgggattacaggcatgtgccaccacacccagctaattttgtatttttagtagagacagggtttcaccatgttgcccaggctggtctcaaactcttgacctcagatgatctgccacccctcagcctcccaaagtggtgggattacaggtgtaagccacagtgcccagccttgttttgttatattagagagacagagtcttgctttgtcactcaagcctggggtacagtggcacaatcatagctcactgcagcctcaacctcttgggctcaagcaatcctacagcctcagccttctgagtagctgggactgtgggtgtgcaccaccatgcccagctatataaaaaaaaaattttttttggtagatatgaggtttggggttctcactgtgttgcccaggttgatctcaaactcctggcctcaagtgatcctccagtctcagcctcccgatgtgttgggatttacaggtgtgagcccagcctaccttgcagtttgtttgtttgtttttgttgttgttgttatttttgagacagagtcccactctgtcgccaggctggagtgcagtggcgtgatctcggctcagtgcagcctccgcctcccgggttcaagcgattctcctgtctcagcctcctgagtagctgggactacaggcacccgccacaacagccagctaatttttgtatttttaatagagacggggtttcaccaggttggccaggatggcctcaatctcctgacctcaagtgatccgcctgcctcggcctcccaaagtgctgggattacaggcgtgagccaccgcgcctggccaaccctgtagttttaacatatttgtctccatggaagactaataaacaaaattgttttgaatatgaagaagcaatagaagcccccctgctttcaaactgttctgtgatgcttttcattagagttaaatgaagttgacgtaaatgtttttaagtagttagatctaataatcagtgaaagctctagggagtgggaattttgacaagagatttgagcggaggttgaagaaagttctcaatagccaagacatagagggctaagggtttttggagcaagcagtgcgagatagattcaggaaagaagtcaagagggtgaaatcgattccgccagcaaatgccaggacgttacacctgctatacagatgctgagtaccaaaaacctgttggcaggtgagagtaaaatggaaatcctggagccarccactgttgcccacaccccagaaaggggttaggagccgttattcaccccattgctcagtaggccctctggcacctgcagggccttgggccggggccgggattcctggtggggcttgtgaggtgcttgctgagcccctgccgtcctgtaacagtgacacatgctcctgccgtaaggccctggtcagacacctaaactgtgcccaaggatcatcccccttaacatctcatgtgactctgactgccctgtaaattgcacgttaccccactttacaaagaaggtagcagaacttggcttcaggtcccagagccaacaaacacgtggcacattttgcatcaaagcctgggaagcctctcaaagcaagtcagaccctctttcacctttgtcctgggggtgatgacatccctgttgccaaacctcacctactccctccctcgtggtgccacctgccttctcagcagcattggcatatacccccgccacccaaacgcttccccctcaccttttctggttcctctttgtgtatctgtttttttttttttttttttccccttctcttgccccaagacagggcctttaatgtctgatgagactttatttagcatgagggtaaataaagtagtttttaagattctcaacctcttttcttctatctcaatccagtcttctgggtgtggtacccactctttcaacctaacaaggctagtgttgcacatagttcctacacctccccttttctttctttttttttttttgacacagggtctcactctgtcatccaggctggagtgcagtggcgatcacctcagcctcccgagtagctgggacgacaggcacgtgccaccacacctggttaatttttaaatttttttttagagacgggttttcgccatgttgcccaggctggtctcgaactcctgacctcagatgatcctcccaccttggcctcttaaagtgctgggattacaggcatgagtcaccatgcacagccccctcttcttgttgttagcaagaaagcacctctactgggatgtgtcccagggccttggttgtgggaaactttgttactaatggtagaaaaaaaaatgtagtacaggttctttgaaaagaagcgctcagtacaagcacattatcagtagtctcaggagaggtggtagaggtagtacttgagcacaggtgggaggagagatggaggagagagcctggagggccgaggcacctggggccactgggcaatggaggagccaggccccttgggttccccagagagcaggggctggtggggagtctacagagggccatggagctttgtctcagggcagccatataggtggtttgatgctgtcagtgagtcccattgtgcacctaggctgcagttcctgaaatgtggaggggagcttttcctcctgtaatgcaagtagggaggaagtggatgtgtgtggatggaagctggaattgccaaaggcaaattgtacccatgctgttkccctttgttgtaaatttttccagacctttccacacctgtgacttcatgtactatgtgagagtttgaatagtcagtgtgggccagatgctgtagctcacgcctgtaatcccaacactttgggaggccaaggcgggtggatcacttgaggtcaggagttcaaggcaagcctggccaacatggtgaaaccccatctctactaaaaatacaaacttagccaggcatggtgggaggtgcctgtagtcccagctatttgggagactgaggcacaagaattgcttgaatccaggaggcggaggctgcagtgagccaagatcgtgctactgcactccagcctgggagacagagcgagactctggaagccccatgatggaaatgtccctgatgtgtgtttatcagtgcatttggccagtctcttttggttaaactttgttgttgttgttgcttttgttgagaaggagtctcgctctgttgcccaggctggagtacagtggcacaatcttggctcaccacaacctctgcctcccgggttcaagcagttctcccgcctcagcctccctagtagctgagactaaaggtgcccaccaccacaccgagctaatttttgtatttttagtagagacgaggtttcaccatgttggttggccaggctggtctcgatctccagacctcaggtgatctgcccatctcggcctcctaaagtgctgggattacagatgtgagccaccgtgctagcctctattggttaaacttgaggtggtttctaatcttttattacaggcagtattattataggatgatattttgttatttcaggtaataactgcttttatccagttattttgcacatgtgcatcagccaaaggtgaactccccagatgaacccccatccagggctgtgctcctaggaatgttgtgggtgttgccaaatggctggatcacagagcaccttcaccagtggtgttgtcaacttcttaaatttttaaatttaatttattatttgtagagactgtctcgctctgtcgcccagcctggagtgcagtggtgtgatcatggctcacagcaaccttgacctcctggcctcaagtgatcctcccatctcagcctcccaagtagctgggactacaggtgcacacccagctcattttttttttttttttagagatgggggtcttgctgtgttggccaggctgatcttgaactcctggcctcaagtaatcttcccaccttggcctcccaaaacactgggattacaggcatgggccacccctgaccttatcaactttttttttgagataagatcgtactctgtcaccaatgctggagtgcagtggtgtgatctcggctcactgcaacctctccctcctgggcctaagtgattctcctgccttagccttccaagtagctggcaccacagtcatgcaccaccatgcccggctaattttttttttttttcttcaggatggagttttgctcttgttgcccaggctggagtacaatggcgcaatctcagctaactgcaatctctgcctcctgggttcaagcaattctcctgcctcagcctcccaagtagctggcattacaggcacacaccaccatgcccggctaatttttgtatttttagtagagatggggtttcaccatgttggccaggctggtctagaactcctgacttcaggtgatccacccgcctcggcctcccaaagtgctgggattacaggcgtgagccagtgtgcctgggcttttgtatttttttgtagagacggggtttcaccatgttgcccaagctggtctcaaactcctggactcaagcgatgcacccaccttgggttcccaaagtgctgggattacaggtgtgagccaccacgcctggcctaacttttaaaaaaatcattgccaacctgctaagtgttagacagtatgagtgtgccttcagagttgaacatctacttgcatgttccaccttggacacygtggtccaaggtggggagactctggctttgaatccagcttcacaggtcactggctgtgcaaccttgggtgctcaggtaacctttttggacttcggtttycccatgtgcatcgtggggctaataaggacacgcatctcttagaactgctgttaatcgtgcgattcttgtatggtgagcagtgtaggacagggctggtgttggcttgccaaggctctgggagccgctgcacgtccttttccaggagctggtggttttatccgttgtccattccctccgtgatggcggtggccttttcatctttctaatcccaaggacagtgccttgccagtgaggggtgggagaggcaaagctaaaagcagggaggcctcctccatggagaggaggggaaggaaggggtggccgagtgggagcggaggtggagaagctgtggggacggctggccgggcaggtgacaccaccacctctcaccgctcatccctctcctccctaaagaggtggaccatgatatcctggttccactttctttatgaatcctggctgaacatggcggggccacatgagcactgttccttccccgctctccctggcattctgtccacctggcacaccagccccttcatcgccacgcccagcagacgccccagttctcctccagctttgcagcctctgaccctgacgcactggcttccgtatctgcctgaggcctcctttccatctcgggacaccctggagggctccccggggaagtaatggggatgggacccacactcacctgccaggtggtggcagtgccagggggtaggtggagcagcctggggattgaggggaacaggctgtcctctacacaggtgccccagggatggggcgacgacccagtggggtggttgaaaaagtgaagggagcaccccagtctgcactccatcccatgaagtgtcagaagctgcttggttttgtttgcttcctcagtgtgtttgtctttagaagtgtgctaccggcaccatatggacatgggcctgattcacattctcttaaaataattttacaggcttatkttaggagagaaatttctggattccagaaaattgtttttgctctaaaaacataccccacattaatgtctatttggggggatggatggcagctgccctccaaacgtggggacacacagtgtccgagagtggagatgattttcctggtgaattgcccagcattttcctttcagttacttacttcagggtggttccttatttgccaatagatcttgtaaaagcccatttacattggttgtttccaaacttggccatgggttccccagtgcaacagtggatctgtcatttaaagccaarttaaaacttaacatgacatgcctctcagtgaccacaaatacagccctggccactactgccaggacccctttgagggctagtgacaagggttgccatcaggactgagaccacatgaagcgcacgggaggcatctgtgcagtgaccagactcaaggcaggagacagggacagggacttgggggacatttgggacccagggcagcaggctcttcaggtaagattgccttgggggcggggctgtataatgaaggtctccaaataaagcccatgcgaagtgtgcttgggaaacagcaagcctgttttggttggaaacaaggctttttgtaattagcggtgccctcagtgtttactctgcagagccctaggcactctggtccaggaagagttagtagcgtcctctgcatcccactggggatgtgtgacactcagagaaaccacaaggtggaggcgagagctgagatctgagcttgtcgctgcatctgtctgcctcacagctgggaggctcagccagtggcacttgctgtggggacagcccaggtgcaggaaggggccagcaagggagggcagcaggctgggctacagccaccaggggtggtatctccactgagagttacaggctttgagcaaatagagaacagttacagcatggaggaccctggggtaacacaggaccctgatggggacgcaccgcttcctcctgcctggaacrctggtggtcagagggtcccctccctcctggggactggactgtcctccgctgatgctcctccctctcaggccaggtgggaccgagagcggagagcacctgtgctctggattgagtacccgcctgtgggactgtggtggccgctagcgggcagggatgcctatttctcaggatgttgtgagaattcaacggcctgagaatttgccgaccctaaggtgcagatgcatgatgtaaagggcaaacgcctgtctttggcaacattcttgtcattctgggggccttgcgcctgaatagatgagattccttcctggaaccttctgggaccagcttggggccacagcaggctgcggctggtccttcctggacagcgctggcagggccctggcttgtgcactgctctttggggaccatggtcctagaccctggggacatgtgggtctgggtgaggtgaatctgcagctgcccscaccccacggcccctgcccgcagagactccttggtgcccatgggtccatgtttttaacaagcttaccagtgtttagtggccatttctcatatcaagtactgatgtttctttttttggacacggtctcggtctgttgcccaggctggagtgcaggggcaccatcacggctcaccatagcctcgacctccccggcttaagcaatcctccagtttcagcctctggagtagctgggaccacaggcatgtgccaccgtgcccggctattttttttttttttcctttggtagagacagggtctcactatcttgcctgggctggtctcgaactcctgggctcaagtgatcctcctgccctggcttccaaaagtgctgggatgacaggcgtgagctgctgcacctggccgcagtagtgatgtttcaacccccatttacttttgctgtctccgtgtgaggattcccctgatacatattcattccctagatatttaagtgcctttcaggggccaggacactagtcagtgattttttttctaccatctagatttaataaaaccacccaagtgactttaaaattttatcattttaggctgggcacagtggctcacacctgtaatcccagcactttgggaggccgaggcaggcggataatgaggtcaggagatcgagaccagccgaggcaagatagtgagaccctgtctctaccaaagaatacaaaaaatacaaaaaattagccgggtgtggtggcgggtgcctgtagtcccagctacttgggaggctgaggcaggagaatggcatgaacccgggagatggagcttgcattgagccgagattgcaccactgcactccagcctgggcgacagagtgagactccgtctcaaaaaaaaaaaaaaaaattaccattttagggccaggtatggtggctcatgcctgtaatcccaacactttgtgaggctgaggcaggtgggtcacttgaggtcaggaggtcgagaccagcctggacaacatggtgaaagcccatctttactaaaaaaatataaaattagccgggcatgatggcacatgcctgtaatcccagctacttgggaggctgaggcaggagaatcacttgaacccgggaggcagaggttgcagtgagccgagattgcaccattgcactcgagcctgggcggaaagagcgaaagtccatttcaaaaaaaaaaaagaaagaaaaagtaaaataaaattttattttcttaggctggtgcaatggttcatgcctctaatcccagcactttgggaggccaaggtgggtggatggcccgagccaggagtttgagaccagtctgggcaacatagtgaaaccttgtctctacaaaaaatacagaaatgaaccaagtgtggtggcgcacacctgtcatcccagctacttgggaggctgaggtacaagaatcacttgaacccggaaggcagaggttgcagtgagctgagattatgccactgcactccagcctgggcaacagagtgagaccctgtctcaaaacaaaaacaaaaaaaaaaaaaaagaaaaaaattttttaatgaactatttttttccccccaggatgaggtcttgctttgttacccatgctggagtgcagtggtgcgatcatggctcacagcaacctccatctcccgagttcaagctattctcctgcctcagcctcctgagtagctgggattgcaggtgcccgccaccacgcatggctaattttagtatttttagtagagatggggtttcaccacgttggccaggccggtctcaaactcctgacctcatgatttgcctgccttggcctcccaaagtgctgagattataggtgtgagccaccatgcccagccttaatgaactatttcataattacaaaatactaaattatttaagcagagtgtgatgaggtttgaaggaggtacacggagcctgtgcctgtggaatgttcctgaggtcaagaggaactgctgctgtgctgtccctggagtgggactggggctctgggatgggagactcacttttcactcaatggaagatccttttgccatctcaagacatacatggtacgtacagatgagaaatgaagattaataaaatggacatgtgtatacccaacagcagcttaaaaaataaaatcccaggccaggcgtggtggctcacacctgtaatcccagcactttgggaggccaaggcgggtggatcacctgaggtcaggagttggagaccagcctggccaacatggtgaaaccctgtctctactaaaaatacaaaaaatcagctgggcgtgatgacgtgcacctgtagacccagctactcaggaggcttaggcaggagaatcgtttgaacctgggaggcagaggttgcagtgagtccagcctggggaacagaatgagactccgtctcaaaaaaaaaaaaaaattaattaaaataaaataaaattccagctaggcacagtggctcacacctgtaatcctagcactttgggaggctgaggtggtggatcacctgaggtcaggagtttgagaccaacctggctaacatggcaaaaccctgtctctcctaaaaatgcaaaaattagctgaatgtaatggcctgcacctgtaatcccagctactctggaggctgaggcaggagaatggcttgaacccaggaggcagagactgcagtgaaccgagatcrcgccactgcactccagcctggatgacagagtgagtgagactctgtttcaaaaaatattaactaaaatcccccaccaggtgcagtgtgcacttctgtagtcccagctacttgggaggttgaggcaggagaatcgcttgaacacaggaggcagaggctgcagtgagccgagatcacgccactgcactccagcctggatgacagagtgagactctgtctcaaaaaaacaattaattaaataaaatcccctgccaggcgcaccactcactgctgtagtcccagcaactcgggaggctgaggtggggagatcgcttgaacccaggagttctgggctgtaatgtgctatgcagttcagttgtccacactaagttaggcatcaatatggtgacctcccaggagcaggggaccaccaggttgcctaaagaggggtgaacaggcctaagttgaaaacaaagcaggtcaaaactcccatgttgatcagtagtggcatcgtgcctataaatagccactgcactccagcctgggcagcatatttaaaaaaaaattaattaaaaaaaaataatcccccagaagtcgttgccaccccttcctgcccagggtcctcacttcctgtgctcttactcctaacacaggtgtcctttgtggaaggacaagcgatgtgcaccagtgttggccccagaggttacggactgtggggtgggggcttgcgttttctcccaaaagatgatctgcagttaggcattcatggcatttagaaattcaaaataaacaaaacccttggcaaatggccacttgttttgttttttttttgcccccgagacagagtctcactctgttgcctaggctggaatgcagtggcacgatgtcggctcactgcaatctccgtctcccaggttcgagtgattctcctggctcagccccctgaagtagctgggattacaggcatgcgccaccatgcctggctatttttttgtatttttagtagagacaggtgttttttggttttggggtttttttgagaacgagtctcactctgttgcccaggctggagtgcagtggcgtgatctcggcttactgcaacctccatctccagggttcaagcatttcttctgcctcagcctcccaagtagctgggactacaggcacgtgccaccacatctggctaattttgtatttttagtagagatggggtttcaccatattggccaggctggtcttgaactcctgaccttgtgatctgcctgccttggcctccgaaagtgctgggattacaagcatgagccaccgcgctggccaaatggccactttttgaagtgctttccctgtatgtgtataccatgttctctttatggactactatttagccttaaaaaaagacaagggaattctgtagtaggcaacaacatggatgtaccttgaagacattatgtgctcagtgaaataagccaggtatggacaaacactgcatgattctgcttacatgaggtatctagagaagtcaaattcatggaatcaaacatcaggatggtagctgccaggggcttggtggaggaggaaatgggaatttattaatccacaggcataaagtttcaggtaaggaagatgaacgagccctagagatctgctgtccattgtaccgagagtctacaatgttctgtccacttaaaatgtgttcaggacaaacagcaattaaagaaaaaaaaatgttgggccgggcacagtggctcaggcctgtaatcccagccctttggaaggccaaagcaggtggatcacttgaggtcaggagttggagaccggcctagccaacatggcgaaacctcttctctactaaaaatataaaaattagccagtcatggtgatgtgcacctgtaatccaaactactcaggaggctgaggcaggagaatcgcttgaacccaggaggtggaggttgcagtgagccaagatcacgccactgtactccagcctgagtgacagaacgagactctgtctcaaaaaaaaaaaaaaaagaaaaaaaggctgggcatggtggctcactgctgtaatctcagcactttgggaggctgcggcgggcagatcacgaggtcaggagatttagaccatcctggctaacatggtgaaacctcatctctactaaaaatacacacaaaaaaaattagccgggcgtggtggcacacgcctgtaatcccagctactcaggaggctgaggcttgaacccaggaggcggaggttgcastgagctgagattgtgccactgcactccagcctgggcaacagtgcgagactctgtcctcccctccccccsccaaaaaacccaaaatgttggccaggtacagtggctcacacctgtaatcccagcactttgggaggctgaggcagacagatcacttgaggccaggagtttgagaccagcctggccaacatggtgaaacaccatctctactaaaaatacaaaaaaattagctgggtgtggtggtgtgcacctgtagtcccagctactctggtggctgaggcaggagaattgcttgaacccagaaggcagggtttgcagtaagctgagatcacaccactgcactccagtctgagtgacagagcaagactctcaaaaaaaaaaaaaaaaacaaaatcggccaggcatggtggctcatgcctataatcccagcactttgggaagccgtggtgggtgggaggccaaggcgggtggatcatgtgaggtcaggagtttgagaccagcctggccaacatggtgaagccccatctctactaaaaatacaaaattagctgggcatggtggtgcatgcctgtaggcccagctactcaggaggctgaggcaggaaaattgcttgaacccaggaggtggaggctgcagtgagtcgaaatcatgccattgcactccagcctgggtgacagagtgagactgtctcaaaaaatcgcagtcaggtgtggtggctgatgcctgtaatcccagcactttgggaggctggggcggttagatcacttgaacccaggcgtttgagaccagcttgggtaacaaagtgagaccccatctctacaacaaaaaaattagccaggcgtggtggcatgggcctgtagtgtcagctacttgggaggctgagctgggaggattgcttgagcccaggaggtcaaggctgcagtgagctgtgtgaccatgccactgcactccggcctcggcaacagactgagaccttgtctcacacacaaaaaagtgatactgctttttttttttttttttttttgatacagagtctcgctctgtcacccaggctagagtgcattggtgctatgtcagttcactgcaacctctgcctcccaggttcaagtgattctcctgcctcagcctcccaagtagctgggattacaggcactcaccaccacgcctggctaatttttttttttttttttgagatggagtctcgctctgtcacccacgctggagtgcagtggtgcgatcttggctccctgcaacctccgccccccaggttcaaacgattctcccacctcagcctcctgagtagctgggattacaggtgcgctgtaatttttgtatttttagtagagacgggtttcaccatcttggccaggctggtcttgaactcctgacctcatgatccacccgcctgggcctcccaaagtgctgggattccaggcgtgagccaccgcgtccggccgcctggctaatttttgtattttcaatagagacggggtttcgccatgttgtccagactggtctcgagctcctgacctcaagtgatcctcctgcctcaccctcccaaagtgttgggattacaggcataagtcaccgcccctggctgatactacttattttaaaatgatgaacaaagtgaagggcagtttctgtagctctctacttgagtcacttggagcagggattctgaacgctagagacctgaatacccagtttgtgaataagtttcctgtctctctcttagctgcttcacttcatattcttagtatctttgttaaagggaagtccagggaaagaagagagaaatgaaagtttattaatttaagtctcattttagtaacaagaaacttagttgaaaatatcacagagattgaacatgagttcagtaagaagtgaagtcagaacgcttccttccatgaactggtgcaacatgcatggatttgaatgagctactgacaagttgtcacatgacatcctcgtgcaccgtgtgggacatgtggacaggagagcagaggtggaagtggtgctgggctcctggagggtggtggccgagctgatacctgtccccatgacctccccagggcatgtcagcaagtttcatggaagagatgccagatggaagagatggcagggttcagattcatgaagggcccagtagttcagggcaatagataagatctaataaaatgtactgtgttaacgctaaatgtgaggtcttcttgattctaagaaacccaagagaaaatttcaggattggcacaagatgacttaatagcagctagtaagaaaaagagtttaaggtttggggaaatcacccatcaggaatatccaatataggcagactttttcagaaattctttaacataatattggagaaagaaatggacttcatttagaagatggtgtgtgtgtgtgtgtgtgtgkatttacacgtgtatacctttgtacagaaatttcctccacaaaattcctgctagatgaagtcatctctgttgataaatgtgatgaactgttgattttgttaatgaaatcggattcagcttggtttctcttctcctgcagatgtgcttggtccagcagtattcccctgggaactgttctccaggcgctgcagagctcctctgtgctgtctgtatccacctgtggtctgtttccgggctctctttcatgtcacattgacctgtttttgtatcttatgccagtcttttttyttttatttatttatttatattattatttttttttgatggagcctcgctctgttgcccaggctggagtgcagtggtgcgatctcagctcactgcaagctccacctcctgagttcacgccattctcctgcctcagcctcccaagtagctgggactacaggtgcccaccaccacgccccactaattttttttgtatttttagtagagatggggtttcattgtgttagccaggatggtctccatctcctgacctcatgatccacccgccttggcctcccaaagtgctgggattacaggcatgagccactgcacccagactcagactctttgttgttgttgttgttgttttgtttttgtttttttttttttttgagacagagtctcactcattacctaggctaagtccagtggcacaatctctgctcattgcagcctcgaccccttgggctcaagcaatcctcccacttcagcctccctagtagctgggaccacagacacgtgacgccacacttggctaattgaaaaacactttttttgcgtagagacagggtctcactgttgcacaggctggtctcaaactcctgggctcaagcaatcctcctgccttggcctcccaaagtgctgggatgacaagtgtgagccactatgtccagcctttgccccacttcttgaaagatattttcactgaatgtaaaatctgagatatcagttattatctttcagaatcataattgtccctttctctgctgccttttgggctcttgttttacctgggagcttgttctgttgaacaggtcatttttccttcctctggacacttttaagacttttttcccctttatctttggtgttttgcagtttcattatttgtctagctgtggctttatttttatttatcctgctttaggactgttgggctttttaagtctgtggattagtagcttttccttaattctggagaatccacaatcatcaattattcacaaagcgcctctaccccattttcttcttgcctcaaccttctgaaatccaaataaatgtcatctctccctgcttcacatctcttagtttaagactcatatttccaccttcctcactgtttttttgttttttttttttttttgagacggactattgctctgttacccaaggctggagtgcagtggcgcaatctcagctcactgcaacctccgcctcccgggttcaagcaactctcctgcctcagcctcctgagtagctgagactacaggcagacaccaccacgcccggctaatttttgtatttttagtagagacggggtttcaccgtgttggccaggctggtctcgaactcctgaccttgtgatccgccccccgcccccccagccccggcctcccaaagtgctgggattacaggcgtgagccagcgcgcccggcctctcgctcttctttattcagcataatttattctgacgtatcttcagtgtaggtattctctttttattctcctattcctgttaaacccattgggctgaatgctgtttatttctagaatgtctacacctgtttttctgcaaggtcattttttttctcgtttgctgttggttacatatactctcaagctcatcggttccctccgtgagtacaggtaagtggaggagcctcatggtctgcctcaggtctttgagatgttgagtctctggatctggtcctgctgctggccttttctgtccttgctcatggggcattgtttctgtgaatgtgtggttacttttgactgcattactcattgtcctggaaaaatgactttgtgggaatttttcagayctaggrtaaagatgcttcctccaaactaggtttacrcttccttctgccaggtacctcagggcgctgtcagcctaaagccaatttaaactaaatccatcaactgtgagsttttggaatcttctcactggtgtgaatttgggccataagtcctgtgagggctgtcctatgatcactgctctgtggggtggggaccagccttagagttctcatcggaagcccggggtggctggatgggggcagatgttttcagggcaagagcggcttggctcgcctctctggtttctggtttccccagatggtgcctggcggctcctcactgtcttgtcagcccctggatgcctttaagaaaacatccttttattttgtcagcatttttggtacttctcagtgkgagggctggtccaagtatttggcttatcatagttttacaaaaagttggtttctatgaaatcttaagtcacctcttttttaaaaatgtaacttttagtcygggcrcggtggctcactcctgtaatcccagcactytgggaagccggggcaggcagatcacttgaggccaggaatttgagaccagcctggacaacatggtgaaaccccatctctactaaaaatacaaaaattagtcaggtgtagggccaggcgcagtggctcacgcctgtaatcccagcactttgggaggccaaggcaggtggatcaactcaggttgggagttygagaccagcctgaccaacatggagaaaccycgtctttactaaaaatacaaaattagctgggtgtggtggcgcatgcctgtaatcccagtgctcgtgaggctgagacaggagaatcacttgaaccygggaggtggaggttgyggtgagccaagatcgtgccattgcactccagcctgggcaataagagcgaaactctgtctcaaaaaaaaaaaaaaaaaaagaaaagaaaaagaaaaattaggtgtggtggcacgtgccagtagtcccagctactcaggaggctgaggcaggagaatcacttgaacccgggaggcggaggttgcagtgagcgcagatggtgccatcgcactccagcctgggcgacagagattccatctcaaaaaaataaaaaaaataaaaaatctaccttttatgttttttatttgaactatacatagtaagcagcgtggggtttttttgtttgtttgtttgttgttgttgttttttcttgagatggagtctcactctgtctccaggctggagtgcagtggtgcaatctcggctcactgcagcctccgcctcccgggttcaagtgattctcctgcttcagcctcccgagtagctggtactacaggcgcacgccaccacgcccagctaatatttgtatttttaatagagacggggttttcaccatgttggccaggatggtctcgaactcctgacctggcgatctgcccgcctcagcctcccaaagtgctgggattacagatgtgagccaccacacccagccttaatagtttttttgtctagttacactttttcttttagagaacttgaaacccattaatgcacatgtacatacataatccacacatatatgtatatgtatgtgtgtgtgtgtatatggcatatccatttatccacatactatacatacatgccttacactatagtttcctgaagcttacatcacaggcacagtcatgtccacattccagtaatgcttatcattccacgaccgatatggcttaatgtatgctttagttttcagaatatatcacttactcctacgaatcagtaaggaaaggaccagcagctaatagaaaatgtgacaaagatttgaaaaggaggaatcataaaaggtgcccacctgtatggtcaggttgaagcaaattaaagccacaatgagatgctgctgccttatacctgccaggcagcagaagtgttaaaatttgaccatatcaagttggcgggataaagatcagcagggactcatgttcgctgctggcaggatgaccttgtcaccggcacttgggaggtgctgctgtgtgcacgggcatctgctcctgggattgttccaacgaaacacctgcctgtgcggctcaggagaggtgacagcgacagcagcaccatttagtagccagcctgggagccgatacacatccacaccccgtcagtggctgcatgcagtgtatctgacgggacaccaggtgaagggggcccagctgcacatggggacagaggcagacttggctgcacgtcagcagagaagtctcacagcatcgtcggtgtcaagttcaaaacacggaacacgcagcagtgtggctcagggccacacacggggcacagccatcaggacaagcaaagaccaagaagcaccaagtccaagttaggcagcatctcaggccggggcaccaaggaagggcacagcagcgccgtggtgaccgggtcccagtaccatcctgggtggccrccaccggccgtttgtgtcttccgttcacacgattacaaacgctgcgttctgcccacacacatcttcagtcccagatgtgagaaggtgaccctctaatgcaggcgtgcctgcgcaggtggggggcagacgccgtcctgggtgtcatcccatggaagggcacaggacaggctgctgccggagcagaggtcacatggggtggggggcggtggggggtgcatctcaggaggagcaggtgtgaggayactgctggcgcttggctcttcttcccagccccgtgctctcgaatttggggaaacccttgctcttctgtttggcctgaaagaaaatccggtgtgcctgactctctgcaggccccttgtcacaggccaggctggggtggtgccaccaggaaaacttggcrcacgtcctgttgctgatgatggcagcatcagtcatggacttaaccttcttttgttaatgagaccttagaaatgtaaaaatgatacactcttctttaaaataattgtagtcagtacacataactcttaccatcttaaccatttctaagtgtacagttcagtgacattaaatatattcacatttttgtacagccatcgccaccctccaacctccagaattcttcatgttgcaaaactgaaacactgcacccatgaagcggggactcccctgcccctggcagctctttctgtctctgagtcccactactctaagtacctcatacaatatttgtcctttgtgactggcttacttcactgagcatagtgtcctcagggttcctccatgctgtagctgtgacaggagccccctcctgttaaargctggataacattccactgtatgcagacgccacattttgatcatgagaatgcccgtttgtggagggacacactgttgcttccccctcgtggctgttgtggataatgtcgctgtgagcatgggtgtgcagacatggctttgagaccctgttttcagttctcgtggatttatacccagcagtggaattgctggagcccatggtaattctatatttcgttttttgaggaattaccatactgtttcccatagtgcctccagcattttacatttttaccctcaatgcacaaggctccaattcctccacatcctcaccaacgcttattttccgtgtgtgcgcgttgatagtagccgtcctagagggtgtgtggtggtgtctcaacgtggtccttgtctgcctccctcaggatcagtgacatggagcaccttttcacgtgcttgtgggccatctgtatatcttcttcggagaaatgtttatataagtcctttgtccatttttaatcagattggggttgttttgttgagttgtaggagtttcttaaatatattctaataactatatagaatatagatatataggtcctttgtccattttttaatcagattgtgtttctttttgctgagttttttttaacatattctaacaactagaatatatagagaatatagatacataggtcctttatccattttcctttttttttttttttttgagatgtagtctcactctgtcgcccaggctggagtgcagtgatatggtctcggctcactgcaaccgctgcctcctgggttcaagcaattctgctgcctcggcctcccaagtagctgggactacaagcacccgccaccacgcccggctaattttttgtatttttagtagagacggggtttcgccatgttgactagggtggtctcgatctcctgacctagtgatccaccttcggcctcccataatgctgggattacaggcgtgagccaccacgccgggcccatacccggccctttatccattttttaacctgtttgtttgatttgctgagttgtagttgttttttttttttttttttacatattccaataactaggatatatagagaatatggatatatagagaatatgtatagagagaatatagaatatatgtattctagatattaacaccttatcaggtatatgatttaaaaatattttccctcattctctgggttgcctctgttgatagtatcctttgaagcacaaaagtttttatttatttatttagagacagggtttcactctgttgctcaggctggagtgcagttggacgatctcagctcacttgagcctcaacttcccaggctcaagccatcctcccacctcagctatcccaagtagctgggaccacaggcacagggaccacacccagctaattttgtgtatttttagttgagatgaggtattgctttgttgcccaggctggttttgagttcctgggctcaagtggtccacccacctcagcctcccaaagtgctgggaccacaggcgtgagcactgcaccgagccagaagttttgaatttttacgaagtctaatgtgtctgtttttcttttgctgcccatgcttttggtatcgtatccaagagatgattgccacatccaatgtcatgaagcttttcccctgtgtttccttctaagagttttatagtcttagctctcacatttaggtcttttattttgagttaatttgtatacggtgttaggtaagagtccaactttatatttttgcaggtggatatccagttgttgtgacaccatttgttgaaagactgtcctttccccattgaatggtcttgacaccctgttgaagatcatgtgaccatacataagggtttatttcaggactggaatttcttaaagattaaataatactggatccatcactcacattcctcaatgtcctggtgctctgcgtggtgaattcccggattcggggtggggtgcatccagccctgccaccgggcccactcaccgggcgtcttggttctgcctctcctttcatgtttccaaagccaaacctggtataagaagaatttgaatcaatgtttttctcaaattatttgcatgtaaaaggagttcattttttcacttccaactaaatgtaaagtggttaagcagtggcatggtgtcagtgttcattttgtctacaattgatactaaagagttggatcttggtcaggcgcagtggtgcttgtaatcccagcactttgggaggccaggcttggtggcgtgttcctgtaatcccagctactcagaggctgaggtagragaatcgcttgaacscaggaggaggaggttgcagcgagctgagattgcgccactgcactccagcctgggcaacagagygagactccatctcaaaaaaaaaaaaaaattctagtcctgccacccccccacccygygtgttgcttcacaacacatgaatcccatatgtacctrcttcacacgcatgttctctctgtaacccaccactttgtctgattggttggcaggttacgtttttctstcgtcccagctgtgtggacagtgccacacgccctcctggacaacgacggctcttgcgtgcattttccagtgttgcttttgtcagagaggccagcagagccacggttcttccagaaccagccctgagctgagtgaggagtgcccaggagagatggtgaaaatgacaaagtccaaaactttccaagcgtatctgccgaactgtcaccgaacgtacagctgtatccactgcagagcacacctggccaatcatgacgagctcatctccaaggcaagtggcttatgccaaaaaattgatggcacaatgattatctgtcattgtggtacctacatagtggaagaatatttaagcatcacatgacttcctgagtctgctgtgtcctgaacgtctagagccttctaggcagcattggtgagcgttttgtgcatggttaagtgtggctgtgccacgatctcagatgtgatcctggcatggtgggcggttttccagggccaggcagctggcactcccagggattacgaggggcaaggtgaatcacttgttactcacagcagaaagccagagaggactgaatgagcaaaagaagtctagaaaaatctgtggaaatggtttaataataagggtattaagacattttaaaaactcagcatggttaagaaggaaaggggttgctcagaaaaatgccccagagggtgtggctgcgtttgtcggdtgtgtaggagccctgggtgaagctctggctggtctctgtgcatagaacccatragcagccttgaagatgtaaacaagatsccctggcccctccttactgtgctgagctcctcattagcagtgtgtggcgttgatcatcaaccagttgtgaacatttaaacaggccaaacatcatggaggagctgatgctcagtcggaatgacagtgttctccacccatcctcaggtcatgacatccccccagcctcaggtcatgaactccccgcatcctcatacgtcatgaccaccgatcctcaggtcatgacctcccacatcctcacaggtcatgacctcccccatgctcaattcatgacttgcacccatcctcacggatcattacctccactcatccttataggtcatgacctccccccatcctcacaggccatgacctccccccatcctcaggtcatgacgtctccccatcttcacaggtcacgaccactttgggaacaaagtttgtcaggaagttgtgcctttcagaaatcttttcttctttttttaaataggtattttatttacttttattttttcttgtagagacagggttttaccatgttgccaaggctggtcttgtactcctggcctcaagcgatcctcctgccttggcctcccaaagtgctgggattataggtgtgagtcaccacgcccagccaggaatctcttaggtttcctgtttaactcaagagaagaacatttacctgcttgtattttcagtaggtaatagtgagaggctcctcatttctgttcatcatctgagatagaaactgttgaacgaggcagagtttctgctctctcattgcctctggggctcctgtgtgcactgggaagtgtgaggtgagaagtggaaggagccaggcaccccatttcctcggtgttttctgaggtaggcttagtgtgtaaaatgacatgaggtaatgagaggcggagctgctctgggcccctgggtaggggcagtgaagcttgtggccttgtggagccccgtgacacctgtgtgttggccatgacctaagcaggtgacctgagcactgagaggtggtcaatgtccggccccatgcatggttttgtttcggaagcatgccaggtgtgttccttgctacatggtcaaaaggaatttgagatgcttctgttgaacagcctggaggtcatcaatgagctgttttaaaaaytgtatcagctgggcgtggtggctcacccctgtaatcccagcactttgggagaccgaggtgggcggatcacttgaggtcaggagtttgagaccagaccagcctgaccaacatggagaaaccccgtctctactaaaaaaaatacaaaattagccgggtgtggtggcacatgcctgtaatcccagctacttgggaggctgaggcaggagaatcgtttgaacctgggaggcggaggttgcagtgagtcgagatcgcgccattgcactccagcctgggcaacaagagcgaaactctgtcttaaaaaaaaaaaaaaaaaaaaaaattgtatcaagaatagaagcctggctgggcttggtggcttacacctgtaatcccagaactttggaaggccaagatgggtggatcacttgaggtcaggagttcaagaccagcatggccaacatggtaaaacactgtctctattaataaagtacaaaaaaattagctgggcatggtggcacacacctgtaatcccagctatttgggagactgagacatgagaattgcttcaacctgggaggcagaggttgcagtgagctgagatcacaccactgcactccagcctgggtgacagagtaagactctgtctcaaaaaaaaaaaaaaaaaaaaaaggcagragcctgctcagaagtcatttggtgccaaatgagcatttcaggatgaaaaaaagtgctgagaactaagctctctgagcacacaggccaccaggaaggatcagacctcgtgcctccatgggtgatgggccgggcgaggtggcaagatgacgactagagtgagcttttctcccttccgtggtgattctgatgaggattcattgagaccatcgagaacacctgccacgcagaacagaatccagtacctgcgaggcgagaggcactgtcttcacagcctctaagtttgtatttgtcactaacaaggaatcccctggctcgagggagcctgttgctgctgtaggcagctctggttactagaaggctccatttagttagcaaactctgatctgtggtccaaatctgccrcaccacctgtttatgcaaagttttaatagatcacagctgtgctcatctgtttacagagtaattagaacagggaccatatgtcctccaaagcctaaactacttatctcctggccctaatttacaggaggagtttgctggcgccaactctgataagacagctctgaatctgaatcacagagctgctcttgtctctgagccaaaccctatttaaaaataaggactttcagagtaggtgagaattaggaaattcagtccagaatattgaagactgatgaggatgtgggaaaagtctataagatgattattagttaaactgaacatagaataatattcctaatcccagaatgccacttaagggaatactcatttttaagcctgaatgctgaggaaaaagagcctccccagatctcaacagcttaaaacacaggtttagttcatgctcaggtgagaagtctaccagggacaactgggggctcttgttttttgttgttgctgttgttgttgtttgagatggagccttgctttgtcgcccaggctagagtgcagtggtgccatctccactcactgcaacctctgtctcccgggttcaagcaagtcttctgtctcagccttctgagtagctgggactacaggtgtgcgccaccacaccaggctaattttttgtatttttagtagagggggtttcaccatgttgtccaggctggtctcgaactcctggcctcaagtgatcctcccactttggcctccgaaagtgctgggattataggcatgaggcactgtgccaggtccttttaattttttttaaattatataatattgcacataatcacattaaaataatgtgtatgtgtaaacgaggagacttgcttcttcctcctgccttgtccggctccattccttggagatgtcactgttagtagtttggcatctgttgtctttattttgttttaatagaaacacatttttcactttaaataaagggctcaaatgacactcactttacagctaacttttcctcacttagtattttatgacttttatgactatttttatttttatttatttatttatttatttttagacagggcttctcctgtcacccaggctggagtacaatggcataatctcagctcactgcaacctccacctctcgtgctcaagcgattctcctgcctcagcctcccaagtagctgggagtacaggctcacagccaccatgccctgctaatttttatattttttgtagggacagggttttgccatgttgcctagcctggtcttgaactcctgacctcaggtgatccacccaccctggcctctcaaagtgctgggattacagccatggtgcctagcctatgactgtttttccatatctgctcctaccttcccatcccctgcatgaggcccatatgcggatgcagttgcttactcacttatggatgagtacctgacttccaggttaaatttttttttcttttttttttttttgtgagacggagcctgactcggtagcccagtctggagtgcagtggcgcgatctyggctcactgcaacctctgcctcccgggtcccggttcaagcaattctcctgcctcagcctcctgagtagctgggattataggcacgcaccaccatgcccagctaatttttgtatttttagtagggacggggtttcaccatgttggccaggctggtcttgaactcctgaacttgtgatctgcctgcctcagccttgcaaagtactgggattacaggcatgaaccaccgcrcccagcctttcttaaaattttttttgaggcagagtttcactctagtcgcccaagctggagtgcaatggcgcgatcttggctcactgcaacctccccctcccaggttcaagcaattctcctgcctcagcttcctgagtagctgggaatacaggcaccctccaccatgcccagctaatttttatatttttatcagagacgggatttctccatgttggccaggcttgtcttaaaatcctgacctcaggtgatccacccacctcggccccccaaagtgctgggattacatgcgtgagccaccgcgcctggcctatttatgttttttagaggcaggttcttgctctgtcccccaggctggagtgcagtggtgtaatcatggctctcgaactcctgagctcaagcaatcctcctgcctcagcccgtttttgttgttgttgttgtttgttttcctaattatgaacactgtaacctgtgaccattcctgtcacatttccttatacactcaagctggtttgttgtttacagtaaattcttagaagtgggactgctgggtcctatagtgtgtgctttttccacttcgatattgtcaaatcgtgtttcagtcacattcctcatagccttttgcctttgttaggtcaaaaaccccaaaaaagggctgggcatggtggttcatgcctgccaatacaaaaccatctttgttttatacagaaatgttgctttcctgttttctttccaatgaaatttagatatgaaaatctgacagcgtacatcatgtatgacatatgcggtttcctttgtgggagtggtattgagcgagcatctcttaccagctcacctaagacatttttaaatgacagcctccattataaactgtaatgtaagccaggcgcagtggctcacgcctgcaatcccgtcacttggggaggccgaagcaggcagattacttcagtccaggagttcgaaaccagcctggccaacatggcgaaaccctatctctaaaatatcctatctctaaaaatacaaaaattagctgggcctagtggcacgtgcctgtagtcctagctactggagaggctgaggcaggagaattgcttgaaccctggaggcagaggctgcagtgagtccagatggtgccactgcactccagcctgagtracaaagtgacactccatctcaaaaccccaactccccccaaaatttttgatttggtttgcatttctttgattatgtttgaggtcgattgagacttgaggctggcactggagcaggcgttcccacctgtcccgtgagggcaaaggtcgtggggagtgaccaagtgcatcagggggtgcagatgccctattctggctctttcacgctcagccatcttagcatacgtgaatataccatgagctgtttctcagcttgttttattttcctggtgagatagatgtcactggaatggcctttctccaagtgaaaggccatcttgtgctatgacttttttttttttttttttttcgagacggggtttcactcttgttgcccaggctggagtgcagtggcgcaatcttggctcactgtagcctccacctcccgggtttaagtgattctcctattttagccacccaagtagctggggttactggtgcccgccaccacrcccagctaacttttgtatttttagtagagacagggtttcaccatgttggccaggctggtctcaaactcctgacctcaggtgatctgcccacctcagccttccaaagcgctgggattacaggcgtgagccgccatactcagccatgctgtgacttttaaaacatttcagtgggaaaatatggacacctccccctaccccctaatatctggcagcgtgagcrcatctgaactgctgcagaagaggcggcgaggagagcattttgaggatctgtgggttttcgggtagagaaaatcattcgtgatcccctctcagaactcctctaaggtaaagttgtccagacatatgaagctcaccatttaaaaactgatcttgccatgattcccaataatagtcacttgcagaatgttgacgcagcagaatcagccactcctgtctacaatgaaaaacagcytgcagctccgttaagtggctgttattagaagtggagttctggaggggggacgccggtgtctgctcccggtgacgcgtcccggcgcagctaacagccgcggggctggactcccctggttctgggcagcaccgcttcgttccagaaagcactcgcagccaatctcacgggaccttcttctttcagtcctttcaggggagccagggacgcgcctacctcttcaattccgtgtgagtaccctggttcagcccggggggagyggcacgggccctgggacggcctggatggcacctacacagtgccctgtgtagaatcacctgggtctttaggggtcctgaaagaacccaccatccccccsccgggagtttctgaaacgcgctaaggatcttgccccctagcctgtcccatcactgatctttcccattgatggtggtggcgggcagggctgggggagaggcacggcactgctctctgggagtttccctgttttgggggaactcttaggaggatggggtggggcccgctgagggggcagggcctggtcaggggcgggccgggcctgcagcgcagtggcccctctgtccccgcagggtgaacgtgggctgcggccctgcagaggagagggtccttctcaccgggctgcatgcggttgccgacatctactgcgagaactgcaagaccacgctcgggtggaaatacgtgagtgccacaaggggatgctcgtgccacaaggggatgtggcactaagttgccactgagccacacctccccgtgcagtgtggcccatggtaccagtcacagcactttcagaaaccccagttcctcagccgaggtgggaagtccagactccagtgaggcatggtctcaccactgccctccagcctgggtgacagtgataccccaacccaaaacaaaaaacaaaaacaccatgttttcaagccctgtttcttcctaagccaggctctctgcacccagcccgccctcggcccgctgagcagagcctggtgtgggaggaggccgaggaggctgcagggggctgcgggaggctgtgcccactgtcagggacaagtctagaagacctcagygccagacctgctggagtcagagacagagagctgccccatgagctctttaccccaaatccctctttctcagggaccttgaattgaaggttgcaatcgccacctcctctccagccttcacctctagctcccttctctctccaccacatggctgatctggcctcctcaggccctgcaccttcctgccccgcttccctcctctacgctgccctgaagtctctcttccaggctccactctctctgaccttcgtggccgagtcctcccctcccccaggccacctgagattccatggttttgaccccctggccatctgccttctgttggatgctcccatgccttccccagttgttgttgttgttkttttgtttgttttttgagatggtctcaaactcctgacctcaagtgatccacccacctcagcctcccaaagtgctgggattacaggcgtgagccaccgcgcccggcctgcctgcctttgttgaaggaggctttcccattctggctctggtgttcttcgggtccaggccacctgctctgcctctttcctgaattcctgatcatctctggtctcccagattcctcatgagttttggaaggccacagttcacaccatggaaacgggctccacaagactagcacgcatccctagcccttcccctggtcagtcagccccatacccatctgtgggccccacttccagaaacccgtgccttccctgcatggccaccacactgcattcccctctatggctgcacccgcttcctgctggcacagtccttcctgtgtctgccacacctggggctgccgcttgggtaggcaggatccatcttggtcatctgtgtccctagcaccaggccacacactcagcaaaacaaaatgatgaggatgtgtctgtgggagagatgttaactcctccccatgaaggaccttctccagatatcctgttttttgttgttgttttttgagacagggtcttggtcgatctcagctcattgcagctttgaccttctgggctgaagcagtcctcccacctcaacctcccaagtacctgggactacaggcacaccacacccagctaagtttttgatttttgtagaagaaaatcactgtgttgcgtargcttgtctcaaactcctggactcaagtcatcctccttccttggcctcccaaagtgctggaatgacaggtgtgcaccactgcgcccagcctccagatgtctttgacctgtttatgtcactctccctgtatttgccttcacgytagttatgcacggaattcctggagtgtagtcttttgcatctcttcaagcctcttaaattgtcccacatgtagtaaatgttcagtaaacagatctgcattcacactgtcctacaagtaatcccagcactttgggagcctgaggtggaaggatcacttgagtcctggaggtcaaggctgcagtgagctatgaccagaccattgcattccagcctgagtgacagagtgagaccttatctcaaaacaaacaaacaaatgaaaaaccttttagtatatgcgctgccgaagcgagcacatgaaaaacctttaacaacaaatgcaaagtaaacctacactgcctcaatggactcacctggaacagaccctcccagcgccggatgagtgcaccgctcagggaacatctgggtatatagttcatagtatagacttgggggggktttttgccaaaagagtgatgaaattgaaaagtgaaaccttctgtcctgaaacctttgtctcttctttttcaaggagcatgcctttgagagcagtcagaaatataaggaaggaaaattcatcattgagcttgctcatatgatcaaagacaatggctgggagtaatgtgcgaactttcccttctccttygaatgctgttttgtgaaagaaactgtgaatgtaatggaaacgtaggagcatctrgtgacagcctttcttgccctctgacctcaaaggctagctgcgcatagctcttgacactcycggccatctctgtgggtaaggtgtccctcggatctgtcctcttcgtgtacacagttgtttctgaaaattttcaatgagctttttctaacttctcaagttctagagaaagaattaaccaactgatgacttacctgcctagttaatatcttcctttcacctttgtcttcaatatagttgggctctgcttttttaaggttcagttgaaaaccaaactggggccgggtgcggtggctcacgcctgtaatcccagcactttgggaggccaagatgggtggatcacctgaggtcaggagttctagatcagcctggccaacatggtgaaaccccatctctactaaaaatacgaaaattagccgggcatggtggcgagtgcctgtaatcttagctactcaggaggctaaggcaggagaatcacttgaacctgggacacggaggttgcagtgagctaagatcatgccatcgcactccagcctgggggacaaaagtgagacatcgtctcaaaaaaaaaaaaaaaaagctgggtatggtggcgcatgcctttaatcccagctactcgggaggctgaggcacgagaatcacttgaacccaggaggcggaggttgcagtgagccaagatcgcgccactgcactccagcctggcaatagggcgagactccgtctcaatttaaaacaaaagagaaccagactgagtctctgaagaccacagggacagggtctctttagatagcaagtctcaccattcccttttttagagaaaaggtattgtagcccaccctccaccccgctgtttttcttaaatttgcagaacttcaaattggctattcctcttgcaaatgaacccttaaagtacagtgttatttaagaatcttccagaggcagtcaacagacttatacactaagggcatttttggtttttagcttgttcaaaaacagaggccagcacagatgacattttagatacactctaaattgagaatggtgtctagtggaacatgtttatttaagccagtagattccttatctagaaagcaggtgagctagcccttagagaaggctgtcccggggcccgcagaggtgcccttactgaggtgacagcctcacagggtctggtaccaggggttgtgccctcagcagtgacagcagcttaggtgtcaggcagttgctgagtggctggtccatgtctatagagtaacacactggaccgaggaaaagtcagatttcattttctaccctggatgtacttgaagaaaaagaattatttttgcatatgaaagaggccagaacccacaggaaaaacttcaaaacttgacatttgccagaatgtttaaaatttgttcagaaaaggttaaagcaacaagtttagcctttgtgcatgaagacgcctggcctgctagacgcgttgcccgtccctgcgtggtgctgtcccatgtcacttgaactgatagaggggcctgtgcaatctcctaaggcctgtgtttctgccatatattttattataaattacaatccactcatccacctgccctccaccaggagtgggcaccccataagggtttaggccactttgcagaggatggaggtcaaaaaccactcccagataagtttggttttcaacatttagtaacttgtctcagggcagagggcaggcagggggaccgaggggcagcagataggagagcactgagcccggatagttctcagcctggcaagtggctctgaagctgccttcagacaaggctagtctaggggcaagagtgcgagctggctgacaataagaacgtggccacctgcccagcttcacacctcccccgacttcagcccttcctaaacccagacctgcggtccaggcaggcactgggctgtgcccactcgagctcactgcccacacacagcatgcctttgggtgccatctctttgcccaagcctggaagccttggcaggtgggaaatgccgctgccctggtgggcatggcactgagatgcatccactcagcaggagtgacagaggcagaagttcctttaaagcacatcttccacttaggaaaggaaggaaatctttgtactgtcttggaagcctccacatccggctatggccctgcaagctgctttatccctgcgctagtctcccccgagggtttaggctggcccagcacatcctgtcctcctgagctcgcgtgcagccacccagagcgcaggggtcactgcacgctgcagggctcttgctgccatggtctcaagcctgaagaggctccgcccacaagctggcccatgaagttagcaatgcctgtggcttcagtcaattgtcttgagactgtgaagaggctgaaagacaccttcccgggtggaagaaggagttcactgaaaacttatcttaaactgacccttccctttgagtgagtcttcattcctctcccatgtgggaacccagcctccgatgccccggggactaggggaaacagttggaggttcgtgccgtccccagcctgccacgggtgcgaggacagccaagtcctgagtgactcaagatgcttcacttacatggaagaaacttctaaaactctaccgagtggtttttgtatatactaaagttctatttagagcttttctgttttgggcaagttcgctgctccttctatttgggcactttggtttttgtactgtcttttgtgacggcattgattgaacattttttactagtagtcttatgacttttgtatttttttttttttttgtaatttataccaacaacacttttatcactttttttttgttgggcttctgcaaaatacaagctcatttttaaaccaaatgaacagaccatgagctggcttcaggggaagtgctattcacaggaccatatccaccaccctcttaaattcctaaacaatatcatctaggacttctatttaagttatttaaaataaatcttccttgagagccttgggaggtgatgtcagggttataaatggcacagtgcatttgctgtaggaatgtggtttggcattgttttatacacacagtattttttataccttaatgcttattcttgatggcatctgtcagatattagaattgaaaataagaatcttcccaaaatcctttaatttacctgatgccctcatcaggtcgttaaaaattcaaatggttttaatagctaaaaaactacaaattaagctctaaaacaaacaaactacagaaatgtaaaccttcatttgccaaaggtccttggtggcctgtcccctgccctgggagcagatggccctgaagcccttccctcactgtgcaggccaccgggtgaggctggacggtcacccatggtggcttcactgcaaggagcaggactgccgagctcaagcacggggccttcagcttcccctgtcctctggccacaccgccagcccttggtccttatctgtgtgaggtttacaaataaagcttctgatgtcaaatgtttaaatcgtgccctcagtggacgaggccatgtcctgatgcagaaggctgagcccaggctctctgtggcgccgctgagagcagagggctgtcttggggtcttcgagctctggagccaaggatggcctggtcctacttctctgcccccaccaatgggggacttgaatgtggccagagaatacagtcagtcagggccagccagggtgtctgtcagggtgggcacagggtcctctccaaacctgcttctccctccctggtcaggccttcatccccaccacccgcacctgtaccctggacgctggctcagaggcctacaggtgtgtggacacctgggcagtcactgtgtcctactgtgcccctcctctgcaggcccagcttggtgtctgagcctcttacaagccagttactgccagggctgcaccaggccttgcggaggacagtgcctggcgggagggatggagggcgtcaaaagtcactctagagcccaggggcccgaccaatggtcacagacagggatgacaggctgcagagggatgggctggagaagagaaggagccagccatggcgcagttcttgttcttagcatgatgaagggccacagattggtgtgcagcagggtgacgaggggcagacatacctctagtggtcatcaggcagcctgtggcagtggatggggtgaggcagagatgcagatgaggcgccacccagcatccagggagacaaagggctcaggcctgcagcttcagcatcagtgattgatgagaaaaggaagggcagaggtacagcctgcaagttgctgacaggttcaagatttggggcaacaaaaatgagaaaaccaagaacaaggcctaagttagggcttagtgtgaagaactagaagtggggggtggcctgagggcaacagggagcccaagaggcaagtgtcaggcaaggagagtccatgacatgagaacactgaccactggcctgggctgaagacgaagaaaaagccagccaggggcacatttaacagaaaaatgggggttgagggaggggtctttctttaagggctgctgatgcagccggcccaaggccatcagagtcagtgactgacaggaggagcagagtcttggagcccagtggccgggcctgagagcagcaaggccacttcagcaggagggcggggagagggacatccacttgttctcacagcaggagacactggcctcaacccagtgtgggtcccctcaagattctcacaggggcacagagacgccaggcaggcttgagatgaagcccaggtggttcacagccagagcaggtgagcagggccctgagagctcaggcagggcacggcaggaaactcaatgctgccgtccaacaccagccttcagaagcccctgaagttttgtcaaaacagaccgagaagcccaccctgcagaggcttaggctcagtaagtctggggtctgaaaacttgtcccaggtaatggcgttggtcaggggaccacactggttgtataaataggctgtccctgagaagatgacagaagtaggggtaagaaaaccagacatatacagctggatgtagtggtgcacggctgtagtcccagctacttgcgaggctgaggcaggaggattgcttgagcccaggaggtcgaggctgcagtgagccatgatcacaccactgcactggagcctgggcaacagagcaagaccctgtcttaaagaggaaaccacaatctggagacacagtccttcctcactaacctggcctgcctactagaggagaggcctgaggcaccagcctgggtgtagggcaggccttgtgcttgaaggtcccagcagtgggctctggctgggccaggtcctggaaacagggccaaggcccttggcaacaggttaagggatgggaaggctgtgggctcccaggggccaggaaaggggatgcaggcagcaggcaagcaatttattggctggcagcagagggcaggctagaaaggctggaaatggagatgtggacatgggcccccagccctgcaaccccaccaaggtccacagcggccaacctgctgctaccaggagctgaagtccccaaaaccccgactgggcttcttcttggacatggggacagtggcactggttgagggctcttcctctgctgctcgcttcctgggaagagaagaagccgctgggagcccacaccctccctcagcccctcctgacttgtctgtgtctccatacagccctcccggtgtaggcccaacccctcccacctgctgctcccacatccccctgaatttgatctcttccacccacagaggccccggccaggccttcagaggcagtccctcggctgcagaggccacacagcacaagcccacggccgggaccagtgcccatagcttgcttgcccctctgggtctgaccctcagacctcagtcagccctaggaaacaccatgggaaacagggaggccagccccgcggcactcacgtggctgctgggttgatgtacttgcccacgccctggcggaaggtctgggggccctggctccctgcctggggctggctgctcttcactttggtctccggggctaccttgagctgtgtcttccgctcctgcgcaatctgtggcacaacagggcgctggctaaccggcagcacctcgggcaggacagatgctaggcttggggtggaaaagtgcactagcccagaccctcctaggtggtggcatcgtgccccctcacctgggcatcggcctcctcataggggtccacgaacactgtagtggcatcaatgcggatctcctcctagcagcaaagggggctcagtgcacggcaggtcctccccctgcctgcctggcccccagccgccacgccccacctccctgggcacagaccttagggcggtcagttttggggtcactctccacattctccatggctgtcagtacgtcaaagcccccaacaaccctgcagcagggagacagaggtgggtctgcgtgtgctcaaggagggcacccccacggctgagccccaaggcacgtgggaagaggggttgagagccccgaggctggcctggtggtccttgggcagcagccaggaaggcgatgagagggagtggcaagggcggggtcggctgaccatggccctgggcatatccagctgggtttttttctgtttttgttttttttt

SEQ ID NO: 97977 - DNA, 13960 bp, Homo sapiens
aagggtcgagggaccgtgctggagacccaccagtgtgaggccacctacgtcttgtacacatcctccctgggcaacttcccctcagcaaagtccagggactggagagtcctgctcgaggcagctggattcaagggagctagacctaggaggcaaggccccggctgggcttgggctgctgtccacaagggacgggactttccacccccatgtaggagcgtctctagattcacatacaaacgttagaaaaaatacccagcataaaaaatagcctttatttatctgtgacaacacctggtaatagctaggccaggattcatgggcccccatcagcttgacccctgcccaggaggtttccacagtgcagggcaagagaccttgaccttgagcacctgttagtgacagtggctgctaggagtggtgggtcaaggagcccttctcctgcaaactcatgcccggtcctacttttgaggaggtcacctctggacacagtgaggcgggagatgaagaggcaactggagagagctcagggagaaggtagcaggaagagcgggggtagggggaggaaagtggaggtgtgacagggcccctgaggtggccctggctgcaggccacctccaccacaatccctggcgtgggcagggtgaggtgcaggccctgccagggctgggccctctggctggagctcagggaaacaggtgggttttgtaatttgggatctgagtcaggtgcctcctccctggagtggagtgaggggctggggacattgggcttctccgtgggtgtcaccttgagtttgaatctggtggccacctgggcactagacatggagggggagcctcctctgtccttgcgttttctctgaagcatcttggggctggagactgtggggcggggggaagcatagggctgcccgccattggtgggtttagctggctcagagcccagaggcggcagatctgaggtgggctccaagctggtggggaacagaggacggccgtcgcggcagtgggcgccacggagcttatccacagcctggctgaccacgctttgcagggcagggaagaggcggtggtcagccaggaagttcagcgtgcgatggggctcacggagcggacagtagccaggcaggtcgagggactccagctggctcagtaatgacttgatctccttattgaactctcgcttgcggaagattggctcctgttctccaggcctcggctctgatgcttcaggcacgccagagcttgagcccagcagccctgagaaccaggacaagggctgctcctgtgtccactgaaagctggtctggctacccagcgaatcccacagcagggagtccctctgggagcaggactgactgaggcctttctgcagaaagagggtgactctgtgaagtgttcaggagcagccaagccagggctgaccctagccctgggctctccatgggagtccaccccacccagccatggccctggctctcaccccttccctctccagctgtagcagccgcttgaggttcttctccagcaggagtttgtccctcacaggtggcaatgagccttgggcacctaggtcactgtcccggctgtgggagcccagacagccggccatgaggctgctatggcagttggacatggagctggagctggatgggtagttgttggggtgtccagtgcagagggtcggccgtacacggtgccggtgtacggtgctgaggctgggccgggcatgtgcccgccgtccaccacttggcacctccactgggtcctgcacctccacaagcggcaccccagcctccgtcttcatggcagccatgcgctcagtcgccttctccaccactgtctccaggctgtccaggacctggctctcagttaggaaatccagaaagtggccaaagggctgagggtgcctcttgtttcggcgttggccctggagtgctgagctgccacatgtggatggtgggtgtggcacacggcccggcttgcaggctggccgcatttctgggaccagtggcttcttgggcagctgcacctgagcagacaggtatgtcacagggggcaggggtgccctacaggtgaagggttccctggggtaacactaggacctgggtgggagtgagtagtggaaggagctgcattttggagtctggaagccctgggtttggaccctggctctgccacctacagcctgatgccagtgtgcaagatggcccctcttgaggtccaatgtcctcatctgcaaagtggaggtctattcagggtcaccccgaagctttcctaacacctacatttcacacacacaagtcctggctaaggagtctgcaagcctgcttctgccctgacacgtggcaggatgagcaatcatgaatctctcggagtctccctccagctcctcatctgtccatgcagcaggccatccctgtatccatggcagggctgcaaacaacatctgaggtcttgagtgcagacaacacctgaggtcttgagccctgtgctacccgggcctgtttctccaacttgagccataggcacctagtcaactccatgctcccactctagggtcccagtccacccaagcaccttctgggtcgctggaagtcaggaggaaacaaggaatgaaattgagtgtgacaggggcaagcagtgggggacataggagaagtcaaggcaataaggacttcactaagaggcccagagaagtcaatagacaatgagaaatgggggttgtggtcttgggtgccagggttggtggggaacatgttgtggcctcaagggtcggcgccctgctgggcacacttacccgtgcactgcacatggagtggctggcctcgtcatcggccaggtaacccgagtggtggcggcacctggccatgtggtcacctggcaggtgaccgggcctgctgcccacctctctcttcagctgcgcattcctctctgcgtggggtggggagacaacctgagggtctccaataggtccacgcatctgtggccctggagtctgcgggtccctcgctccccgcaccccgcctccttcatgcatccagcccttcctctgctccatggcccccatgcgtctgcaggcaggcagtttccagagtcatcggggtggaatcgctgaggacaatcctgtctccgatcatctttggatctgcgtgtgctcgacccgccctcctcccaaaccctgggcaacctggctttcaccccagcccagaatcaacagactcaccagaaacaccgccttgctccgcacaggccagtacagtctgcgccctcactggagcagctgcacagtgcgaggaagtcggctggcggcctccacttgcttatttgcataccacatcctcattggttcttaccgaggagctcgtccacttccctctccgacacaatggttgggggcggggcccacattggccccacctccaattctctgggctctgccctcccacactcgcctgggagccgcaggctgaggatgctggtgcccacgctccccgctgccgggaggaccccccacccaccaccgaagctggggctaggctctttgatctgctcctgccccgaggggagcctaaaagccaaagccacgtcttccaccggtggcacaagcaccttcctcgtgtcctccttggttgctgcgcagccctgggcctcctgctcctgttcgtttccaggggcctctgcccttcccgcggtgtgcacagccccaggttctgccttgagacctctcccctctgcagtggaaagagtgccggctctaagtcacagacctagcttcagttcctggctctgctctttcctgccaatgtgactcaacctctcagcattagtcccacactgtaaatgggcttgagtgttcttccaatatgggagtatgggattcaataaaatctccctacagcacacccagtaacccagtggagccttgtgtattctttaattaattaatttatttatttggagacgggagtctcgctcagtcgcccaggctggagtgcagtggcgcaatctcggctgactgcaagctccgcctcccgtgttcacgccattctcctgcctcagcctcccgagcagctgggattacaggggcccgccaccacgcccggctaatttttttgtagttttagtagagatggggtttcaccgtgttagctaggatggtctcgattccctgatcttgtgatccgcctgccttggcctcccaaagtgctgggattacagacctgagccaccgcgcccagcggagccttgtatattcttacctcctctccctccctccttttcccctttgctcagtaataccccaccatggtgtcacttcttccaaaaaccttttactgtgaattctgccacgccctacgcaattcacagtaaaccccattccagactctaccataccatgttgctacttatttttctatcagatggtgcttctttggggccagaacagaggcaagtcacccttaatctctaatactttcagtgtctggcaccaagtaggtgctcaataaatgtcagtctcctccttcccacctgcagaccctcgggacctctgacctttccaagatcagcttccagtggagaacggtggttggttgaggtctgacaattcaccagtcactataaacacatcagtccttatgccaagagcatggctgaaggactctatgaggctttcaatcctcacatgcctcacgaaatattgttcctctcaagctctgctctgtcctctcagctctggctacccactaggtcagggacagagaggacatagcaggcctgggtgctggccccgaggtgtgaggttcagtcttagctccactactcctggcaggaccacactttcgctctctgaaccccagtttcctcatctgtgaaacaggaatgacattaccaatttcatagcccggacacaaataccacactttccatgggaaaaatcaagactgtcacattgcaatggaaactgtggctgccaaccataatgactatttatacagtcatgggtaaggaaagcttttctggaccaaagagaaaacagtgaagttatgaatgtaaaagctgtagcctggcagagagctcaagatggaaactggagataatgttttctcaaatgaagccttagtgtatatgctttctttcattttcttagtgtctagagctcaagaaaaaaaaaaaatcaacaaatcaagaaaatgcctgctcttagaaaaatctgcaaaagatcaataggcaatttgaaaaagaataaaaatagctaataatatgaaaattttcattcgcactgctaagaaactactagaatgtgataacattgatataatcatctttatgttctcaaaacaacacacaaaaaagttgggttggggagaaagggagttgggtgtgtttatttgcttagagaaaacactggaaggacacaacccagaaagtttacaatggcaatctctgggaagggtaggagattcttttttttttttttttttttttttgagacggagtctcgctctatcgcccaggctagagtgcagtggtgcgatctcggctcaccacaacctccgcctcccgggttcaagccacgctcctgcctcagcctcccgagtagctgggattacaggcgcgtgccaccactcccggctaatttttgtatttttaatagagacggggtttccccatgttggccaggctggccttgaactcctgacctcgtgatccacccgcctcggcctcccaaagtgttgggattacaggcgtgagccactgcgcccggcttccttttgatattttacatattaaatatcacttttgcagtcaaggaaagttccgcattgcaatgaatccatcactggtctggttagcgcgggagcagttgccgggtccttgcaggggcacgccggaccgctaggtggcgagaacaaaggcgaagtgcagccgcacctgggcgtgtgcgtcggggcggggcccgggcagcgtccgggggcggggcctgggctgtccggcccactcccctgggagcgcgagcggtggacccaggcggccatgtcccgccctcgcatgcgcctggtggtcaccgcggacgactttggttactgcccgcgacgcgatgagggtatcgtggaggcctttctggccggggcygtgaccagcgtgtccctgctggtcaacggtgcggccacggagagcgcggcggagctggcccgcaggtgaggggagggcctctagcagggcggcgatcggcttggggcgcgcggctccgcggccgctagtgctccagctcgcgctccgccctcaggcacagcatccccacgggcctccacgccaacctgtccgagggccgccccgtgggtccggcccgccgtggcgcctcatcgctgctcggcccggaaggcttcttccttggcaagatgggattccgggaggcggtggcggccggagacgtggatttgcctcaggtgcggagccgcagctacaggaggatgctcgcgaggayccccagagctccgcccggagggtactgtgaggccgttaggagctggcggtggatgacttccgcattcaaacactggagccatcacayggaagcacgaggagggtatcctcggcagctactcccggtcgctcaaggtgtctctcgctcgccctctaggtgcgggaggagctcgaggcccaactaagctgcttccgggagctgctgggcagggcccccacgcacgcggacgggcaccagcacgtgcacgtgctcccaggtgcgtggttagtgatcccagtttggagggcgttactcccaggcggggctgggggagtaggggaagttcgatgcccccaggtgaaaggacgtgctcctccctgacccgctccgcccgcaggcgtgtgccaggtgttcgccgaggcgctgcaggcctatggggtgcgctttacgcgactgccgctggagcgcggtgtgggtggctgcacttggctggaggcccccgcgcgtgccttcgcctgcgccgtggagcgcgacgcccgggccgccgtgggccccttctyccgccacggcctgcggtgaggctccccgccccgtctcctaccatagctgcctcygtccctccgcactggctgttcacctggctagctgtgtccgtttctcaacccggaagcgagtctggcgtcgaccgctgccgccaccccagttaccccctcccaccccgccgtcccttccctagcctacctagcccttggccatggcccggcctggkcccacctctgatgtcccgccccccacaggtggacagacgccttcgtgggcctgagcacttgcggccggcacatgtccgctcaccgcgtgtccggggccctggcgcgggtcctggaaggtaccctagcgggccacaccctgacagccgagctgatggcgcaccccggctaccccagtgtgcctcccaccggcggctgcggtgaaggccccgacrctttctcttgctcttgggagcggctgcatgagctgcgcgtcctcaccgcgcccacgctgcgggcccagcttgcccaggatggcgtgcagctttgcgccctcgacgacctggactccaagaggccaggggaggaggtcccctgtgagcccactctggaacccttcctggaaccctccctactctgaccccctacagacaaccaagcactaatccccttagtaccaagaaaggggagccaggatttagtcctggcccagcccagagctgggacctggagcacgatctgttgacttccctgggtaggacactgccacctctgggctcaggtcctcatgcctccaaatggcatctagagtttgagcagccttcttggctgcaggcaggcctagcctgtggcagcgggctagggcccgcagagcatttggtgcccctccatgttgcaatgcaaacaccttcaccmctggggcagtggggagagatggctatattaataaaataacgtgtgtctttcaaacttgggtggtttatcagctgtgcccaggagaccctcagagaaacaagcacggacaaagagcagctccctcttggctcaaaccactccaggaaatggcccattctccattctggttttgttcatgctgcaattttctttattcctttttagggtgggagtgggagattgtcctcaccaggctgctttggaagaggcataatactataatctcagtattgatttaagaagtcacctgtaggctgagtgtggtggctcacacctgtaatcccagcactttgggaggccgaggcgggcagatcacctgaggtcaggagtgcgagaccagtctgaccaacatggagaaaccccatctctactaaaaatacaaaattagctgggcattggtggtgcatgtctgtaatcccagctactggagaggctgaggcaggagaatcgcttgaacccgggaggcggaggttgtggtgagccgaggtcgcgcccctgcactccagcctgggtaacgagcgaaattccatctcaaaaacaaaagtcatctgtttagatgtaagccattctacgggataggcgtgaggagaccctgcaaccctgtgggaatacatttaaatttttctaggaggagcagtcttcccgggaaatgggataccatggttcctaacttctggcaatgtagggatgccctgtggactggggccgcatgtggcttagctgaaagctcctgaggtgcaggagcagatggggaaggcagtgcgagtcctctagagcacagagtccttctgcaccactccgcaggatggaaaggcagatggaataccatgtggtccttgtctcatttcatgaaatagcatctatgaggcaggcaccgatgtccccattttacaggggtagaggcaggagtggcagagcagggctttgaaactactcattcatttatttaatgtgcactgggccctagcctgggccaaacatggaatcaggggccaagagagctctcatccagcctaggcagcttggagagacgtgtggctttctgaagggtgagtgtgggatgtcgctcctccttcctgcttctacccactcatggccccatccccttgactgtggcttcagtccctttttctggctccacactcgtcttccatcttgaccttcactagacttggactctcccatctgcagcacttttcctgctttcttgcacccatgcttgtgagctggaatcactgtacagttgctcctcctgctgcctagcctccacctcctcgcctcagcctgctgagatctggccacactcctgcaggctgctggctaaggctgggagaggggtggcctgaagttagccggggatacagacgtagctcccttgaggggcttctgttatggaagtgttctgagaggaggaggcagctggttgtgcagctttaggctcaggagaggtgtgggtgggcaggagagacctgggggtctgcacagatgctatatgagtggctactgtcactcagggagggaaggagggatgagcagagtcgacagcagccctggggaccgtgagactttttttttctttttaaagacaggatttcatcctgtcacccaggctggagtacagtggcacaatcacgtctctgcagttctccacctccccaggctcaggtgatcatcccaccatggcctcctgaggagctgggagcacaggcatgcctggttcatttttgtattttttgtagagatggggttttggcatgttgcccatgctggtctcaaactgctgggctcaagagatctggtcaccttggcctttcctaaagtgttggaattaacaggcatcagccacagcagccggctgaccatgagcatttgagtgaagtgaagccaggcacagtggctcacacctatcatcccagcactttgggaggctgaagtgggaggatcacttgagctctggagttccagaccagcctagacaacatactaagaccttatttctgttatttaaaaaagaaaaaataatggctgggcatagtggctcacgcctgtaattccagcactttgggaggctgagtcgggaggaaggcttgaggctagcagattgagaccagactgtgtaacatgccaaaaccctgtctctataaaaaatacaaaaattagccgggtgtagtgacacaagcctgtagttccatctactcaggaggcagagataggaggatcgactcagcctgggaggtagaggctgcagggagcagtgatcatgccactgcactctagcctgggtgacagagtgagcctgactcaaaaaaaaaaaaaaaaaaaaaaactgaagtgagggggcatagactggtaggataatcaggcccacctgattataatgaggcccatctcacgaggaggtgaaagtgataaggacctgttggggtggtgactggtgggccacaggggctgtgggggcagcaacagtgtcttagccaagcggttcactgttatccgcccactcggcattcgtgtctggagggtccactctgtgctaggccagggctggagctgacatggcctggtctgcaaggagctcccagtctggtacatacagggacagtcatccagtgtcatccagtgacacacagaggaagatgtaggagaaacccacggcaacatgtggagccacaggggggtttctgaacctggccagcaccgggtggggaatgctctctggaagtgacttccttcccaaggcctcagttatcgcctctgcacggtggtcctttctactctgatcctctgaggcctccagggttccctaggggccctctatgaacaagaacacgttccaataatctgggaaatggccacttaccaggcatggaccaggctaggcactgcactgcactgggagcaatggtaccctcagctcccctctgttctgggttggtgcccggttcccccatgccatatccaggaagcagagagagaaggaagagccaggcaggacagggtgggaaatgctgagagcagctctggcttctttcagggctgggttagatggcaccaaatgaaaggagaagcagcaaggggcagcaggtgacagaagtcaggctgcagcgggtacaggagtgatgaaatggatgcttatttcatgctgaacaattaatagtgaacaaggccaaaaatggtggctggtggctgtagggaagaggaagttgacagaggggcttaaaggtctctggctctggggagggtggtaactggctgtttctgggctcagagggaccctgtgggaagaaatatgccaaatggtggaatgcaacaggctctgcagtcagaatgtgaacaaaaacaggccaggggtcttggttgtctttaaaagcagggataaggatgccacagggctctcctgagactcagagggtaaagtgctaggtatgttaaaggctagtaaaatgacaccccaagaagtttccttccccaagacctgcagatccagctgaacagtgcaggcctagtctcagctggtgtcaaattccaggcagggaaggcctagccaaaaaagtcctgggtctggctgagcccttgctgagttagcaccactgccgcagcaccctggcagtgggctgtactggggactcagagtgtttctggctggcaccattcatggacatggcccagctccacccacaggcacacccttatcaattctgtgacctcttgggaccgcaggtttgcctcttctaaacatggattgttaacactcccaggaggctccaggatgacccacgcatgtaagtgatgcacccacactttagtccctgtcccctcaacgagacgcccaagagcgccctctgcaggccccgactgtctgaagtctccggctttcttgctgattatacctcatctccttccctctagggaggcaggaacacttctatgtacctcttttggagaggctgggaatggggagagagatcagaagccccaggacctgggccccagccagccctcccatctccaagagcataggcccctggcactgcccgctcccaggaaggaagaaacccacacgactaaccagtgtctgagagcatttttattacgggcagcagaacgggatcgcagcatcttagaaagcctattctctgccgtggtggggagtagggagcagagggaaggacccagcacacttcaagaaaccaggcgggtgtgaattcctgagtgagcttggggcagcagtgggtggctgctccacagctcgcccctcctccagaggacccagctttttggttttggagcagccagggctgttcgccagcttgctcagagcctaccctgaaggcatggctggcaggagcaagccgcccaggcccaaaggagagacacccactggctcgaaagccaagcctctgctgacggggccaaccctggggtgccagtgccagggctgagagtccctgaggggctgccggcacacaggtatcctcccgtgatgagcagagtgcagtgaggggttgacaggcaggcagagctacgttggcagaaatacgaagcaatgggacagtttccaagaatggcaacatttctggatccagagaagcaacaagaacaaatggtggcttgtttggatagctgacagaatttggcattttattacaaactggagtgtgagtgaaataaaatccatcatcacttttctgctaatgaagacagatgtggaaacgccagcccggtgcccttgccatcccgggcacaagggagtctccagaaacctgcccttggcgtacctaggacaaaagaagccgagttcgtgtacacaccgcaggggccatgcgcctgaacaatgttaggctgccgaacctgcccatcactccccacttctgcacagaccagaccaagctgtcttacacgcctgtaggccccggaaagatctcaagttatagaattaaaattaaaacaaaaagcaaagtttaagtcatcttctccacaggatctagtcccccccaagagccaagaagggaagccgccagtggcagaagcggggttggtgacacacggcatttggatcgtcggcttccttggggtgtcagagcgacatggattctctactagtgcggggacaatcccatttgccttgaaaagacattaatattcaaatctttacaagtttatctgacgataaattctaaggtcaatttttatttctacaaaaaaaggcagtcaaaacaatataaaacacattgaaaggatattactgagtgagcttcaagtggagcttgactctgcaaaggctgtgagtccgaagggagaggaagtccgtcttgttcccgggctgggctggctgctctggaggagggggtcagcaggggcccaggcgaccccagactggtgctttaaatagccgagtcctgctaattccaatcctacaaagggtcaaagtgtgccgagggagggctgtggcagggccactgcacggaggaagtggagagcaagctccgtggcacattcggatgaagctcggtgacagatgagctaggagtttcaaacggacattctggctgtagctttgcctgcaaggaccagcagatcttctacaatggctgcagggagaagtgccaacctgggacctcaggagcctttctggcgagattcatcacacacagtgtgcacagcatcctcctgactagcaggccccccatttcggggccaccacagacctgtgattatagggcttctctgtgcaggccaggccagaggtcagttacacacactgacatcagggcttgcccaattaactgatgttactgtggtaacatcagctggagtttcacacaagaactgaggagaaggactggaggaggggtgtggctgtttgtttttaaattttttaaaaggatgttataaactggagtcaggagaatttaaaccaactcccacactgggcaacagtgccacacatgctaagaaaagccaccaggaccgccagggcagtctcttctcctttgtggaggcgagcccgg

SEQ ID NO: 97978 - DNA, 74028 bp, Homo sapiens
  misc_feature (1)...(74028): n = A,T,C or G
tctttcacccaggctggagtgcacaatcacagctctctgcaacctcgacctcctgggctcaagcgatcctaccacctcagtctcccaagtagctgggactacaagtgtacatcaccatgcctggctaattgattgtcaatttttgtagagatggggtatcaccatgctgcccaggctgccaagtctttatgtactttccgactcatcaaaagactaaattatgttcaatactattttagcattaattaaacatattttgctatattgaaactcttttggaagatttataacttatttcaaagaaacatctttaaacaaatatttaagttagcgacagcatggctgaaccagtctggataaagaatactgtattatattttctcagatcccagtaagtaacctgaagatatcaagcaactacttaccactaagagattgttgccatgctaaagcagaacaaagtaaggctaagctttttccacttcctgtgggactctccaacaaacaatgttgcttgctgtttaatcctctgagaatctatgaacacagaaaccaatgaaaataataaacatattaactttataaaggtctctctccatctgaagtttaaatagaacagcaaggaaaagtgagattgcactccagggaacacaacaatagcagaaggaactcatatttagttaaatccaaactgtattcctttacacctctccctaagattatcttactaaaatatcaagcacaagagaagaaatgaaaagaggaatctgtgccagaattatgcaagcatcaatgatttctgtaaaaccagaatacattactacctatcaatatatttgatgaaaacttaatgaaggatactgctagtgagagtacaaattgttacaactacttggtagagaaataaacaatttcttataaagtgaagatgcccagctccagcaagtccagttctatgtgtacacccaaaacctttcccacatgaacacaaggaaacatgcataagaaagttcacagcagcagccacgcttgtaatcccatcactttgggaggccaaggcaggtggatcatttgaggtcaggagttcgagaccagcctggccaacacggtgaaaacccgtctctactaaaaatccaaaaattagctgggcgtggtggcgcatccctgtaatcccagctactggggaggctgaggcaggagaatagcttcagcctgggaggcaggggttgcagtgagccaagatcgcgccactgcactccaatctgggcgacagagtgagacgctgtctcaaaaacaaaaagaaaaaaggaagttcacagcagcattgtttgtaactgcaaaagaatgtaaacaacctaaatgtctaccaataagaaaatggacagataaattctggtatattcatccaatggaatttatacaacaattaaaatggattaagaatcaacagggctatacattaaaaataatgctaagttaaaaaactcaagttctgcataaaaagtaaggtaccgtatcacatcaatgcacagtttcaaatatgtaaaataatattctatattgtttatggatacatatatatgtaataaaagtataaaaacatggctaggaaaggaaaagaacaaattcaggatactaataatcttgttaccagtaaataagatatgaagtacatatggcaaaatagctgtaacaaaactggaaagctggtttactcaaatttgtatattaattttctacatgatccaaacaaaacaatggtgagaaaaatagtattctgtgtaaaagatagtaaatactctgtttttacttaaaagtatagcagtttttcattaaaagtatagaaattccaaatgagctgagaacatttttcagaatgttcttctttgccttaaccacagatatatacagtttagctgcaatcagtagtttcccagaggttagatattcttccaagtgaacccagaaaatattctccatttactgagaatatgaatgcagtcaaatactcaatgtactttatgggtcataagtatctatatcttaataaaaacttaactgctgaaaaatacttacagaattcatcatagcaagctgtgacgggtaagctttataaggaaagtaaatcttcaccccaccaattgtatattcagaccacattgaagacatagtgctttcctgtttatttcagattcctaactacaacagaaatgaaaatgtcaaatattgagacacgccttacaaagaaaaccagagaaccaaaactaagggagaaatctggaaacagaaactggaattaataaaagtataaacaaaacaaatggaaacaaaataatttcctagtcttataaatcacagcggtcaagagcatgtcttagagtctaacaaatctagatttgtatccttcactctgccaggtattagttgtgtgacttcgggaaagttagttaccttctctaagccacagtgactgcatgtaccccataggattgtggtaatgattaagtgaaataatgtgcaaatatgataaagtacataccagattaaacatgagctcttgtaacagttagatcagatgtaatcaacctacagaaacaaataagttcctgaggcctctctctctacaactccgtagcatcactctttctccagttcttcccctttgtgttacccctttctgcagtcctccagttagaagaaaaaagctgttgaccagaagtcaggaagcataggttctataccaggttttggtatactgcctggtatgttatctttgactcaggtatgttatctttgacatatctttttacttctctagtctaagatccttacctgtgataacccctaatttaatttaaaggctgttataagaaagagaatgccttggcacatagtaggcactcaaaaatgttatttgaagatcagtagagtattatagaaacaggatgggctttggagtaaggcaatcctaagtttgaattccactgtgtgaatcacttaacttctcagagcttgtttctccatatatggaattgaaatactactacttacctgacagggtttttatgaaaattagccagggcagaatgtacctaacccaggatctgatacagatgaggatcactttaatcctcacctcttctaaaccacttttcttaacctaggatccacggatgtaattcagagacaatgacctcttgaaattgcaagcataagtttctgtacatgattgcatttttctgaagaaaaagtccatagatttctcttcccgtaaatatatctcaaggaaatcaaaatagcgggggaaattacatgcactgttattaaataaggaattatttgcagtcgtgggaaaaaattgtaaattcaacctggggacgaagagatggttaaaatagcaattcaatagattatgaagccaataataacattcaccactgcttgtgtgctccaaaagaagaaccattattctagggtattttccagctctaacattttgcgattctatctgtaaagctctgagaatgaggtatggtggaatctaacctcttaatatgaatcaacaactcaacgctggcctagttactcagatataatctagaaatcagcccgtcctgtaccccggctgtggcaacaatagtgtcaaaatggggtagcttcccccaaacattgcataaaggataaacacacccctctgcctcccgccaagaattaacgcagcgcccgggctaagaacaggcctgcgctcaaaggaggtaaggataggctccctcctcaggttttctgccccgtatctccctcctcccccagccagttgagatccccgagaccctggtgatccagtcaccacccatgggcccgcaggctgtgcagaagaactcaagccctttccgtggacttccctccgacttgcctgtctggagggaaaccgaagcaacgctctgagctccgattcactgaagaaaaggaaaggaaaccgacttctgagagcaaataaagcggagccctggaagagaagaaagggcacgagcccttcctcctccctcttcctgggggtgctgctacttccccggccttgtgtgcaggactggggccgccgttacctttcctcgacccaccagacccctcaaccacacaacccgagacgaattcccgcctcccgccccctcgactcccagcgcccaatagcccagcgagctcgaccaatcacccgccaaggccaggaatcaaccagtcccggtgcgaggtgagggggcgagaacttcggcatccaatggaagtctccgaaaaaaaaaaaaaaaaacaagggctcaaggtacgcggcggaaggttgtcgccactccagcaaatccctagtgtttgtttaaagtagaaagtcgtctcagtttgacttttgaaaccggcgatagagtctatgcagcaaattccttggaaactggaagtctcattcttcacgtccgtagaccagcggaaaggaagtatctttaagctttgccaagttctttgagcatttatcagtgccactcaatttaaattacccagctttgcagtagccaggatagcgaagactcaggcgggaattgccagactgctgagccaaacttaagtaagaaggctctgtgacatcgggctacaatctatctttcataatattcaaggctttcccggatgctaaaataagccagagacaagctctcagggtctccagtatcagatcacttctacttccattaaggcttatccgccttccatccctcctaagaccagtttattatttgccagtagtactttaatttactcaaagaaaaggaggttcatcatgatcttgccaaatcatgttatttttttaaaaaatctgtataacctaaacttggctcaaataataatgtctccaaaaggcaaaacctcatactgtttctcaaattcaagtaactagtttggggaaggagtttgctgggaagaaagagcaggagggggctagttgatttgtttgcctcattgtcaattgtgatatatcttaccaaaaatgacaaaacttgtagtcataaaaataaactctaccctttgacctagtaatctgagctccagatatttatcctaaagacgtaatctaaacgaaagaaaatgtgataccgcaattgacaataatatctattggtaatactgaaaaaaattatgaacttcccagtctagtaatatggaggtggttatgacagatgaattcaatacattatgaagccaataaacttataaaaattaaacttgcaagaaaaaatcccatataaggttaagtgaaaaaaggcaaagcaaaccccaaactgggtgttagggattcagtaatgtgaaaatacatatgaatgagcaaagatgaagtaatttactgttaagacaatgaaaggaaggataatgtttaaaaataaatccttaaaaataccttcaaattgtcatttctcttttataatttttaaaacatcaactcttggccgggcgcagtggctcacgcctgtaatcccagcactttgggaggccgaggcaggcggatcaccaggtcaggagaccaagaccatcctggctaacacggtgaaaccccgtctctactaaaaatacaaaaaattagccgggcgtggtggcgggcgcctgtagtcccagctactcgggagactgaggcaggagaatggcgtgaacccaggaggcggagcttgcagtgagccgagatggcgccactgcactccagcctgggagacagagcgagactccgtctcaaaaaaaaaaaaaatcaactcttttgagtaactgctctagtataactactctcattttcctctcctaaattactaagagtttcaactggctctcaccttgcattgccatttaatgtatgtggcataacagaaagggatacacgtaggccctggagccatacagacctcgaatacagtcccttgaaccgttcccttcaggttaactctagtggaatgaaacacaaaaactacaggttcgtttgataaagaatatgaatgtttataaaccaatattcaaaatagctgcacacatctgttttcacttgaataaaaaaacacattgtgacaaattttataaccttaacttaaaatacatgaatattaacatttactaatatatttacacattttatttacatcatcaacaaatctgatgaaaaagagcatatgtgattattttaacacagcaggttatgaccagtctttgaatattgatccargaatgtgcactgcatttaattagaaaacatacttttaactttttctgaactcctagggcatatctattcacacaaaatatcgcaaggcctcagtttaaaaaaaaaaggagcagttgtatttaatcttaagggactacaaaactgccttgtttaaaaatatgaaaattcttatgctatttttaagatacttttattacttttatttttcacatcaaaattacttaattgaacattaagcatctaataaaaagttataaatattctatcacatgtgatactatgcacttcatgatttgaaacagctacaaactcattctcatagaatatgaggtagggccagtagtaaccccattttacaaaggaagaaaatgagatgtgactatttactagtgaaaaggctaaagttaaatttcatttctcaaaaactacaccttcttattagcctaatttcttttacaagtgaagcggtctggccaggtgcggtggctcacacctgtaatcccagcactttgggaggccaaggtgggcagatcacctgaggccaggagttcaaaaccagtctgggcaacatggcaaacccccgtctctactaaaaatacaaaaatacaggtggcgcgtgcctgcagtcccagctactcaggaggttgaggcacgagaatcccttgaacccaggtggcagaagttgcagtgagccaagatcatcccactgcactccagcctgggcaacaggggaagactccacctcaggaaaaaaaaaaaaaaaacacaagtgaagaggtctgtttcaagtgggggtggggaagtgtgtgattgaggtatatctcagagagaaaaaagggaattactttctacattgataatttttttttaatgattagggtttacctgaatatgtctgcctaatcaatggaagttactgacagaggactgcaaaatccttcggcaagacaatattttctacactttaacttttcctcaggttcaaacactgcattttcttactcaaagatcttctcaaagtaagatatgaattataatcctgatgacaaaccaagagctctttaatccagtgggttttattgctctaccttcatttaatttgatacatatttcccccctctgagcattaggtaagttaataaagcattataaaaataaatttaaaacataaaactaaatgagatctctcaggttcttctttgaacaaagatgtttctgtaaacacttttacaccagtatcttaaaattccaaattattcaagtatctctttaaacatatggcttcatatattaataaaaattgaagcaaatatgtgaaatctttaaatcctcatctgtatttccacagaaatcatttacaaaagctacttgcctttttaaaagtcttctcaatactctttcttgagaactagaattccaacttgcattactattacttgcactgcaaatctttgagatttctacttgtgtttttaactcctattatttccttaattctcctttccctttacccttttttcctctcccatctttgcatctttgtcacattctgttacaagctcacagttaaaataaacactagggctacccacagactcatttttataagaaattaaaggcatggcagtcttcacttcaaaagctaaatacaaggccaaattccctttccaataatgagtttcttacatgtgttcccagtggaaaaaaaaaaagctcagctgctacaatagaaacatatcagcaaagtagatccaaagatgtgccaatcagaaacaagcaagcataattctcataaagttctaaactatactcatgttgaattgaattgttttagtgattccaagacaatactttactgttcccattcagtttagagttgttactaatatgcagattcatgttgggtatatgcagcaaacaactttttgttgttttaaattttgttttaaattccactaacactcatatttattatttcaattactgttctttcaatacagtgacagagctgtacatcaggatccatgcttccagtgtccctggatccatttttataagatgaatctttacagatttgagaccatccacttggtttctcctttatttgttgaagacctacaacataagggaaaaaaaacattaaggccaagaaatttggaaaggaatttggcctttttgtttgagatattaagataacccttgaaaataagttaccacttacgtgtaataattggatcaatgtctcttgtctgagtggcaacatcagaggcacaaacttgccctatttggatcagcaaagacataatatcctcatacaatggaggaaatgctcgacaaaaagagaccaaacttggcagagttggcataaaaaaagcataccgcttagcctgtgttaaaactgttggaaaaaaatgaaacaatattttagtttacaaatataaattcaacacagcttacacaacatactaaggggaactatgctctgtgctggagatatgaagttctctaaacacagccaacccgtcttcagaaagctcacaatctagtagtctcagtctttatccaagatacaaattattatgcacaagttttgcaataagtacattacatgcattatttcattgaattcctacaatcttatgaatgaccaaagtactattatgacactcattttatatatgagaaaactcttaaaaaaaggttagagaggttaagaaacttgttaaagatcacaagccagttagtggtggggctgagattgaattcaggcagtgtaaactcttaatcactacaaataattataacaggatataaatacgatgaaaagaaaaacaacagggtattatggaaatattataatgagaaagaatactaagttaactatgccattacattaagggttgcattatagttcatatattttaaagtagtttattttcagaccattttattctacaaaccagaaggtggttaaaatatcagaatatgttttagaacttatgaagacatctaatacatttatctttcatttatacatatgatgatatttttctggaactctgagcatttgtaataaatgaacatttgttatctactgatacaattacattctgaaagtgtatttgttttccatttataaaatacagaaagcttatatttacaaatctatatatactcattcacaaaatgaaaaatacaatttgcctacctattcattcccactacactataaatcacatttgtaaacagaagtttccaaaagaagaattcaaaagacrgcataagttaaactagtatttaacacatattgtatcatactgtctcagagtgacagaaaaaacatattgcatcactaaatgcagaaaatataggaactataataatttatgtcagatgtttgttgatgktgattggctacatacctgttaacaaagttcccatgacattgacagctaaacgagccacactaagtgactttggtaatgcatattgtatacacaagtgagaaagcaactggatagcaaatatctgcaatacaaaatccagttattacatgtttctcaagaatatctttaggtattaaaaattataaaatgttttgtataactagtaagactggagagagagatcaattgtcctaaagctccaaaatgctcattacctgtttctcaagttctggctgtgcaataagctcaggtatgaaatctagacagatgtgcatagatggaatacctgcgaccgtcagaggcaaaagttcacatggataaccctatctcaacaagaaacgggaaaaaagtcagaaataaaataactataaaagtacagataaaaatacaaatgaaagatttcatttcctttctgtaaaaattgctcagaaggctatagtgccccatatgtaacctggcatttcacttttctgatgcactagaatagagattaaactatcgaacatttcattaggttaaaaaaaaaaacaactaaaaatctggatttttctccatattgcaaaagcccatggatcatttgtgttttctctggtttctaaatgatccctgttaatatagtattcaaagcccccaagaaaaataaagttcaaacacaaagcatcattctttggaaacagacctgaaagtgaacaagcttagcaatgttgggatctgcaatgtacatttggtgcaagagacaacagataaggcactgaacttctcgaaggttacagagcaaattgtcttctccttcctccattcccttatttggagcgctggtggtaataacactttgaacatttcttaacaagctatctggattgacaccatttgctttctcctcttcagtaggtaggcaaatctctaagagaatctggacagctgcactatcctataagcaaacaaaacatagaaaaagtaagaagtttctaagaagttaaaaaacaaatcagattttattttcacatgaacagatatgataaaataactaatttcttaaacacacatacacamagaggtacttctaagagcagaactgagcaatctgtagagcagtggttctcacctttttaggattatgaaccccttaagaatctaaagaaaactatgtaccctctcccgataaaaattaacatacataaacaaacatcattacataatgatatcacatatctctaaaatagatccatggactccagtttaagaatatctactagaagagtatcatgaattcagttacatccaaaacaggccctaggcaaaaatgacttctaccagaatgtcctttccttcctcttaatctcctacttttcccagtatgctatcctgatttccctttttttcaacctgtttaaggctctggtttcacaaggaaagagtctaccttaccatccattccacctgcacaactcattgctcagtctacaggcttgagcatcattgcacagagcagtagcttgaggggtaatggcaatatatttgaggcccctatatataaaggagagctaaaatcactctcatctagcagaaagaagtaaaaaataaaaatgaatacatgacatccacctctgatagacagctactgcctaaggtagagaaaacaattacttgagctaagtgattaagaacttattataaagtgaggttagactactttataatcatggttcttggggaaaggagtttttggttattgttattgttattgttttgttttcttttgttgttgttgactcaggagccagagtgcctaggagtgaatcctggttctgacatttactaaatgtgtaaccatgagcaagtcacttaacttctctgggtcacattttcctactctgtaaaaatggagataatactctatacctcataggtaggttataaaaattaaatgagctaatatatttaaagaacttaggctagcacctaccatatggtaagcactacacagatgttagcttttatgatcttcaatcccttatctgaaactcctaggaacagatttattttattgatttattttattgatttttgttgttgttgttgagatggagtctcgctctgtcgcccaggctgtagtgcagaggcacgatctcagctcactgcaacctccgcctcccgggttcaagccattctcctgcctcagcctcccaagtagctgggactacaggtttgggccaccacgcccggctaatttttgtatttttagtagagatggggtttcaccatgttggccaggctggtctcaaaactcctgaactcaggtgatccacccacctcagccacccaaagtgctgggattataggcatgagcaaccatgcctggccaaaaaacttttctaaatataaagttgaactgcttatattgtcatggtatttatcactgcctgacattttattatacatgcagttgtttttctgttgtctgtctccataatttgacatttgatcttaagaaacaaataactaaggattttgtcttcttcaccactctatccccagttcctggaacaatacttggcacacagtaggtgtcccagtaaatattggttgaatgaggccgggtgccgtggctcatgcctgtaatcccagcactttgggaagctgaggtgggtggatcacctcaagttaggagttcaacacaagcctggcaaacacagcaaaaccctgtctctactaaaaatacaaaaattagccaggtgtggtggcatgtgcctgtagtcccagctactcaggaggctgaggcaggagaactgcttgaacccgggaggcggatgttgccatgagccaagattacacctctgcactccagcctgggtgacagggcgaaactctgtctcaaaaaacaaaaaaaacaaaaaaaatgtgccgaatgaataaacatgtaactctaaactcagaataggtaaacacttaaattttattaaaatataaatcttatttaaatggctatttcattcatatcatgaagattattcctgatttcagaaatacaacatatctgatactcagaagcaaaggtaacatcattgtaatagattctataataaaagaaatgcacaatatgtcaccaatgtacatggagcgcacaatgtgccatctattgaactgattatactagtagagaagcccttgctctttttgactaaattttactttagcaaaatttacctgagcggccagtaatgcatttttcaattcttccctggtaacttccggagcatcagtttgtccaactaaaccaattgtattattctgggaaggcctatcttgctctgtttccttcagatgagcactaaggtaggctttagatgcaagaagatatccattcaacatgtgtagggtaatatccatcagtggggggcatctaaacaaggaaagcagaaaagaaaaatatatcagaaagaatataaatttataaattagccagaacatgatcaatttagtttaaatgctgagaaaaacctgagtagtacatactaacttttcccactaaaatattcattctcaaaagtttaatatatgtttcttattctctgtatttcaagcccttatataaatagtattacttgtttcatcttatcagctaaagtcaaatatgtataatgtaaattctaaagaaaagatgaccgggtgcgggcaaaacaatattgcatgaagaaaaactgtaatacacgtacaaaaagctgatatcctttatagataaagagctctttaagtcaataaaaaatataggctaaaatataaagatgaaataaatggccagtaaatactgttaaatgtccagtctaataagaatataaattaaaatgggaatctattttcacctatcaaattggaaaacattatatcaaatagtgcaggaaagtatatactatcaaacactgctatggaatgtaaaccagttcagcctttctacatagtagaatgaaaatctgaattaaaagtcttgaaaatgagcacgacacttttgccccaataattccattttcccatgttctaatgaaatactcagcatggggaaatgcacataatcaccaaagcactaytgataaaagcaaaaagtagaaataaaatatcctaggggattgggttaagcatagctctataaaatggaataccatatagccaattaagataagaatataaactaggcacagcagcacacaactgtaatcccagctactcaggaggctgaggcaagaggattgcttaagcccaggagttcaagaccagcctggacaacatagcaagacccccaactcaaaaaataaaaataaatttgaaataagaacattaacatgaaaaaaggttcacaagttgttaagtgaaaaatccgagctacaaaaacattagatacaatttgataacagaatttaacaacttccttaaaaactgaatcacctaaggtgattcaggtgtaagctcacctatttcagtggatttttaacaatgataaatcattttttcaagaaacagctcttttctagaagtgttatttattgtggtttccttttattagatacttaacatcatttacatacacagtttgttctgattcctatttcctatgagatcttaatcttaccaaaccatatttagctaattttgtagattttgtcacttcgagaatgtcatcccttggttgatgacagacaagtttaaatatcaagtgtgtcctatttagtcttccttactagtttctctctcctctaatccacctagcacaaagcatcttttcctaagttataaccccaaccacattagcctaatattcaaggccctcgatagcctgaccccaatttaactttccaactgtaaaatgttctcttttcaaaaataaccctcttcacggcttcctcattcttgcttctaaacttctgctcatactactctttttctcaaagtaccttccttgactccctgacccccatctttatactattagatgaacaaatattcacctaaaccctatgtccactcttctttttttaagtttaaataaagcagtgggagtgaagagggaacaaagaaatctgtacctgattatgatcaatcagttgtaaataccactgcactcgaaccagccctaactccactctttgaaacattacccatgtcccatctcctctgcatctttcctgaacttttaagaacattcatttaccacaccattcatctacatgagcatattacgtaacttatcatgtatctatcttatgtcccatgcaaatgataatcactttaaaggaaagcccctcaacttatatgtttttgatagtacttatcataacaagtgtgactcaaagattaatgataggaattaactaaattctaccttttgagatgaagccacttgaaagcaatgctgaagtttagcaattggtaaggatttagagccaaatgtggaatcaatgaagctaacatcactattgtgcatgccaaaaagatcacagttttaacgcaggtaacggttcacaagaaaccagttttttaaaaacctttttaatgtgagaacagaaatagttattctttactggtctaaattgtgagagagaaaaaccactatttgtggcaccaaaaccaagaatggcatttctctaaagctaggttttattaatcacatactaaatattaaaatgaatatacatttcatgaataaacacaactaaaaaaataagacaaaaaaccgcacaggtcacactgcctacttatctgcaagaaaaattaaaatataagtttaaactgaatttcatcaatttcttttgactctccaaagtacagctctataataaaaatgaaactcaaatgacatgtacctgtgaaccctctgatcacaccttaggacaatgagaggatctatcatcaggtcattctgagtatacttttgttgtcgtacaaactttattgaaggctgaagtgcattaaccgtcattacccatagcctgataagaaaataatcacatgttcaaaacagttttttatatattaaaatctgtagccatccagtcctttctatcttagaaagttatattcagtaaataattagaaaatacatatgaatgaactttgaaaaaatttaagctacagacatctaacctattaaaatatctctttaaaaaacacagagataaaacagtaaacacaaagtagtttcagaaacgttcacagttgtaatggaataatcatggcatataaaattaaaacctgagttaaaaccttagttataccatacttgctatatgactctgtgtaagtcactgaggctctctaaactgtttcctcgtctgtaaaatagaaatgacataatacctgtaaatgaaataagacttgccaaaacattctgtatctagttccataaatataagtcactattctggatttatcatcataaagtctccaagtgagatgccactttgagattagacattaatagattataagtggttactaaaatgactgcacatcataattactaagggttatgcaaatacagaaggtacttgatcttacagtgaagcccaggaatccaccagagaacttccccctcttaaatatgactgtataaacaaggatcatcagacacttaaagaaagcttttactttgaaaaagattaaaatatacaaacagaaaaaaaggaactccaaacagaaaatgtagggataaggagaaaaaaaattttcgaactattaatatcctaaaagaataaagtattttatacatgaaacaagaacaagaggcatttaagaatattcagataacaaagagctcttagaattaagaagaacagggcctgacacagtggctcacacctgtgaaatcccagcactttgggaggctgaggcagaaggttcgcttgagcccaggagttcaagactagcctgggcagcatagtgagacaccatctctacaaaaactaaaaaaaattaggcaggcacgggggtatgcacctgtagtccagctatttgggaggctgaggcagaaggatcgtttgagcccatgagttgaggttacagtgaactatgattgtgccactgcagtccagcctgggtgacaaagcaagaccctgtatctaaaaagtaaaaataaaaaataattttttaaaaaatgaactagaattccacacttaggctaaatatcagtcacatatgagaataattcagcatctcaaaaaagttaagtttaccacactctctttctcaggaagcgagatgagtgtgtgttccattcactaaaacgaggatataaaccaagaaagagaaaaatatggaatccaacaaagaagagtgacaatagcaatttgtcccagatgggaacatgaagacagaaagctctgaaaggaatgtctccaagaaaaaaaaaatagtgtttcttttgtttttttttgagacagggtttcagtggcacgatctcacctcactgaagcctccatctcctgggctcaagcgatcgtcctgcctcagcccaccaagtagctgggaatacaggcatgcatgcaccaccatgccctgctaatttttgtattttttgtagagacggggtttcaccatgttgcccaagctggtcttgaactcctgagctcaggtgatccgtccacctcggcctcccaaagtgctaagattacaggtgtgggccagtgcacccagccaaaaaaatgttaatgatacattatctgatgtgttatgattaagtgtgaagtaaatttcccctcaataatgaagcttggggatgaattagttattggttattgataccaatttaaaaaactgagcaaatagaaaaaaggtattaactaacccaacatatatgttgagtaagggggagggcacttgcataagaatgaaattgtaattaaaggattatcacatagctcaattatgaaaccacttctgtagtcataataatatgcatttgaaatattgctttaacaaaaattttaatatacctgtgttgtgagaaacaggaaaaggggcaatgtgtattagaagaagtgggactcacaggagtggaagcaagtaagagagctaactaaccttcaccttgtagagtagaaagtcaacagataatttctaaattggaaaatcaggaaattacagtcattataagagatatatggggaggatataaataccagaataaaaagataaaagagatgaaaatagtagtctctggggagctaaagtctaaaatacaaaggtgtgaggcagaccttatatactacttaacttgtatactatttatagcccagtattctgttttctagacctgtccaggtgttaaggatccaatctatgaaccagcagagacccaatgactaaagacaaactttgctgcacactgaaatcacctggggaatcttttaaaaagtactgacgcctgactcccacccacaaacagtctgatttaattggcatgggttccaacctggggatcagtagtggtaaaaactctccaggtgattttaatgtgcagcaaaacttggaacaactgcaaagatccaagatataacagtgatctaaatcataattagccacaaataactatacatgataacccaattttcaagaacttcctaaagttagaaatactgtaaggtttctatttcaataaagtttgctttacttaaagatataacaactatttagtagtcttaagaaaggagatatattgtcatatagtcaacaaatactgctatgagtggtgaaaaattttttaaacaattaaatttaggttattgtatattatccctgctatataattatctattacatgtaacaatacactgaatttaccttctaggcatcacagtattaagaaccatccatagtttattgactgtttgcagaattctccgtggaacccctgaattcaatagctggctcatattggatgttaacacttccgcatatggtataagttcactggcagagagtagagtcaagtgttctataatctgcatcacttgtgtgtkatttactgggacagctgaaaatgctaaaaagaaaatttagcaatcataacctaaattctgtacagtttatcaagcaggaagtagtagtgttctctcagactatagaccaaacaaatcaagaaaacaatgtggctaaaaagtaactatagttacttgctattgtttcctacagaaacctaggtacaatttcaactaaacttattaaaataagggccagatggatgcggtggctcacacctgtaatcccagcactttgggaggccaaggcgggtggatcacttgaggtcaggagttcgagatcagcctggccaacatggtgaaacccctctctctactaaaaatacaaaaatgagccaggcgtggtggcaggcacctgtaatcccagctacttaggagactgagacaggagaatcacttgaacccggaaggcggagattgcagggagctgagattgcaccagcgcactccagcctgggtgacacagcaagactccatctcaaaaaaataaaaaaataagggccctaagaaaaattcatgcaagtgtagttgttctttcataaagaacaaaaatattttttaaaaatcacattaatgggataggcatggtggctcacacctgtaatctcagcactttgggaggctgaggtaggaggattgcatgagtccagaagttcaagaccagtctgggcaacatggcaagaccacatctctacaaaaagtaaaataattagctggatgtggtggtgtacctgtaataccaggtactcgagaggaagatcccttatgcccaggagacaragtttgcagtgagctgtgttcctgccactgcactccaaccttgagactgggcaacagaccctgtctccaaaaaaaaaaaaaaaaaaaaaaaacactttactgacccgaagactaatcttattttyttggtgattcaractgatcttattttttaatttattttttttcattttararatgggagtcttgctatgttgcccaggctggtcttttttttttttttttttttttttttttyccctcttgcctttaccaatcaagagcccaggatggttttgaattcccggcctcaagtgatcctcctgctttggccttccaaggtgctgagataacaggcgtgagtcactgtccagcccagactgattttaaaaacaggactgaaagaggaaaatatgctgaagtattgcttttgatagctaacatttatttgaaaggctcaaacttgaaactttcctccaggtggtccccttataggatgtaagcacccagaagattgctgttactaaaaaatatctagaactatgctctccaataacaactaaccacatctggctattgagcatctgaaataactagtccaaattgaggtgtgttataagtgtaaaatacacaacagattgcaaagactaagtgcaggagtcttagtggggggtaaaatatctcattaaaattttaatattgattacatggtgaaataatattggcaggccaggcacggtggttcatgcttgtaattccagcactttgggaggccaaggcaggcagactgcttgagcccacgagtttgagaccagcctgggcaacatggcaaccctttctctacaaaaaatacaaaaagtagctgggtgtggtggcatgtacctgtagtctcaggtactggggaagctgaggcaggaggattgctagagcatgagaggcaatgagccaagattgcaccactgcagtccagagtaggcaacagaacaaggctctgtctcaaaaaaaataaagaaaagaaaaaatattggccatatttggtcaaataaaatgattatttaaattagtgttgcctgtttctttttcctggaaagtttataggtgttacagctcacattatatataggtgttatagctcacattatatttctatttaacagtgctgatctagaagaacattctccattacatagtcctattccactgcacatatttctttttttgacatggagtctcgctttgtcacccaggctggagtgcagtggtgcaaccttggctcactgcaacctaggcctcccgggttcacaccattctcctgcctcagcctcccgagcagctgggactacaggcgcccacgaccacgcccggctaatttttttttgtatttttagtagagacggggtttcactgtgttaggcaggatggtctcaatctcctgacctcatgatccgcctgcctcggccttccaaagtgctgggattacaggcgtgagccaccacgcccggcctacactgcacttatttctaaccagtttagaacctttctaaaaccacaccaccctcttagtgaactaatattggacgtatgagagaaaagatacaagcacatcagaaagaaatggtaaaaattcctggccaggcacagtggctcacaccttaatcctagcactctgggaggctgaggcaggaggatcactcaaacttacaagttcgagaccagcctgggcaacatggtgaaaccccatctctacaaaaactaaaaaaatcagccaggcctggtggctcacacctgtagtcccagctacttgtgggactcaggtaggaggactgcttgagcccagcaggtggaggctgcagtgagctgagatcacgccactgcactccagcctgggtgacagagagaaagacacacaaacacaaaaggaaaggaaagggaaaagggggaaagggggaaaggagtaaaaggggaaagggggaaaggagkaaaggggggaggggaagggagcataaaattccttaaacgcaaagagtattttatatacttaaaatacattcaccaaaacattgttatatccatgggaaaattctgtatgattataagatttcaattagcctagcatctccttgtactacaaaaggggttaaaggagtatcaataatttactataccttcttggagttgtttgggagaatgatttttagcattattagtcaggagcattcgccgtagcagggcatcagtccctgtgatttcttcttcacaaatccagtcatccacaatacataaatgtgggtagttagtagcaaggagacgtagtaaagctgaatgcaacccttgaaaatttacagaaaatcaattggattcttcatgctcaaacaccagaagcttccccacccctctcatttttatcaagccatcagcccacaaggaaagagggttatgctctaagtcagtgtttctcaaaaaatgattagatggccgggcgcggtggctcatgcctgtaatcccagcactttgggaagccgaggcgggtggatcacctgaggtcaggagttcaagaccagcctggccaacatggcaaaaccccgtatctactaaaaatacaaatattagccgggcgtgttgttgggtgcctgtaatcccagctactcaggaggctaaggcaggagaatcacttgaacctgggaggtagaagttgcagtgagccaggatcgcaacattgcactccagctcaggcaacgagcaaaactcccgttcaaaaataaaaaaagaatgattagagcaccaccagcaccataagcttgggaagcttgtttcatgtgcagaataatgaataccatcccaggtactagatcagaagctctagaatggaggcctaggaatgtgcacttcttgtgcatgcaaactacagtttaagaacttcctgacagtcatttgatcaagggaaactgcttaaatgaagatcctgaagtaatgtgataaacagtgaggtgggaactactacttataaagaaagctttcaactttcttccaccccacccaacataacagtctcctaaagttgtttgacatagcaatggttcaagagttcagggtagaggaaagaaaaggaggagaaaagaatgtccatttggggactatcatatatggtttggaaaaggtcctattcagaaatactgataggcttctgtagagaacatgccctttcctccaaccctgttgagaatcatcactatagatatggtaaaattaaagttgcccactttgaatacctgaaaggtctcaggtactttatgtacgttttctcatctctccctaacattcatacaaagtaagcaatgcctccattctactgtaaggaacaaacaatgctgaaagacatttattaacattaacaaccctaaagtcacacagtcacatatgtcagccaagagaagcagtactgatgatacccacaatggggggcattttttcttggttcaagaagtattaaagaagaccaaaagaaatgggaaaacttgttaccaaatcaaagccttatttataacattttacctataccacagtttgactattcatgactattatgtataatgttaataatgagaggctgtgtgcggtggctcatgcctgtaatcccagcaccttgggagactgagggagatggatcacttgaggccaggagttggagaccagcctggccaacatggggaaatcctgtctctactaaaaatacaaaaattagccaggcgtggtggcacacgcctgtaatcctggctacttgggaggctgaggcacaagaattgcttgaacctgggacgtggaggttgcagtgagccaagatcatgccattgcactccagcctgggtgacagagcaagatgctgtctcaaaaaaaattatgacaccataaaaatgcctatttagttaatgaattaacgaagtactactatgctaagtgcttcacacataagtacctaataaatattgttgctaccatactattatcatcataacagtaagactacgcagtagtagtaggaatcaaagtactttagatctaattatccttttattatgcaaatcaaatgataccactgctttatcccagtagaaacaatacgcaattccgttctcatagaaacagcttaaaattgatgtttctgtgtttgaaaagacatcgtaacaatcaaaaatggcattactttaacatttaaayttctaaatgcatacaggagtatatatacagttaaaactatacccaaccatcacaaaaaagactgcttacaaaagtgtaaactaatcaacatttcatactcttttcaataaagtatatcaattgccaaatgctgttaaaaataacattattttctggaaacagattatacaaagaagccaggcacggtggctcacgcctgtaatactaacactttgggaggctgagtagggctcttcacttgaggtcaggagttcgagactagcctaaccaacatgatgaaaccacatctctacttaaaaaaaaaaaaagattatacaaagayataagtaaatamatgctgcagacatccggttaacgatgagcaatgaaggctcatgtttctccttgaaaccaaccataataaagaaaaaattccggccaggcacagtggctcacgcctgtaatcctagcactttgggaggctgacgtgggtggatcacctgaggtcagttcaagaccagcctggccaacatggcgaaatgaggtctccactaaaaatacaaaaatttagctgggcatggtagcaggagcctgtagtcccagctactcgggaggctgaggcaggagaatcacttgaatctgggagaagaaagttgaagtgagccaagatcgcaccacagtactccagcctgtgagacaagagcgaaactccgtctcaaaaaaaaaaaaaagaaaagaaaaagaaaattccaacttaacagaaagaaaaacacccacactcaaacattaaagaggtatttaattaagaaaaaatctctagaaaattagctgggcgtggtggcataggcctgtagtccccgctactagagagactgaggtaggaggatgtttgagcccaggagtttgaggctgcagttacccactgcactccagcttggataacgtagtgagaccctttccctaaagaaaaaaaaaagaaagaaagaaaaatatctaatttcaaaaaacactacaatatttctacttaacaggatttatagtaaaaatattacaatatatccatactatggatcataaaacaatcagaaacagtaaggcagatctacctgtactgatatgtaaagatgttcaagactccaagaaaaaaaacaagccttagatgaggcaggggaggccgggcatggtggctcactcctgtaattccagcactttgggaggccgaggtgggcagatcacttgagaccaggagttcaagaccagcctgggcaacatagtgaaaccctgtctctactaaaaatacataaattagacaggcatggtggcgcacatgcctgtaatcccagctatttgagtggctgaggcatgagaatcacttgaacccaggaggtgggggttacagtgagccaagatcatgccactgcactccagcctggatgacagagtgagccactgtctcaaaaacaaaaacaaacaaacaaacaaaagaggtagtgtacaatactattcagagttaaaaaawtttttttttttttacctctgttaagtgtctgttaggttcaaccacaagaacctgctgtttctgtagctctaaattagctgaatatctgcaatttcatacagttcaacctacaggagaaaaaagcctgaaaatacatatcaactgaaaatagctagggttgcgttttagggggcaggctggtttgcaataactgaaataatagatttagtgagggaggcaaagaggaatttcactcttgaactgtttgaatttttaacattaagcacctattacacttcataacattataaacagaaaggttttttaacaataaactttagcagtaaaaagcaaaataaaacatacctcccaactcctgctgcagcccttgagcctgtcgaataaggaatttgataggaatctgatccattaaagaagaagaatatgatttgggctttctttgcatggcagctatcaaagataaaaagtgtaaaataaataaaatgtccagaaacaacagaaatcttaaccttcaacccaaatggaaacaaaaacaaagtcaaattacttttaatgcaattaacctgcgaatatagcatataaaagatgaagaatcattacgaaaacaagtggctacacaggaagaacaagaacatacctggagcaagatctggaaaatgtcctgaaatttaaaactagacagaagaaaattcataacaggttgagagaagccatgtgcaaaagtgccctacactaaaagaaccaacaagtgagtcaagattttccaaaacctaatgacaagatcaaatgtgatcatgaacatatggcctagagcttcatgattccaatgcatcttataaaaagaaactgtaattttatctttttttttttttttttgagacggagtctcactctttttgcccaggctagagtgcagtggcacgatctcagctcactgcaacctccgcttcccgggttcaagcgattctcccgcctcagcctctcaagtagattggctgggataacaggcatccaccaccatgcctggctaatttttgtatttttagtagagacagcattttgcaatgttggccaggctggtctctaattcctgaactcagggggatctagcctgcctcggcctcccaaattgctgggattacaggcgtgagtcactgggcccggccaattttttttttttttttttttttttgagacagagtctcgctctgtcaccaggctggagtgcagtggcgcgatcttggctcactgcaaactctgcctcccaggttcaagtgattctcctgcctcagcctcctgagtagctgggattacaagcgcccaccaccacgcccatctaattttttgtattattagtaaagatggggtttcactgtgttagccaggatggtctcgatctcctgacctcatgatccacccgccttggcctcccaaactgctgggattacaggcatgagccacagtgaattttatcatattatatacaatagtggtgactaaatctttttttttccctgagatgagtcactctgtcacccaggctggtatgcagtggttcaatcttggctcactgcaacctctgcctcctggattcaaacaattcttgtgcctcagcctcccaagtagctgagactacaggtgcccgccaccacgcctagctaatgtttgcatttttagtagagacggggtttcgccatattggccaggctggtctcaaactcctgacctcaggtgatccaccagccccagcattccaaagtacaggcgtgagccatcatatctggcctctttttaaattaagtcaggcaatacgaatttgacttccttctctcacaactcctaccctcaaccagccatgtccamcctttttttcttctaagtccattttaatttctgtacttttgctgctatcctaattcagtgcctactcaccttttgtttaaatatcttctatggcccactttccctgcctccaatttaatccatccttcaacytgcggccatagtcatcttatttaaatagagatttggccaccttcagtgaatcctcagatcacacagagtaaaggtccttgccagtcaatagtatctttctctgtctcatctctactgcattctatatgcctggcacccaaagctcattccaaggtactttcctttacaccacaggaatatatgagaatctcaatcagggtgtttgtaatttcacaaaggatgtacaatgtgtttattctcttacaaactacaaacagtaaagctcaaccatttttcttttattaaggacaagaagtatgtaagtgcaagtgttagaataaaggttgagaatcactgtctatatagaccacatatataccatatactctcatttagatataatctcccttttaagttaataaattagcatagttttccataccaatcttttatgaattaagaaaaaatcagaaggcagttaaaacaatagttataggttccagaaagagataaatcctggttccaatacttattacaatacttaatactaacttagggaagttacttaacttccttgtgcctcagtgttctcccctgtaaaataaacgtaaccacacctatctcagaattgttatgagggtttacatgagttaactataagactaaagtaaggccaggcaaagtggctcacacctgtaatcccagcactttgggaggccaaggtgggtggatgacttgaggtcagaaggtcgagaccagcctcaccaacatggtaaaacccattctctactaaaaatacaaaattcagtggggcgtgttagtgggcacctgtaatcccagctactcaggagtccgaggcaggagaatcactggaacccgggaggtggaggttgcagtgagctgagatcgtgccactgcactctagcctgggcaacacaacaagactctgtctcaaaaaaaaaaaaaaaaaaagactatatgtgcacgattaaaaagcaaaaaattatttcaggttcctagataggaagacttagtactgcaaagacgtaaattctctccaaattaatctataagtttaacataattcttatcaaaatcccaacataattttcatttgtgaaatttaacaaaattattataaagttcayggaaaagattaaatatgtgagaatatacagaaattccaaacaagaactgtatcaaagacacagaaaatgtcaaaacataaaaaagaaaatccaggccgggtgtgatggctcacacctgtaatcccagcactttgagaggctgaggtgtgtggatcacttgaggtcaggagttcgagaccagcctggccagtatgatgaaactccatctctactacaaatacaaaaattagccaggaatgtggtacgcacctgtaatcccagctattcaggaggctgaagcagaagaatcgtttgaacctgagaggcggaggttgcagtgagccaagatcgcaccactgcattccagcctgggtgacagagtgagattttgtctcaaaaaaaaaagaaaaacaaattaaaaactacacacaaaggtcaggaggatcactcacacctgtaatcccagcactttgggaggccaagccaggaggactgctcgagcccaggagtttgagatcagcctggcaacatggcaaatcccatctctacaaaaaataaaaaaaatcagccaggcatggtggtgtccacctgtggtcccagctacactggaggctgaggcagggatcccttgagcccaagagatcaaggctacactgagccatgttcatgccactgcactccagcctgggtgacagagtgagaccctgtctcaaaaaataaatagatgaaatgaactatacacatgtaggaagtataaacacaggtaaaccttctttttcaaatacaggaaaagataccactttataatgatatcatgcatgctaaatctgaccttctgatattatgtgaagtaactaagtttcaaagcccatttcagtgacattctctgtgtgcgtgtgtgtgcgtgcgtgtgtgtgtgtgtgtgtgtgtgtgtggagatgggcatcttgctgttttccaggctggtgtcaaactctgagcacaagtgaccatcccatctcagcctcccaaagtaccaaagtactgagattacagggaatgagctaccatacccagcccaatgttaacggcaaaacgaaactcttcggccaggcgcagtggctcacgcctgtaatcccagcactttgggaggccgaggcaggcggatcacgaggttaggagatgragaccatcctggctaacatggtgaaaccccatctttactaaaaatacaaaaaaattagccgggcgtcgtagcaggcgcctgtagtcccagctacgccggaggctgaggcaggagaatggcatgaactcaggaagtggagcttgcagtgagccaagatcatgccactgcactctaggctgggcaacagagcaagactgtcaaaaacaaaaaacaaaaaacaaaaaacaaaaaacaaaccaaaacaaaacaaaaaaaaagaaactcttctacttttttttttttttgagacacagtctcactctgtccaccaggctggagtgcagtggcgcaatctcagctcactgcaacttccgcctctgggttcaagggattctcctgcctcaacctcctgagtagctgggattacaggcatgagccaccacacctggctaatttttgtatttttagtagagacggggtttcgccatgttgaccaggctggtctcgaactcctgacctcaggtgatccgcccacctcggcctcccgaagtgctaggattacaggcgtaagccacctcgactggccttttctattgtttttgattaggttgttactctttacactaatggaaggaagaccggtcaaagactcaactcaaatcaagagaaaaaaattcagttacagctccatcaggtgttaaatttatatttagtgaacaagacctatacaattgttaaaatacaggcaattctgttatctattaatttagcctctgataaggaggactgggccataaatcgtggttacataccccaacatacatgatttatgtatcaagtatacaatgcccacattgcaaagattataaaatgatactagagtttattaaaatattgcccttatcaaagaacagtttggaaagtaacaaaatacaagctaataaaataaactaccactagaaccactcctctacgtacaacttacctaaagtcttcgtgtttgctagaagagcctcttcataagacagtatatagtagagcaccaaaagctgtgctgtgatactgaaacgctgattaaggcggatgttgtcaccctggaggtaatattacaaatactctgaaatactcygaatttcacgagtgcttttttttttcttgatagtaaaagaatcaaaatagactattcagcattgctgctcctaactcaggtaaaacaggagaaatgytgctgtgtgtgtattaaactcaaaaaaacaacatgaaatctgagatggcatgagagatgaaaggcaacatgcttaagtggtctttaagataagacaaagaaaagacttcagctactactcaatagcaaacccatcaggctgcttctgaaagacaggagtcccaagtattatatgaaattaccatgaaaaaagtaactcctaaataagacattgtatacttaaatatatttgtgaaaaatgcaactgtttttcccttctaacaaactggggaaaaaatactttcatcaaattttccctgaatgagccaggagcagtggctcatacctgtaatcccagcactttgggaggctgaggcaggcagatcacctgaggtcacgagttggagaccagctggccaacatagtaaaaccctgtctctactaaaaatataaaaattagccaggcgtggtggcaggtgcctgtaatccctgctactcgagaggctgaggcatgagaatcacttgaacccaggaggcagagtttgcagtaagctgagatcgtgtcactgcactcyggtcggggcaacagagtgagactctgtctcaaaaaaaaaaaaaaaaatccccctaaatgaatgtaggtgtatcttagattcccaggatgctaaacaaacctatgctgaatatcttgatatcccacacagtacttgatcaaatacacaatctccagggaacccattagactttaaagtgaagcttaaaaaaaaaaaaattactggccaggcgcagtggctcacacctgtaatcccagcactttgggaggccaaggcaggaggatcacttgaggtcaggagtttgagaccagcctactcaggaggctgaagcaggagaatcgcttgaacccaggaagcggaggttgtagtgagccgagactgcccattgcactccagcctgggtgtcacagcaagactccagtctcaaaaaaaaaaaaaaaaaaaaaaaaaaaaggccaggcacagtgactcacacctgtaatcccagcactttgggaggctgaggcaggtagatcacctgaggtcaggagttygagatcagcctggccaacatggtgaaaccctgtctctactaaaaatacaaaacattagccaggcgttgtggcaggcgcctgcaatcctagctactcgagagactgaggcaggagaatcmcttgaacccggcagacagaggttgcagggaggaggaggttgcagtgagctgagatcgcgccactgcactccagcctaggcaacaagagtaaaactccatctcaaaaaaaaaagtgcctgtttagcaaactacttggaactaataccattcttttaatttttagaggtgatctaaggaaatttaatctaattttaaattcagaactacctagaagtcctctgataggaaaataaaaatatgggttaagtaagaagaactaaaagaaaaataagttaatagatataaaaraaccactattttaccccaatgactccttggaaaatattgagtatctcctgttctgtgactggctgatttgtggcttctggattagatttcgacgcaggagtaagtatagaatttatgtacacatcaatcaaaggaagtaaytgaggatgaagtggagtagaggtttcacacagctgtctataaatccaatcctaagaaagaatgttatagacactgaattaattgtggcaaaaagaaaaaccaagcaaaattataaaagtacatacagttttacatgaattatgaatcagtaaaactcactattaacttttggcagttccaaatatattatctagtatcataactgcctttgattttaaaatatgaactaccwttatatctgtatcatcttaggtgcaccctccactagaagcttgcctttcggtttaatctattagtttttaagtagtgggaaaaacattttaagtccctaccatatctgtatttagagcaccatgtgtgtcgtcatgggagagctcacgttagataggaatttggagagagagagataggtccttcacagcaaaccctcagatagactaagaaaatgtctctgaaaagcacttacaggagacttatcacttaactatcattggatggaggacatgtaaaatgttgggggtgcatgtgaactcttaattcttagctattttacttgctaaaaatataaagcagatgatgcaatctggctggaaaataatctcactaaatcacaaaaaacaagcaacaattaaaaagtgatatatcatgcatatattattcactgttctttgtaaatatctgaaaaagtttcagtctactttacctcctgggtcttaataccttctctttagagggccttttaacttgttagatatagccaactaagacaaatcaaaacatgtcaaaattctaagttaggtgtgaggtgtccttatgacaaatcaacaaatactagtcatggcagcttccccaatttgtaaaacaaaaccaggcccactgcagtggctcatgcctgtaatcccaacacttcgggaggccgaagtaggagaattgcttgagaccaggagttcaagaccagaccagcctgggcaaaatagcgagaccctgtctctacaaaaaaacactttttaaagccaggtatgaggccaggcacggtggttcatgcctgtaatcccagcactttgggaggccgaggtgggtggatcacgtgaggtcaggagtttgagaccagcctggccaacatggtgaaaccctgtctctactaaaaattaaaaaaaaaaaaaaattagccaggcatggtggcaggagcctgtaataccagctactcaggaggcggaagcaggggaatcacttgaacccaggaggcggaggttgcagtgagctgagatagcaccactgcactccagcttgggcaacaaagtgagactccatctcaaaaaaaaaaaaaaaaaaaaaaagccaggagtggtggctcgcacctgtagttccagctacttaggaggctgtggcaggaggactgcttgagcccaggagtttgaggttacagtgagctatgacagcctgggcgacagagtgagaccctgtctttaaaattaaaaaaaaaaattagaaaatggcagtttctaagttttaatraaatagccatgtgccactattgagaatttaaatggagtattatgcattttgaaaatcttacattgttttaaaaatctgaaattactgtataattatataattataattactatccctaattactatacttatataaatgactagtaacttagcttaataccacacatttcctacacaaaacccacaataaatgcctacaaactgaaatacaactggggagaaagcattaatttaggttgttctttgaaatataaatgtaggccaggcacagtggctcacgyctgtaatcccagcactttggtcggttgagacaggcatatcrcttgaggtcaggagttcgacaccagccagccaacacggtgaaaccctgtctctactaaaaatacaaaaaytagccgggcatggtggcacacacctgtagtcccagctacctgggaggttgaggcaggagaatcactttaacccaggaggcagaggttacagtgagccaagactgcaccactgcactccaacctgggtgactgagcaagactccayctcaaaagaaaaaawatatatatataaaaatgtaggggcatgcttttattttgttttatttgtaggggcatacttttattgacactttgtgcttggtaaaggaacggctcctgagaagctggtaaatacaatgaataggcaaaaatccagtaatgttggcactcaggttgctggtgacagggacccgaactgcatgagctgtgacaacctaaaagggaaaaatagcattagtaatataatagaactaaatataaaattattttgaaagagagattagtaagtagactgtcaacacctaatacaagtgtggtccctagaaatgaatgatgaaaataaattattacatgttttaattgtctttgaatgctgaggaaatgtacatttagggatttatataattccctaattttttgtttataaacatagatacatacacagtggtgtgataaggtaaaaaaataaaataaaattttgaagcatacaatctgggctcaatgactttgaagaagtcatttatcttctgaatctttttcacatctacaaaacaggacactgccatacctgcctcaaagcattgttatggggggaaaatattctttttggaaaaacatcatatgaactataaagcaccacataaatataaacagaaatatttattctcaatatgtcatgcataggctctaatcgtcttttaaagaccctcttcaaagttgtcttccaattggttcaaatttaaagacaaaaaataacttatgattctcccacatgctgtgtgactacttgtaattcaggagtatatgtgcatatgcgtgttgagggtgggagggatagtaaaatatagaaataaagatattaatagccacaaaaaagcaacaactggccgggtgcagtggctcatgcctgtaaccccagcactctgggaggctgaggtgggtggatcacctgaggtcaggagttcaagaccagcctggtcaacgtggtaaaaccccatctctactaaaaatacaaaaattaggcgtggtggtgtgcacctctaatcctagctacttgggaggctgaggcaggagaattgctccaacccaggaggcagaggttgcagtaagctatgaccataccacygtatactagcctgggtgacaaagtgagataaaaaaaaaaaagaaatgaaaaaaatccttatgcttatccatggacaaaagtgctaaggctaaagaagaacatgttaagtataagaaatttagactctagcctgtaatctagttagaaatgaattttacagcctaaaggtttaaataggacttcattttatctttctccagacacattaaaacaattaccccttgagatgccctaccagcaacatctaagagtattctcctaagtatctactcaaagtctccaaaaatacataaattcaaaagatgccttggtatgttatgactagttttaaaagtgtattttaaatggattattctttaagaaagtttcaaagatgaaataaatcatcatgagtttaaaaagaaaaaagaccatattattttcttaaggtaagacacacaagttttctcccaaagaatattgtaaaagaaagttaaataagtacctaagaataaaaagaaatacctgctcagtaaaaatttcctgtgtgaagattgtcttcatcctgctcaaggagcttggcttaattacaatctaaaattaccaaaagaattccaacagcatgtaaaaatatatgaarcacaatttattctagggaacttatctaaaatggctatgatacacataaatgttcaaatgttcaagtactctactctgttttagaagtgctttcccaaacccaacattaaagtgttaatactcaaaaacagaaccaatataaaaagcacttaataaatactattattggcattttcagtcggttgggggaaacagattatttactacatggagctaggatagctgcccctctgtgaggccaagagaaatatgtgtgtgtgtgtatgtgtgtgtctgtgtctgtatatacrcacatatacacacacaaatatatgtatatatgtatatgtacagatagacacacatacactttttgcacatatcacaccatacaccaaaagaaactccaagtagattaaaatgttcaaatgtaaaacatgaaaccaccaaaaaaaactagaagaaaatataagtgaccacttatataaacccaagaaaggaaaacatttctaagcataagagcaaaatagaaaacacaaaaagaacatttacagccaggtgcagtggttcacgcctgtaatcccagcactwtgggaggccgaggagggcagatcacaaggtcaggagatcgacaccatcctggctaacacagtgaaaccccatctctactaaaaatacaaaaattagccgggcgtggcggtatgtgcctgtagtcccagctgctggggaggctgaggcaggagaatggcatgaacctgggagacggagcttgcagtgagccgagatcgcaccactgcactctagcctgggcgacagagcaagactccatctcaaaaaaaaaaaacaaaaaaaaaacatttaatatactacataaaaataataatgataataatttccacatggcgaagttaaatggcaaaaaatactggaaaaagtcaattataacatattgaactctccacttttaaagatactataagatatgtcactgatttaatattacagtagcttttcaagaaaaaagtaggagttggaacactaccactttcatattacatgtcaactgtaaaatgaatcccaatttcaatactgggtaaaatatacgtcttgaaatatatgaagtaagatgtataaggcataatgacatatctttccttttgaatcagtgaaagaaaaaaataaatcaaagtccctacaggaaaattaggatactgatcagcttttcacaaaagaaataaacaagccaaaacacataaattttaaatactaagtttcactagtaatcaaagaaattcaaactaagtgataccactgttcatcaaccaaatttgcaaagattaaaaaaaaatagtaatgctcagtcatgttgaaagtttagaaaaacagtagttcttactaacggtaagagttaaactgatacaatctttcgaaaagataatctgacagtactcatgaaacaccttaacatagtcatacacttttccttagcaattaccttctagaaatttatcctaagaaaataatccaacaggtgtatgaagagatacatgtgggtgcctatgtgtgtatttacataaacaaggacattcctctaagcattatacagaaactagaaaatctacatgggaaataataagggacctattaagaagatcaaacaatggactataagacaatgcagtcattaaaaattatactgtattataatatttattgatatgagtaaatgctcatcatatattaatttttttaaatcatcaaatatgtacgtcactttaaagaaagaacagacatcagaatattaatagtagtatactaggtatctctgaatcatggaattataagatatctttcccttttctgtgctttccaaggtttttgcrtgagtatctattattttagtaaatacaggtttcaaaatgcatttttctaagcgctcttgataaaacttctattaaacaattaaaattacttaaatgaaaacaatctatttacactacaacaaaatgtccagcttagaaacacctttttttttttagaaagaagttaaaagaaaattaccttcatccccaaagtggaacagaccaagtcaatgatagcactaagctggttgctgtgaaagtacatagccaccaataataacatctccccaaaagaagcagagacgcctgaagtactgtcaaaacaaaataggaaatatgaattttccaaagagagaagaagaaaagctttctcaactaactaaatcaaattatcttacctctcaaaatacgcttcttcttttatcatccaacttagccacaccaccatcagctgctcctgttcaggtgtactatataaaatataccagaatgtcactggtttaaattagatatactagcatatgaataaaaagcattctgaagttatttttggtagaaattatttttcctgccctattttcaagtatcaagtcaaattaaaggcttgctgaattgggccattaattgtcattgaggtatgaagtaattctagagctcaagaatgaggacctttgctttttttcatggatcccctctcaaagtcttagttactgccttcacaggttggaaagagtaagattcytcacattccttagaaaacaaaggccccttgggattaacttgttaaaacaactacacaacagctgatatttatttcatatagaaaaaaatctagtgttaacacttaagcatcaaaatatcacaaactgagtgccaaacagtaatgagcagtccatcttctggaaaaatgaaatttaatttatagaaaccttatgagtagatctcaaagttacagagaaataaatgatcactaatcatgggaaaaaaggcagtcacaggcttaccagatatgaaaaatggctataaaaatacgacttttctttgagacaatgtcttgctctgtcgcccaggctggagtgcagtggcgcaatcatagctcactatagcctcgaccacccaagctcaagtgatcctcccacctcagcctcccaagtagttgggactacaggcatgcgctactgcatccagctaatattttttatttttagtagaggggaggtctcactatgttgcccagtctggtcttgaactctcgagctcaagtgatacgcctgcctaagcctcccaaagtgctggaattacagaggtgagccaccatgcctagcctaacaatgactttttaaagggaattcctaaattctgagatggagtttcactctcgttgctcaggctggagtgcagcagcgcaatctcagctcactgcaacctccgcctcccgggttcaagcgattctcctacctcagcctcccgaatagctgggattacaggtgtctgccaccacacctggctaatttttctatttttagtagagatggggtttcaccctgttggccaggttggtcttgaactcctgatttcaggtgactgacccgcctcagcctcccaaagtgctgggaatacaggcctgagccaccacacccggtctaaattttaattgaaaagtacaagctgacgttgacttgtgaaaattttttcaccaatctctttccacttcagtgcagtaaaaatagatgcaacaaaaagcaaatgaaaagtataattcttctattaccaaaagctaagaaaataaaaaaggtcattctcaactatacctaaaccatataacaaataataaagtgttatgtagtagaaagattacagcctttacagcctaccacatctgagtgagaatcccatctctgctaattactggtagtgtgatcttgaagaagaaacacaaataatctttcttttcctttttcactgtagctctcaaatgttaagaactttttttttgtttttgagaagtttcgctcttgttgcccaggctggagtgcaatgacacaatcttggctcactgcaacctccacctcccggattcaagagattctcctgcctcagcctcccgagcagctgggattacaggtgcccaccaacacacccagctaattttttatatttttagtagagacggggtttcaccatgnnnnnnnnnnnnnnnnnnnnnnnnnnnnnnnnnnnnnnnnnnnnnnnnnnnnnnnnnnnnnnnnnnnnnnnnnnnnnnnnnnnnnnnnnnnnnnnnnnnnnnnnnnnnnnnnnnnnnnnnnnnnnnnnnnnnnnnnnnnnnnnnnnnnnnnnnnnnnnnnnnnnnnnnnnnnnnnnnnnnnnnnnnnnnnacaagacaggaggatagcttgagcccagcagttcaagaccagcctgagcaacaaagtgagatcccatctctacaaaaaaatttaaaaattagacaggcatggtggcgcatgtttgtagtcccagctacacgggaggctaagatgggaggatctcttgagcccaagaggccaaggctgcagcgagccctgatcgtgccactggactccagcctgcgaaacaaagcaagatcctatctaaaaaaaaaaaaaaaataccttataagagtaatgaggatttgagataatgtttagaaagtacttcaagtaaaaagaaaagaaagaattcatgtacctaattttacaccatcctgaaactccattaaagctacattaaagggattttcttaaaaggcataaacgcataagatattgaggagggacaacaccacaaaatactggaagctagagaatatatagataaatggaaacggactcagcagacctgaggaagcaaaatgctaaactggtagaagagaaaacccatccattttataccacggaattcccaaagggctcaggctactccaggcagttccaggactgagagtgaagacagactaaaattaagaggttgacattctatataagtagtagacctccaaatcacctcctgcattctgcacaactagaagaatacccttccctcagcagagagaagactggagatttattgtctggaggtggtaaaatcatgcatctgaattaagggacaaccaggtatatctggagcaccattctgaaagtaggagaattaagtaaacgattatactgcaggctgatatctaccagcccttaaccctcactctttaactttgtttatgggtttctgtataggtcttccctctccaggccagacaataatctttagaactctgatcagcccaagagtttcccaaagacccacttatgcattagaggttctaatatgctttttcatttcctagtcttaaatatgaacaatcggccagacgtggtggctcacacctgtaatcccagcactttgggaggccaaggcaggcagatcacctgaggtcaggagttcragaccagcctgaccaacatggagaaaccccatctccactaaaaatacaaaacttasctgagggtggtggcacatgcctataatcccagctactcgggaggctaacacaggacaatcacttgaacccgggaggcagaggttgcggtgagccgagatcacaccattgcaccatgggcaacaagagcaaaactctgtctcaaaaattatatttatatatgtatatgaacaattaatattggctgggtgtggtggctcacacytgtagttacagcactctgggaggcaaaggcaggaggatcaccttaggccaggagttcaaaatcagcctgggcaacaaaagtgagaccccatccctacaaaaaacttttaaaaataagccaggtgtggtggcccacactggccacttgggaggctgaggtggaaggatctgttgaccccagaagttcaaagctgcaatgagttatgactgtaccactgagtttgccccgagcaacagagagagcccccatctctaaataaataaataaatagaaatttaaaaataataataaatattaagtatctgagaaaagcttctaactttaaaaatagagacccaaaaaaggcagggaaaaaaagcagcttagagaaaagaagcaatacaaataataaaatctcttcaaaatcagtatgactaatatcaaagaaattatgctataatgaaccaatagacactacaaagaagaaacattcagagagccaaaaaagcactcttagaaattaaagactgaataggaattgaagataaagttaaagacaaatcctaaaaggcagaatgatttctttttttttttttttttttttttttttttttttttttctgagatgcagtcccgctctgtagcccaggctggagtgcagtggcgcaatctcggctcactgcaagctctgcctcccaggttcacgccattctcctgcctcagcctacaggactgcaggcgcccgccaccatgaccggctaatatttttttgtattttttttagtagagacggggtttcaccgtgttagccaggatggtctcgatctcctgacctcaggtgatccacctgcctcagcctcccaaagtgctgggattacaggcgtgagccagtgtgcctggccattttgctccttcagaatgggtatgtgtgaagtaaattctttttgagactgggtatttctgaaaatatctttgtcctactttgacatctgattgatagtttgatggggtatggaattctaagttggaaataatttcctttcaggactttgaaggtgttgcttcattgtcttctaacttccagtgttgtcaggaagtctgacattctgattcctggtcctttgtgtggcctatttgtttttaatatagaaactcgtaggattagttttttatccctagggttttgaaatttctggatgatatgccttagcctgagtctctttttgactattgtcctaggcattcagtaagccctttgaacctggaaactcatgtctctcagttctaggaaattttcctgaataaatttgttggtaatgttttcttcttgggtgttctgtctaaaacctccttttatttggaattggactttttgaaatgattgtcgtattttcttatcctttcctcttttccttcccctcaatcttgttctactttttagaaaacagctttattgagatgtaatatacataccataagatttacccaaagtgtacaattgagtggtttttagtgtatatacagagttatgcaaccaccaacacaacagaattttagaacctgttcagcactctaaaaataacttgctcattctaagaccaggtacagtggctcacccctgtaaacccagtggtttgagagactgaggtgggaggactgtttcaggccatgagtttcagactagcctgggcaacacagcgaaacactgtctcttaaaaaaaaaaaattctccaggggtagtggaacgtgccttagtcccagctatttgggaggttcaaggagaaggatcacttcaacccaggagttcaagattacagtgagctatgattgtgccatagcactacagcctgggtgaaagagcttaaaaaaaaaaaaaaaaaaaaaacagaggctgggcacggtggctcacgcctgtaatcccagcactttgggaggccgaggcgggtggatcgcgaggtcaggagatcgagaccatcgtggctaacatggtgaaaccccgtctctactaaaaatacaaaaattagccgggcgtggtggcaggctcctgtagtcccagctactcgggaggctgaggcaggagaatggcgtgaacctgggaggtggagcttgcagtgagccaagatatcgcaccactgcactccagcctgggcgacaaagctagactccgtctcaaaaaaggaaaaaaaaaaaaaaaaaaagaaagaaaggataggttttctttttaatttttttttttttaaacaaagacaggagtcgcactatgttgccccagctggcctcgaactcatagcctcaagcaaccctcccgcctcagcctcctgagtagctgggactacaggtgtgagccacgcagcgccttgggtaatatgatgatatgagatataagaaacagaagatccaacaaaggagagatgaagcaagtctccaaaatgagtggtgaaggtcaatcccaggatgagagctttatactaccaggtatacctggtaaccattccagaccaaaatgctcctgaagaaatctcctcaagaagatgaaactcacagactgtctaatgagtcaaaacatctggagagaagatttaggctggcagagagtttgaggttacatgaatggtacatataacaccaagaaagttaaaagcaaaaaacaaaaacacaggataaatattaatccaaaaaaaaaaaaacaagttttacaaggaagtaaaaaataatcatatactgcatggttgagttctcagtagtgcttacataatcataacaactatatattgatctaatctaaattataaccatactaggagaatgagaggataggaaggacatgtatggatgtgtttaggacagggagaaaaaagacagagaactaatttctcatctttcatactgggaactcaataaaaaatacctaaaagcaaaaatcaagaggtatcaaatacaaacatattattacagatgtagcagtaaaacacaaaataaacagctaaaagaattgaaagacactgcttctaagaaagataaaataggaaggagagaaggaaggactgctatttgccttaacaaatcctgaagaactatttcgacttatttaaacaatgtacatatataagataaataaaatgaatcagatgctactgatatccttattttaaaaaaatacaaataagctgggccagtggcatacacctgcagtcccagctacttgggaggctgagtcaggaggattatttgaggccaggagttcaaggctgcactgtgctatgatcatacccatgaacagccactgtactccagcctgggcaacaaagctagaccccttctcttaaaaattggaaaaaacaaaacaaaactacgactgtccatacctagaccagcttttgtagaaaactcttatctaatgctatacaattttattgagtaaataaaagtaaaccttgagaaaatggagcaacttatatagttaggtacctgacaagtgtagaaaaggccagtagcatacaaaaggaaagtgaaacaaagcgaaccccagctggcgtagcaggaggacggctcgtcatcaactgcagtaattgctcagcttcttcttcagttggtctaaaaaggaatacatcattaggctttacatttttagttgggatgaagaagaaaaagtgaatttttaaccttttagttacaaattttaaactttataatggtatcttgctatttataaaatctttaacatctcaagttrccaaatgcaaaactgttgagaaattacaactacagtgttttactgtggacacaaatacaggcaggtcctccctttgccctgtagtgtgagaccataaaaatgaccatgcaagctgaaatcatgcaacacaatcttaataatcaatggtgaaaagtatggttgtactgtagcctttaaaatttttgtcaaaacattaaaaactctgttgattataatgcataattttttttttttttttttgagacaaggtcttgctccatcgcccaggctggagtgtagtggcaggatcagagctcacttcagctttgaccttccaggctcaggtaatcctcccacgtcagtcctcatgtagctaggaccacaggtatgcgccaccatgcccagcttattttttttagtagagacagggttttgccacgttccccaggctggtctcagactcctgggctcaaaaaatccacctcccttggtctcctaaaatgctgggattacaggtgtaagtcactgtacccagccaggaatttttttttttaaatggtaaaactaatatttttatagtactctaattgaaaatattagaaacattgggaattaaactgttttctttstttcttttttttgagacagagtctcaycctgtcgcccaggcgggagcgcagtggcacaatctcggctcactgcaaactctacctcctaagttcaagcaattctcctgcctcagactcctgagtagctgggactacaggcacacgccatcattcccagctaatttttgtatttttagtagagagagggtttcaccatcttgaataggttgtcctcgaactcctgacctcactgatccacaagccttggcctcccagagcgctcrgattatgggcgtgagccactgtgcccggtcttaaagtttttttatttcttcgtaaagactttatcaagagtagtttaaacagcctttgcctccttttttttatgttttttgtttttgtagagatggagtttcactcttattgcccaggccggactgcaatggtgcaatcttagctcaccgcaacctccacctcctgggttccagtgattctcctgcctcagcctcccaagtagctgggattacaggcatgtgccaccacacccagctaattttgtatttttagtagagacagggtttctccatgttggtcaggctggtctcgaactcccaacctcaggtgatctgtccaccttggccccccaaagtgctgggattacaggcgtgagccaccgcgcctggcctatgctttcatctttattggccaactgtctcttccaattatctgtttttggaatataatgttccaaaaactgtttccatgttttggaacatgagttcattatggagagaaaggaagcaatacaggttgagtaaccccaatccaaaaaacctaaaatctgaaatgcccccaaactccaaaacattctgagtgccaatatgaggtaatgagctcaaaggaaatgctcattggagcattaaggattttgaatttctgttagggatgctaaatcggtaaatataaacattccaaaatccgaaaagttctaaaatcccaaacgcttctggtctcaagcatttcagataagggatattcaacctttacaactacctcctctgctatatgtacatgaatcaaataacaggtgtgcagtaaccagctaccgacagactttgaaagaagtgaggccattggtcactaaccatgatgtacatctgttatttacttagtgatctgtgtcctgaggagctcacaaactctatacaattaactggttaatgtatcatggcaactgaaatggcaactgtgttgagagaccagcattatttaaataaactggcgtaactgaaactcatgcatattggagacatgcaaatgaggactgtatgtacaattattaagaacmctattcaaaaggattttgtatggtgactaagcaacattgtactggccaggcacagtggctcatgcctgtaatcccagcactttgggaggctgaggcaggcagaacacctgaggtaaggagttcaagacaagcctggccaacatggtgaaaccccgtctctactaaaaatmcaaaaaaaaaaaaaaaaaaattagccgggtgtggtgaggcaggagaatcgcttgaatccgggaggcagaggttacagtgagccgagatcacaccactgcactccagcctgggcgacagacggagattccatctcaaaaaaaaaaaaaaaaaaaaaacattgtacttattaatcacatcatattaattttaaacaattatgatatcagctgtaaaaggaaacaaaggagagatttacttcaactagtcaatggtaaaagatcactcacagatcattcactatagttttgtcaagctgtgttgaaatcacaggtttctttaaactgtgattggaaattgataaactgctctggctcctcccatatttatatagttctgtttacaatcagaacaaaatagatgaatacatctctgctagaaattcttggccttaggatttcattcttcttacaggccagcccactacctgagtccaacagaaaactttaatcctctgaataaaaggcctttggctcactttcttgagaatagaaacaagaaggtaaaatgacaaaaaggtaaaatatcaaactattgaatacttgagtccagcgatccccatcaaagcacagtacagacgtaagagtgcactggctttcacaacatgctcttctttcagccccgaatacacagacacattgggctccatatccacatcagcttcttccacaattcgggtgcttctyactgtgggaagaatgcccatcaactccagaagaagctgccttctcatctgccaaaggacagaactgctggtctctctttttctctgaaagaaatatggatcacaaaaggaagaaagcatgaagcatttactaaactaaaagggagctaaaacatagcaccccacttaaacactttcaaattggcctatttgaagagattgtcgtgactacagaatctcattttaaccaatcaagcaaactcaaaatccactagtttgtctgaagaatgaatattcaccataatttggattggttgcagaggaaagactaaattagtgacaatttgaattgtggaatattatttcaatggtactttcaaatacataaagactaacaaagtgatatgtggtataggagaaaatgctcagattttgaagacgtaagttcttggggtttaaatgccagctctactattagacgattatatacctttaggcacattggttagcctctctgaaccccaatttccttaatgacaaggaaatattttatcaacaatatttaccttatagaactcctataattaagagtttacaattcttggcctgatgcagtggttcacgcctgtaatcccagcactttgggaggccaaggcggacggatcacttgaggtcaggagttcgagaccagcctggccaacatggtgaaaccccatctctactaaaaatataaaaattagctgggtgtggtggtgcatgcctgtaatcccagctacttgggaggctgaagcacaagaatygcttgaacccaggaggcggaggttacaatgagtcaagatggcgccactgcactccagcctgggcaacagagtgatactctcgtctcaaaaaaaacaaaagagtttacaattctataaccactacagttcttcaggcagggacaatgccttagtcttctctcactctgcacagtcgaacattgtgcctaacatacagcaagcactcaaagtctgttaagtagatgaatgaacagagataatacatgtatgaaagcagttctaaactatacagggctagacaaatgttaattattatcttttgagtgtctctaagtaaaatatgatagacctgctttaataataacagtaagttcaaagaataaaggtttattgaatacaaaagacaactacaaacaagatgagcatgccaagtgcttaaggcagtacctgacatatatgaagcatccaataaataaatgttaactttgttttaaaaagcagagcttaaaatcagttttcaaatgggctataaaatagaacttgaatattttaaaaaactatgattcagtagcttaaaaatagactacaggatctaagcagtatacatgttgtctagctaagtgacctcaacgagttaaatcgcaatctgcattagctccttcataggaactctattcacatagttaatataaattagtttttgaaaaattaaaacattttgcaagttaaaaactgttgcaaaatacatatgcataagcaggtgaacgtataaaataaaatgtggtatatacacacaatggaatattatttttctttttttttgagaccgagtcctgctctgtcaccaggctggagtgcagtggcgtgatctcggctcactgcaacctctgcctcccatgttcaagcgattctcctgcctcagcctcccgagtagctgggactacaggcacgcacatcacgctcagctaatttttgtatttttagtagagacagggtttcaccatgttggccaggatggtctccctctcttgaccttgtgatccgcccgcctcagcctcccaaagtgctgggattacaggcgtaagccaccccacccagcccttacttcttatttttatagatttagggggtacaagtgcagttttgttacatgaatctattgcatagaagtctgggctgttggtgtagtcatcaccctgatagtataccctgtacccaatataggtaacttctcaaccctcacccccttcccaccctcccaacatttggagtctatgatgtgtattatcccactcgcttatgtccatgtgtacacatgattagyacccactcataattgagaatatgcaatatttgactttgtttatgcgttatttcacttaatataatggcctccagttccatccatgttactgtcagacatgattttattcttttttatggttgagttgtattccatggtgtgtgtgtttgtgtgtgtgtatacatatatacgtgtgtgtgtacatgtgtgtatgtgtgtgtgtgtgtgtgtgtgtgtgtgtgtgtgtgcatatatcacattttctttaagcaaccatccgttgatagatgcttaggttgattccataacattgctactgtgaatagtgctgaaataaacatacaagtgtaggtacattttttatataatgatttctctacccagcagtargattgctggacagaatggcagttctactctaagttcacaatggaatattattcagcctttaaaaaggaaatcctgacacatgttacaacatagatgaaccttgaaaacattatgctaagtgaaataagcaacatacaaaaggagaaatattgtataattccatttacttcaggtagccagaaagggtaaattcatacagacagaaagttgaatakaggttaccagaggatgggatgatagggggaatggggagttatttaatggatacagagtttctgtttgggatgatgaaaaagttctggaaatgggccaggcccagtggtggctcacgcctgtaatcccagtactctgggaggcccaggtgggtggatcacctgatgtcaagagttctagaccagcctgaccaacatggcgaaacccagcctctactcaaaataaaagtagccaagtgtggtggtgggcacctgtaatcccaactactcaggaggctgaggcaggagaatcctcgaacccaggaggtagagcttgcagtgagccgagattgcgccattgtactccagcctgggtgacagagtgagacgccgtctcaaaaaaaaaaaaaaaaaatagttctggaaacgaagagtgataatggttgcacactgtaaatatacttaatgccactgaattatatacttaaaaatgattaaatggcaaaattttatgttatgtatattttaccataataaaaacatatatacacatatgtattaaaatttaaaaatataataacttatttcagtgatctaatgcaccagttctcatgagtctggcccagaaccctggagatatatgctttcagggggtctggaaaggtgttaataatactcaagacattatctgtctttttctttctcattcactcacaagggtacggtgcagtttccaaaggcttctaccaagccagacattgaagatatttgaaaaaaatacaataaaataaaactatcattcttctcattaaattttgtttgggaaaacacagttagttttcatttaaaatatgttatgttcacatttaatagggttattgttgtttggttttggtttttttttaagagatgaggtctcgctatgttgcccaggctaaagtacagtcgctattcacaggcacaattatcacacactataccctagaaccccctggcttaagcaatcttcctgcttcagcctcctaagtagctaggactataggcacataccaacacaccagctgttcctatttttaaaagaactaaataaatatttcaaatatttaagtgttaatttctaatatggtaaatatcaacagaaaaaaagccacataaacaaaagctctttggtatccttagtgattttttaaaatataaggaggtccctgaaactagaaagtgtgagaaccacttgtctaatgacatcattcaaaaaatgtttctttctcttttagcagctgctaaagtattctgatccttagcctatacagatatttaaccctcacctgctgtccatttcggataaaagttccaaaccaagtccggactttcgcatttgttccaagaagcaaaccacttacaaaacaaaccaagtcactcactccatcctcacaagcttcatttttagtatgatccaatgtcaaagccacaccaaggcctggcaagtgacattcttccacctagcacagaaaagaaaacaaactgaattcagtatcataagcaaaaaggccagtgatgcttccaaatctaamgtatctaaagtttagaggaagaactcctacaaaacataaaaacccagagaggaaggtaacatatccagtatataaataaaattccccacctctacaggactctaaaaccatcttgagaagagttcttggacctaatataaaggcctttgtctaataaaacacaggatcacttaccaccatgcctcggaccttgagggcctgagaaggattcattttacacaagaagcgtaaggcatctgtcctgcgccttcctccaagactttcttcatcttgtcgttctccattttttatcaggcccctacaaactaacatgatagaaaccatcttcttcagccttcagaattaattgttcatgaagatttcacatgacagaagaaaaggatcagggtatttgaaagcacaacaacagaaattggccaaaatgaagcaaaaaatgaaaagagacttaaaaaagaatagtaaactctgggacaatattacacattcaaacacacttgcaattacggtcccagagagacaaagaaagtacgagacaaaaatacatttgagggccacggacagtggctcacacctgtaatcccagaactctgggaggccaaggtgggggcggggggggggggtgcggggcatggatcacctgaggtcaggagttcgagactagcctggccaacatggtgaaaccccatctctactaaaaatacaaaaattagctgggcgtggtggcaggcacctgtaatccgagctactcaggacgctgaggcaggagaatcgcttgaactgggaggtggaggttgcagtgagccaagatcgcatcattacactccagcctggggcgacaaaagcgaaactccttctcaaataaattaattaattaattaatttgaagaaattttcccaagttgaatgaaaactctaaacccagttcaatgagccctaagtggaacaaatgcaaagaaaatcataccaagaaacatcatacgtcaactttctgaaaccagtaataaaaagaaaatcttaaaagtaaccagggccgggtgcagtggctcacacctgcaatcccagcactttgggaggccgaggtgagtggatcactaggtcaagagctcgagaccagcctggccaatatggtgaaaccctgtctctactaaaaatacaaaaattagctgggtgtggtaatgcgcacctatagtcccagctgctcaggaggctgaggcagcagaatcacttgaacccgggaggtggaagttgcagtgagccgagatcacaccactgcacttcagcctgggtgacacagcaagactccatctccaaaaaagagaaaaagtaactagagcagaggataggcgcatcacctgaggccaggagttcaagatcagcctagccaacatagtgaaaccccatctctattaaaaatacaaaaattagccaggcatgggggcacatgactatagtcccagctacccgggaggctgaggcaggagaactgctttaaccccaggggaggcggaggttgccgtgagccgagctcatgccactgcactccagcctgggtgacagagcaagactccgtctcccaaaaaaaaaacaaaaaaaaaggagccagaagaaattaaagaaaaaaaaaaaaagtagccagagggaaaaagaaactttacagaggaacaaagataaaatttactgcagaaaagagaatgacatctttgttctttgttttcttttttcctagagatgggatcttgctttcttgctttgccaccatactagtctcaaactcctggcttcaaacaatcctcccgttttggcctcccaaagtgctgggattacaggtgtgagccacatacccagccagaatgacatctttaaatagctaaaagatgacgtcaacctaaaattttataccctttgaaaatatatttttccagaccaaaaaagccagtaaaatttgttgccaacaaacccaccctacaaaaaataaggaaaattcttcaagttaaggggaaattatgccagatggaaatatggaactacagaaaggaattaagagcaccaaaaatggtaaatgtgtggataaatagtattttcctctatatttttagtctttaaaatataattaactgtttaaaacaaaagtaataacaatttgctctaaggtttataattcatgtaaaagtaaaatccatgacaacaatggcacaaagtacaagaggaaaaagaaaataaatagaaaacaaataacaagaagattcaaacctaaccactataataatcacatttaaatggtctatgtatacagtctaaacactccaattaaaagacagagactgccactagattaaaaaaaatgaagaccgaactatacctgtccacaagaaatcgaccttaagatatggacagattaaagagatgaagaaatatatacaccatggaaaaactaattataagaaagatgacatggctgtattattcagacaaagtagacttgaaaagaaggaatattatcagcaataaagaagtctattttgtcacgcctgtaaatcccagcactttgggagattgaggcaagcggaccactttagcccaggagtctgagacagcacgggtaacatggtgaaaccccatatccacaaaaatacaaaaaattagctgggcgcgccaggtgcagtggctcacgcctataatcccagcactttgggaggccacagagggcgcatcacgaggtcaggagatccagaccatcctggctaacacggtgaaaccgtgttactactaaaaatacaaaaaaattasccgggcgtggtggtggcgggcgcctgtagtcccagctactcgggaggctgaggcgggagaatggcgtgaacacaggaggcggagcttgcagtgagccgagattgcgccactgcattccagcctgggcgacagagtgagactccgtctcaaaaaaaaaaaaaaaaaaaaaattatctgggcccagtggtatcggctggtagcctcactcactcaagaggctgaggcagaaggatcactcgagcctgggagatcaatgctgcagtgaatcatgaccacaccactgcactccagcatgcgtgacagagcgagacactatctcaaaaaaaaaaaaaaagcgtattttggaggttaaaaatctctacaaagaggccaaggacagtggctcatgtctgtaatcccagcactttggaaggccgaggaggacagatcacttgaggtcaggagttcaagaccagcctggccaacatggtgaaactccgtctctactaaaaatacaaaaattagccgggcgcggtggctcacgcctataatcccagcactttgggaggccaaggcaggcgattcacaaggtcaggagatcaagaccatcctggttaacacagtgaaaccccgtctctactaaaaacacaaaaaattagccgggcatggtggcaggcgcctgtagtcccagctactcgggaggctgagacaggagaatcgcttgaactggggaggcagaggttgcagtgagccgagatcactccactgcactccagcctgggtgacagagcaagactccgtctcaaaaaaataaataaataaataaataaataaataaataaataagccaggtgtggtggcccatgcctgtaatcccatgaacttgggaggctgatgcaggagaatcgcttaaacccaggaggtagaggttgcagtgcgccgagattgcgccactgcactccagcctgtgaaacagagtgaaactctgtttcaaaaaaaaaaagtccgggcgcggtggctcacgcctgcaatcccagcactttgggaggccgagaagggtggataactaggtcaggagatcaagaccatcctggctaacacggtgaaaccctgtctctaattaaaaaaaaaaaaaaaaatacaaaaaattagccgggcgtggtggcgggtgcctgtagtcccagctactcgggaggctgaggcaggagaatggctgaacccaggaggcagagcttgcagtgagccgagattgtgccactgggcgacagagcaagactctgtctaaaaaaaaaaaaaaaaaaaaaaawtcatataagacacaaacaaatggaaaaacattccaagctcatggattggaaraatcattatctttaaaatggccatattgcccaaagcaatctacagattcaacactcttcatatcaaactaccaacatgattttccacaaaattagaaactttaggatactaaagttcacacagcaaaaaagagcctgaatagccaaagcaatcctaacaaaaagaacaaagccagaagcatcacattatctaacttcaaactatactacatggctacagtaaccaaaataacatggcactggtataaaaacagacacacaggccaggcacggtggctcacacctgtaatcccagcactttggtaggctgaggcgggcagaccacgaggtcaggagatcgagaccatcctggctaacacagtgaaaccccatctctactaaaaatacaaaaaattagccaggcatggtagtgggtgcctgtagtcccagctactcaggaggctgaggcaggagaatggcgtgaacccagcaggcagagctgcagtgagccaaggtcgcacccctggactccagtctgggtaacagagtaacaaaaaattaataaataaaaataaacagacacacggaccaatgcaacagaatagaaaacccagaaataaagccacacacctacaatcatctgatcttcaacaaagttgacaaaaataaatgacagggaaaggactccctatttaacaaatggtgttgggatagctggctagccatatgcagaagaatgaaactagaccctatcttttatcatatacaaaaattaactcaagttagattaaagatttagatgtaaaacctcaaactataaaaatcctagaagaaacactaggaaatactattctggacactggccttggcaaagaatttatagccaagtcctcaaaagcaattgcaatgaaaacaaaaattgacaagtgtgacctatttaaattaaagatattctgcacacaaaagaaactatcaacagagcaaacaatctacagaatgggagaaaatattgacaaaaatgtatctgacaaaggcctaatgtgcagaatctataaggacataaacaattcaacaagcaaaaaaccaccccattaaaagtgaggaaagaacacgaacagatacttctcaaaagaagacatataagcaaccaaaaaacatgaaaaaaaatgctccatatcactaatcatcagagaaacacaaatcaaaacaatcatgaaatgccatctcacaccagtgagaatggctattaaaaagtcaaaaaataataggtgctagcgaggctgtggagaaaagagaacacttacacattgttggtgggaatgtaaattagttcagccactgtggaaagcagtttggagatttctcaaagaacttaaaacagaactaccattcgacccagcagtctcactgctggatatatactcaaaggacaacaaattgttctaccaaagacacatgcgcttgtatgttcatcccaatactattcacaatagcaaagacatggaatcaaccttggtgcccatcaacagtggattaaataaaatgtacatatataccatgaaatactatgcagccattaaaaagaatgaaatcatgtcctttgccgcaacaaggataaagctggaagccatcccatcctaggcaaattaacacagaaacagaaaaccaaataccacatgttctcactataagtgggagttaaacattgggtacacatggacataaagatgggaacaatggacactgggactaccagtggggaggaagaaaggggacaagggctgagaaactacctattgggtactatgctcataacctgggtgacgggatcattcaaactccaaacctcagtgtcatacaatatacccatgtaacaaacctgcacatgtacccccctgaatctaaaataaaacttcgaatttttttaaaaagaaaaattaaaacaaaggtgacaacaaattgaataatatgtaaataatgtttagaaagggggatataactataaatgtgaaaactaagaataaagaaatcaaatttgacttggggaaaaaagtatattttataatgaaaaaaaggctcaattcatcataaagatataatcatcctaaatgcatataaacccaacaaaagagctttgaaatacatgaagcaaaaactgacagaacaaaaagaagaaataggcaaatccacaattatgtctggagacatcaaaactcctctctcagtaattgacagaacaagttgacaaaaaatcggcaaggacacagtttacaaagagtttttacatatcatctgatattcaataaatctcttaaaaaagtcagggaactattacactatcaatatctccattttacagatgagaagtattttggtttgtttgtttgtttaagacagagtctcactctgttgcccaggctggagtgcagtggcacatatcggctcgctgcaacctccacctcacagattgaagcaattctcctgtctcagcctcctgagtagctgagattacaggcatccaccaccaagcccagctaatttttgtatttttagtagagacggggtttcactatgttggccaggctggtctcaaactcctggcctgaaatgatgcacccacctcggcctccccaagtgctgggattacaggcatgagccaccgtgcccagccagatgagaagtattttgatagagctcacacaataagtgaatgacaaaatcaggaattataactccagtactttttcctcccaggctcctrattcacaaactaccttgctcaacaaaatgtttttatttttatatcactcatacccaaacaacaaccttcaatcactgtaagttttaaatagaggtgaaaaaatgtagtcgatttttctcaatttctactttatacttctctgtaaactgacagcagtagggctaaaaaacaaaggtctgattcctagcatttctcattatacatatcccgtattgctctcttgatatttcactgatacatgtatcttctttgatccctgattatagatattacatcttctagttccttggggtttttttttttttttttttgagacggagtctcgccctgtcgcccaggccggagtgcagtggtgcgatctcgactcactgcaacctccacctcccaggttcaagcgattcttctgcctcagcctccccagtagctgggactacaggcacccaccaccacatccagctaatttttgtatttttagtagagatggggtttcaccatagtggccaggctggtctcaaacttctgaccttgtgatctgcccgcctcggcctcccaaagtgctgggattacaggtgtgagccactgcgcccagcctgatctttaaactcaatacaatttgtgaactcaatatttctttatacatactaacaaactttcaaaagataaaatctcaaataaaatcccattaatgtttcttcttaggtcaaaaagataggtcctgtacatgtccaagcaagtcttttcaatataccatattagaatcatatttaccttcattaaaactatcaggaacattggccaccaagagacacaagaaccaggcaccatttctaacatgtagcaaagcttcagctacatcaactatagggagcaaggaagggagctctacaagaaaacaaagtcagtgttagtctttgttaacaggtgcactccaccacacccagctaattttttttattttctgtggagactgaatctcactgtgttgcccaggtgggtctcaaactttggcctcaagtgatcctccagcctcagcctcccaaagtgctaagattacaggcataagccaccatgcctggacccagtgttaaagagtgatatttctttttttcttctttaagacagggtcttgctttgttgcccaggctacagtgcagtggtgtgattatagctcactgcagcctcaacctcctgggctcaagcaatcctcctgcctcagcctcctaaactcctagaattacaggcatgagccaccatgcccaaccaaaaatgacatttcattgtattattaaatatcttttgacatttcacaaatgtcatctaaaataaagtactttcttttcatagtctagaaccaagctgtccagtaggatacccactagcaacataaggatacttatattaaaaacagttcagttcctcaatcacactagccacatttcaagtaatccacagccacaaagaacactggacagcatagcatagaacagtacaggaaattttattttatagaactggtctaaagagttattttcacgaaaatcttatttgcttttttttttttttttttgcgacgaagtctcgcttttgtcccccaggctggaatgcaatggcgcaatctcagctcaccgcaacctccgcctccagagttcaagcgattctcctgcctcagccgcccgaatacctgggattacagaagcctgccaccacaccaggctaatttttgtatttttagtagagacagggtttcaccatgttgacctggctggtctccaactcctgacctcaggtgatccacccacctcggcctcccaaaatgctgggattacaggcgtgagccaccgtgcctggcctatactttttttttttttttttttttttaagaaaaggtctcagccaggcacagtggcttatgcctataatcccagcattttgggaagctgaggcaggcagatcacaaggttaagaattcgagaccagcctggccaacatggtgaaacctcgtcgccactaaaaatacaaaattagctgggcatggtgccgcatgcctgtaatcccagctactcaggaggctaaggaaggagaatcacttgaaccccggaggcggaggttgcagtgagccgagatcacaccactgcactccagcctgggtgacagagtgagactccatctcaaaaaaaaaagacaaggtctcactctggacagagtgcaatggcacaatcatggctcactacagcctcaatctcccaggctcaagccatcctcctgcctcagcttcccatgcagctgggactacaggtatacaccaccacactaggctaatttttttcattttggtagagacaaggtctcactatgttgcccagactggtcttgaactcttgagctcaagtgatcctcctgcctcggcctcccaaagtgctgggattacaggcatgagcgacagccttctttacatttttctgtcctcttttatttctatcattcacacctattatatacaatctggaaaatacaaaaaggtacgaagaagaaaattaaaatctgccctaatcccagaattcaaagttaataaaaaatgttttcacaggcctgtagtcccagctactcagaaggctgaagtgggaggatcccttgagtccaggaattcaagccagtgggctatgatcctgccactgtactccagcctgagcaacagagcaagactctgtctctaaaaaaaaataagtattttattttaattmatcaagggtattgttcttgaacttttaacaaaactgggattatagtctacttaacactttgccctttgcttttttcacttaacatattgtaaacattttccaaaatcattaacgagcattaaagtcattaaatcaaagataccatgttaatgtctgcataatatgtcacactatgaaaataatataatttacttaatcattgtccaactattagtcacttttgacttaaaatcacataacatgtttgttatatgatccctaaaataacacagcataccaggctaagaagttacacagtatcatttaacaagaaactatatatgaaatccatcttagcactcagtacagtacctgcttgtaaaatacaaagtacatctgcagcttcctccaaatatactggactctcaaaaagttcagaagacttgaaaaaaaattctccgttggactcagacaccttaaaaaagaaaaaaaaaagatataaactctattaatttcagataattaaatccctatttttataattatttcttgagctcacagattatgtctcttaatgtatcactaatataccacagcagaatatgcagtattcaatcaatttcaaccaatttaaccacacacagcagtcatgttaattattattcagatatagcagyatcaatctcaagaactgatttctatctaaatatttggagacaactggaattaaaggataaggcaagccaaagaaatgaactacaaatgcagcctacataaactgctttaaaaaagccaagaacagtcaacctaaagcagtttaacaaatataaattcatggccaggtgcagtggctgacgcctgtaatcccagcactttggaaggccaagatgggtggatcaactgaggtcaggagttcgagaccagcctggccaacatggtgaaaccctgtctctactaaaaatataaaaattagccaagcatggtggccatctgtaatcttagctactcaggaggctgaggcaggagaatcgcttgaacccgggaggtggaggctgcagtgagccgagatagcaccactgcactccacactgggagacagaatgagactccgtctcaaaaaaaaaaaaaaaaagaaaaagaaaaaagaaaacaaacaaacatatatatatatatatatatatatatatatatatatacgtgttcaattctgaataaactgttggaaaaacaaagaattaaagtttagataacaaaatctactaagctttttggaaattctgcacaatagtttcataaccatatttcctatataatgaagagtgccaaactaaaaaattggaaatctcccagaggagaaaggtcacttatttattagagtcaccaagtgaggtattacggaaaagatgaaggaaaactcttggctgaaatttaaaagtatcaaaataggctgggcatggtggctcatgcctgtaatctcagaactttgggaggccgaggtgggaggatcacctgaggtcaggagttcgagaccagcctggctaacatggtgaaaccccgtctctactaaaaatacaaaaattagcaggcatggtggcgggtgcctgtaattctagctactcaggaggctgaggcaggagaatcgctttaacccaggaggcaaaggttgcagtgagcaagatcacaccattgcactccaacctgggcaacaagagcgaaactctgtctcaaaaaaacaaacaaaaataaataaaagtatcaaaatagtaaaaaagagaaggaaattataattggtgatggaaattttagaaaaattttttaacataccttaaaaactgtctaaaactcggccgggcgcagtggctcgtgcctgtaatcccagcactttgggaggccaaggagggcggatcacgagatcaggagatcgagaccatcctggctaacacggtgaaaccccgtctctactaaaaatacaaaagattagccaggcatggtggcgggcacctgtagtcccagctactcgggaggctgagacaggagaatggtgtgaacccgggaggcggagcttgcagtgagccgagattgtgccactgcactccagcctgggcgacagagtgagactctgtctccaaaaaaaaaaaaaaaaaaaaaaaaactatctaaaactcaccaaaatcctctctaccagtattttctatgaaaacagaatttagtcctttctctttttgtccacaatttataaaactaaactttatttactataaattaactgactccccaaaattataacagtaaataaacataaagatctaatttagtgggtttttgtggtggtggtggttgttgtttttgaggcagttttactcttgttgcctaggctggagtgcaatggcacaatctcggctcaccacaacctccacctcccaggttcaagcaattcttttacaggcatgcaccaccactcctggctaattttgtattttttagtagaaacggggtttctccatgttggtcaggctggtcttgaactcccaacctcaggtgatccgcccacctcggcctcccaaagtgctgggattacaggcgtgcaccaccacgcccagctaatttagttatttatatgatagaactttgacattcaaaaattttaaattcagagtttcaattaactatattacccaaaggtctatgacctaagtaatctataattttacaaagaagataacttgaatagctttcattagtgtaaagaagcactttggtcatttagtgattgagactagccaatcatcctacattcaattcagcattgatactcccctctgctgtcatatatgaggctgttactgctcatccagtgtctaaatgaatcacatacatttttcagttattcacattcagttattgaaaatgttacttcattacactttatgggagaaattgtatcccataaaggtattatctgctaataaatttgataatctgtacaagccttgagataaatccctttctaaatgtcaagaagccactgtgtatggattccatacggaaaaaaatccctctcatagaaaatgcagaacaagtataaatgagagaaaatgataattaagagaaggactttaaggcagacttataatatcctttcaggctttgaaaggaaamcaaatatatagaaataaaagtagagaaggccgggcacggtgacccatgcctgtaatcccaacactttgggaggctgaggcgggtggatcacctgagttcaggagttcgagaccagcctggccagcctggtcaacatggtgaaaccccatttctactaaaaatacaaaaaattagctgggcgtggtggcgggcacctgtaatcccagctactcatgaagctgaggcaggagaaccgtttgaatctgggagacagagattacagtgagctgagatcacaccactgcattccagcttgggcaataagaatgaaactccgtctccaaaaaaaaagaacaaaataagagtagaggagaattcaacctgcctgacttcttgtctctttttctgtctacctccctatacatagacatcaaatcatgcatactttgagctgtggttaaaagaaatgcaccttgttcataattgccaacagttcactaagcacaagacgcaatcgacgaggtgaatcactgtgttcaaactctaacgtcagtccatgctgaagctgtgataccaggatgctctctccactgcctcctccaagtttatgcctaatgaagtacaaaacatgtaacaattatgaaaacactgatatggaaataattgcataaaaattatcttttattgaaataagctataaaaggatgtataaagtgttctaaaatgttctgttacttctgaaatgctatttagtttgcctgtgtatttcagggattcacatcctacgtataataaatactccaccacataggccaggcacagtggctcacgccggtaatcccagtactttgggaggctgaggcaggtggatcacaaggttgggagttcgagaccagcctggccaatatggtgaaacctcgtctctactaataatacaaaaaagccgggcatggtggcgcgtgcctgtagtcccatctactcgggagactgaggcagaagaatcacttgaacccaggaggtggaggttgcagtgagccgagatcacgccaccgcactccagcctgggcaacagggcaagactcggtctaaaaaaaaataaaaataaaaataaataaataaatactctaccacaactgacaattaacactcacttccactgatggtggcttgctactagattcacaatgggcagggaaggacatagcacctgcccagaatctttgggaatatctaagctttaaaagcctcycaagaggctgggcccagtggctcacacttgtaatcccagcactttgggaggccaaggcaggtggatcacctgaggccaggagttggagaccagcctggccaacatgatgaaaccccatctctactaaaaatacaaaaaattagccgggcatggtggcaggtgcctgtaatcccagctactcgggaggctgaggcaggaggatcgcttgaacctgggaggctgaggttgcagtgagccaagatcacgccattgcactccagcctgggcaacaagagcgaaactctgtctcaaaaaagaaaaaaaaaagcctcccaagtgattccaataaatccctctaatctaggggaagttaccctacctacttcccactgaaagtaattggcctaatgagtttagcccacatacaacagcacattgccatatttctctagataacattttataacatggaagtcaaaagattctggaactgtaactatatacagaaaagacctaagtaaaatgctctccagaatttagattctcattctctcttttctggagagctctaaaaaatatctgattccctgttctttgtcaaatccaaatccacatataatataacataacattacctaagctgctgttctttgctggcatcttgttctaaagcatgaaagtccacggacaacaatgcaacaatggagttgacagcttccactccagaaagaaggcgaaggatgagtttcttatcctgagcccagctttggctctggtcagcaggtgcacaaagtgccatccgtaccaaacagggcagaagaagtcttaattctggatcacttaaagatgccaggcaaacaacatccaccttctgcattgcctcaaaagcaaaagggctgacaaactgaagacttgtacattcagtcattattactgtttgttgatcctaatggtaaaaatacaaatgaaagtaggagtttaactttcacatgtatgaacacccaactttctaaaaaccctgaaaaatgtggtgtatctttaataggtccctatgttggcaatgttcctggcacaatcaagacaaggcttctctgtctccctaggtttatactgtcacctgggaaatgggaaagaaaacagagtatattaatgtctcttccagcctcaggaatcttctgctctaatactcatattttacaaagaaggaatatgaagcccagagagatgaagtaacacgcccaaaatagtattactagttagaggcacaatccaaggctgaatcctcatctactaaaatcccagtccaagactttctccactatatcagtcacatgagctccacaaaatgtaaacaaaagtgaatggtcatagttaagtgctttctttcataccccgatagtttcacatgcctaccccgatatacatcaagaactattgggcttctctttctcaccctccatgagtcggtggaaaaactagcaaatcactgggcagaaccaatgccagattcaaggctctggaggccacaacactatcctatgtcccctgtgttaccgggtaaaaagcagatgtgtgggtgctatgtgagaaagacgcgtctcattagmgcacttctctgtctccaggaatcatccaaggcacaaaaagtaaacaaaaaggcagtgagctggcagccaaagcagtcccctctcaaggccgaccgactagcagcagcgtgggtaaaagtcgtgggtaaaaactgctttgctttcagggaggggctgctcttttaacagaggggcgggctgactggagcagaggagccaagacctgcgtgctcctccgtctcgccccgggcgcaactagaaccaataagtccctcaggctgagcaaagtctggccaggctccgacacggacctaggaacgcgctgaggccagagaagcggacgcttcataccttaagatctaccctccagcctcacggaaccgcacacggactccgcgtcctagaggcgggacgcggcagaaatcgagagcgcggtccgatgttgggcctaggcgatatccggaaccccaaaccctagttgtgcctcgagtcgactcggacaccaagaactcagacgccgggaccaaccgggttgtcgatacaaagtgggaaggatgggggcaccacacaaaggcagaaccgggactgtaggaacggaaaagcgggagactttttcaacctgcacccagcaccttcattcatccccagcgtctgactcccgtcggccaccgtactggtctgagaggaagggtggctgcgagaggaaaggcagagacgtcggcgccaatgcaactgtgcgcgtgcgcggccccgcccctttctccactttatttgccctgccctacttgttcgccaaaaatttagaaatgtgattctggtaggctctgatttccagagcctaccagctccttccttttagacaagcaagccactgagcccctcagaacttaaatttcatcatcacaggattgccatggcattcaaatggcataacgtgtgttaaaatcgttcccactattctttgacactagtggtaccaaactgtactctttaaatctttgcctgtgccttcccagaaccaaaattctagaatcccaggatttgtgggagaattttaaaagtgatctaaccccaaactttcttccgctcttgacctcacacctccgctgtcagaagttaaacaccttcctttcaggttcttaacttgggggacccatagaaccttagagaggcaatgcacggggattcaggaattctctggaatccgttcagaactgagtgctcggcacttcttctgggaagagggtccaaaactttcaacaacttctcaaaggaagtctgatcactcagaaaagaaccactagtctatatatgaagaaccgctagtccatatgtcttcatactatttattgttcctagttcgatcaacgtttatttggcaacttctatttaccagatattgtgctaggagctggaaataaaaatattttacaaagatatagcactttataacctctttaaaaataaagtcagagccgggcgtggtgtctcatgcctgtaatcccagcgctttgggaagccgaggcgggcggatcacctgaggtcaggagttcgagaccagcctgacgcaacatgactaaaccccaactctacaaaaaatataaaaattaggccgagcacgatggctcatgcctgtaatcctagcactttgggaggccgaggcaggcagatcacgaggccaggagttcgagaccagcctgaccaacatggtgaaactccgcctctactaaaaatgcaaaaattagccaggcgtggtggtgtgcgcctgtaatctcagctacttgggaggctgaggcgggagcattgcttgaacctgggaggcggaggttgtggtgagctgagatcgtgccattgcactccagcctaggcaataagagcgaaactccgtctcaaaaaaaaaaaaaaaaaaaaaaaattaccccagcgtggtgatggagcacctgtagtcccagctacttcggaggctgagacaggaaaatcacttgaacctaggaggcagatgtttcagtgagcagagatcatgccaccgcactccagcctgggcaacagagccagactccatctcaaaaatatatatatatatatgactttcaacatagatcagcaaaggaagaaaagaattgtgtgttgcaatgcttctgaaaattttttccacctgacccacaataatacatttcacattgtgacccagaaaaaacatatgtatatatccacatacaaaaataagtgtaagtgtataaatttatatgctatataaacatataaatatataacatataaacccacatttacatggaaacaaatatttcgtataataacacacactacatgtttctacttctctttaaaaaactgctggtcactgcacactaaaactgatttcacactctattaatgggttgcacactgtactgtcctagcatttttaagctaatatttgggatttatttattgaacacttgctaggcactgtaataaatgctttatatatattatctgattcaatcttgtgacgtaggtaatattcgccttttgcaattgtggaaactgagagagggtaagcaatttcatctccatggatggtcatttcacaggaaaagtgtgaaggcagtgcaaacattggtttgagggacgaatgagaggaagatgtgggtatgaactaagtgattttaaagatcctttccaactctaattatgatcctctgttcactaatggagaaacatcatgcagattcagtatctccatcttgatctatggagaaacagaaaaatcactgaatgagatggctgcagtgtcacataatgagtgctgacacttcctccaagtccccctctccttttcttccagttcaccaacttgaccttgagttgctcaagccagaaacctaaaagtcatcctagactctaatctctcccccttgtattaatttagcaaaaatctttataatcattgaaacattgtaatgtttgccaataaaacttttttttttttgagacagagtctcgttctgttgcccaagctggagtgcagtggcacgatctcggctcactacaacctctgcctcccaagctgaagcaatcctcccacctcagcctcctgagtagctgggacaataggtgtgcaccaccacacttggctaatttttttttttttttttttgagacagagtctcgctgtgtcacccaggctggagtgcagtggtgcgatcttggctcactgcaacctccgcctcccagggtcaagcgattctcctgcctcagcctcctgagtaggtgggattacaggtgcctgccaccatgcctggctaattttttgtatttttagtagagacagggtttcaccatgttggccaggctggtctcaaactcctgacctcagctgatccacccaccttggcctcccaaaatgctgggatttcaggcatgagtccctgtacccagcctctctttttttttccttttcgacacaagttctcaagaaaagagcggcagtgcagttgggcgatcttggctcactacaacctcaacctcctgggctcaggtgatcctcccacttcagcctcccaagtaactgagactatggtcatgcatcaccacacctggctaatttttctatttttttgtagagacagggtttcattatgtggccaggctggtcttgaactcctggactcaagccatctgtcccccctcagtccaccaaagtgctaggattacaggtgcaagccactgcacctggcttgaccagcttgcttttattcttctactttatttttcaatcagactggaggaagagagaaacacaagtaatgaaaaaatgagaaaaacagaaaaacacattagaatatctattatgtttcatgtatactaggtgcttaatgtaggttgcagagtaattgagcttccagcagttagaagacctaactatacaaaggtgaggaccaatgtccttcagaaatagtcatagaattccagaagcacaaggatctcagaagacatctagctccattttgctcaacatgatgctctttatagtgtgactattttatcttgtaagatgtctttcaggagggcacgatggctcatgcctgtaatcccagcactttgggaggccgaggcgggtggatcacgaggtcaggagttctagaccagcctggccaatatgatgaaaccctgtctctactaaaaatacaaaaattagttgggtgtggtggtgtgcacctgtagtcccagctgcttgggaggctgaggcaggagaatcgcttgaacccgagaggtggaggttgcattgagccgagattgcgccactgcactctagcctgggcaacagagtgagactccatctcaaaaaatatatatattctttcatgtttcagcctgtaaagatctttgactcttttacactggctatctgttttagcttagcagatcatatcttcattaatattatggataaaacattgaatagaattgggtccagccaagacttctagttcagcattagagacatccctccaggttgacatagctccaccaatcaaggctcaagtatgagactgttttataaatcagcccaactactaaaacactaccctgctttgggataaagttgaatttctttaggatggaactaaaaagacagattgattgattatatttttttgagacagagtctcgctctgtcaccctggatggagtgcagtggctcaatcttggctcactgcaacctccgcctcccaggttcaagcaattctcctgcctcaacctcccaagtagctgggattacaggcacctgccaccatgcccaactaaatttttgtgtatttttaggagagacggggtttcaccatgttggccgggcttgtgtcagtctcctgacctcaagtgatctgcacggcttggcctcccaaagtgctgagattacaggcgtgagccactgtgccaagccctaagacagattttttttttttgaggtggagtctcagtctgtcgcccaggttggagtgcagtggcacaatctcagctcattgcaacctctgcctcttgggttcaagcgattctcctgcctcagcctcctgcgtaactgggattacaggcacccaccaccatgcctggctaaattttttggggtattttcagtagagatgggttttcaccatgttgaccaggctggtctcaaactcttgacctcaggtgatttgcccacctcagcctcccaaagtgctgagattacaggcttgagccactgcgcccaacccaaaaacagatttttatggtctgacttaaaactctagcttggagtcctgccgtatcccaccatggtgtcattttagtcagttggaactgtttatgtctcaaatccttctcaatattcttggaccttctcatcacagttcctcctgtctagaatgcttttcattctcttttttaatgcaaactcctaagtgtcctttaagtctcacctccagtgttcccttgctaagagacctttccctgacaaaccacctaccctttaacttatcaggtatccctattctatgctctcaaggcaccttttgcttctttcagctatactacttaacacattatattgtaattgttagaacttctctgtctctcccactaaaaagtattttgagagggccgggcacggtggttcacccctgtaatcccagcactttgggaggccgagatgggtggatcatgaggtcaggagatcaagaccatcctggctaacacagtgaaaccctgtctctactaaaaatacaaaaaattagccgggtgtggtggcgggcgcctgtagtcccagctactcgggaggctgaggcaggagaatggcatgaacccaggaggcggagcttgcagtgagctgagatcgtgtcactgcattccagcctgggggacagagtgagactccgtctcaaaagaaaaaaaaaaaaggaagtattttgagagcagggaccatattttagttccttgccaaaggcacagtacgacacttaacttactttgttgaattaatgattcaagcataaagataccacgatgcatagtttgcaaatattctcccattctgcaggttgtctgtttactctgttgatagtttcttttgctgtgcagaagct

SEQ ID NO: 97979 - DNA, 20299 bp, Homo sapiens
gagcacgggggatgaacaactggtgaggaggacacggtgggactcagcgggcagagccccacgaaggaggacgtgacagagaaaagggcagtaggcaaggactcacgggcacgcccttgcagtgtctagaaagatgtgggatagcggacgggcttggaactctgagatctggttcttctatgatattgtattaaacaaaactcttctggttgcagtaacagaaaacaacttgagctagctgggggaaatttattctgagaggcccagatgtctcactgagcccactcaagggctgcagctgggcctcaggaagagcatggaaccagggctggaaattgtcagcacactgtccatggcaggtttcagcttctcttggtgcatttgcttcacttctctctccgcagactttctctgctccacagtctaaaggacaaagggtgctgcaaagttaataagctaaagtcctaagcaaccatagggactggctaggctcagtcccagtccaagttcctgggatagagaatctgattggttccacttggaccatgtgtgcccccttggtccaatcaactgtagggatgggaggagttaagcaatacaattatggctgccgctcgggccctgtggccataattgacaatatttttttatttaaaaatgtggaccgggcatggtggctcacgcctgtaatcccagcaccttgggaggctgaggcaggtggatcacttgaggtcaggagttcgagaccagcctggtcaacatggtgaagccccgtctctgttaaaaatacaaaaaattagctggtcatggtggcgcctgcctgtagtcccagctactcaggaggctgaggcagaagaatcgcttgaacctgggaggtggaggctgcagtgagccgagatcgcgccactgcactccagcctgggcggcagaatgagactctgtttaaaaaaaaaaaaaaatgtggcggctgggcgcagtggctcactcctgtaatcccagccctttgggaggctgaggtgggtgggtcacaaagtcaggagttcgagaccagcctggccaatatggtgaaactttgtctctactaaaaaatacaaaaattagccaggcgttgtggtgggtgcctgtcccaggctgctttttgtgttatgtggggatgaggcactgaccctgtgggccgggatctctctggggacctttcccttgctttctgtccatgctccttaaggcaagctgcatgggaggctgaggcaggagaatcgcttgaacccgggagccagaggttgcagtgagctgagatcgcgccactgcactccagcctgggtgacagagaaagaatccgtctcaaaaaaagaaacaaaaaacgacaacaaaaaaatgtggcattcatcagctgggcagacacccacatagctgtgagctcaccaacggtggacattcagatagtcaccttttctgagcttcaaactagatatataagtaacacaaatggctgcctctacaggcaactgtggaaggagtcaaatcccttgcatactcaaaacaccacagaaaagaattgacagcgatgattatgctgatcctttctggagggagaatcaatggttgtacctgggactttttttttttttttaataagtaactctcagccctgtaaaacagtgctcaccccttcagggagatatgaggattttaaaatgtggaaacgttgatccagggaagcaggcaaacaccagagatgagagagttttacaggattcgtcagaggggacagtggaggacagaccagagggctagctagcaatgacggggattctgggcgttgctccatatgcgagactcaccaagaactgggtcatgtgtgtggaagagttactgagtgtgaggcaagaaccatgtcttttttctccgcagggtagaatggaggttgcactgttcaggccggccactcttctactggctgacaggatgccgcctgagatgaaacagggtgcgggtgcaccgtggagtcattccaagactcctgtcctcactcagggattcttcatttcttcttcctactgcctccacttcatgttattttcttcccttcccatttacaactaaaactgaccagagccccaggaataaatggttttcttggcttcctccttactcccatctggacccagtcccctggttcctgtctgttatttgtaaactgaggaccacaataaagaaatctttatatttatcgaaatattaaagcactcgctctgcaaagactgtgtccatttattcattagtctacatatatttgagtacctaagacagtgggagtgtactaggtagtagaaggaagacaaaacacagctattgttgtttaggtgttcataatctaggtggagaagcagagacatccacaaacattacaataggtaattaaatgtatagtaaaatccataattattgctttgaaacagtatcagcatccaagtaattcctccaaagaacaatttttgaagtaaaagagaaaactcagaagtaggcaatgggtggggtctggtattgatgtggagaaagtagtgatgggatggagaaatagtggcagataccaataatttgggggtgctttgggagaataagctaggatctagatgattaaaaaaaggtgctctggacaggatctggtttgcctggagggtgctgaggtggagtagaacatgcttaaagaaaaggcaaaatcagaaaagtgacagttgaaggaatgtcctacacatagccaccgtcagtagtgtctgaccaatctggggttttatcttggaccacttatttctctaccactgagccttagctgtttctactatagaaggagggatttgactattcagtagttgccagacttttgtatttcacaggtgataaaatgtaaaaaataattaaacctgagatttctttcttttttttttttttttgagacagagtctcactgcgtagcccaggctggaatgcaatggcaggatcttggctcactgcaacctccaactcccaagctcaagcaattctcctacctcagcttctcaagtaggtgggactacaagtgtgtgctactacacccagctaatcttttttttttttttttttgaaatggagtctcactctgtcacccaggctggagtgcagtggcatgatctccactcactgcaacctccgcctcctgggttcaagcaattatcctgcctcagcctccccagtagctgggattacaggcgccccccgaccacacccggctaatttttgtatttttagtagagacggggtttcacggtgttggctaggctggtctcgaactcttgacctcaggtgatccacccacctcagcctcccaaagtgctggaattacaggcatgagccaccgtgcccagctattttgtatttttagtagagacagggttttaccacgttggccagcctggtctcaaactcctgacctcaagtaatccatctgcctcggcctcccaagtgctgggattatggatgtcaggcaccaggcccggccgaggtttctaatttttaattttaatgtccaagtaagagcattaaagcaactatcctctattagcatcttttcatagaaaaatttttagtatcaacattatagggaggtcatacttgtagaagaatggagtggaatctactttattttatgaaattataaaaaacctgattatattttccatatggtcctcattttgtagagtaggggtgaaaactttatcacagcatgagtctgaggatcattattcagaaatcacaagagacttgtcctgtagggtctcttctggctctgacattctaggattaaaataaacagtagtaggactcactttacttcttgtgttactgaaactgcctttataaaaattatgacaaatctgacctaactgattccattttgcttctaacctccaagctgcccttgctcattcctgggcacaggccaagctaactatgagaggaatttttgctgcttaactttgaaacaaagataatagtcccttcctgaaacaaaccacctccctgcttgggaatcagatctcctctgtaaaactaacaaattagccacaagattagaaattatggctcagaaattatgtagacagaggccacaagattcctaacctctccagttgctcctatacaaaacactgttgtagtctcagcaatgcaccaagatataacactctgtagttgtctgatataacccccggagttctttgtcctacctccaagatgattaaggagcgtggacacaaaggtggggttacagcaaaagtttaataagcgaaagaagaaagctctctgccagcagagcgtgggggccagaacgggtgtcccctgtgaggctggggtctttatggactgggaaggggaagcaatgtgcttagtccgacagctgtcttggagaactcagcttggcaaggagccttggcccaggaccaatcaggagctgaaatgattcttagatgctgcttagcttggcccaagacctatcaggggctgaagtgatgattcatagaggctggacttacaggtccaaaaaggaaagtagagtgcccactggaactcaccggagcccactatgcccatgcccacaaaagtagaagcaacttcatcctgggagcccactgactatacaaaggacaaaggcatttctatgccaggccttgttcttttgtctgagtgagctgaagttttgtgcaagcttttatccaaatgggccagaggtttttccatctgtgcagccgtgggcatgtctccaggcacaacaccctatgctagttctcttatgggtgctggtagcttgaattttttcccaggctgctttttatgttatgtgggggtaaggcactgaccctgtgagccgggatctctccggggacccttcccttgctttgtgtccaagctaactaactgctttcaacattactattgtaaaacctaatattggggttctaggtatttttcagacccttcattctgatggaccagctggcaccactcacatgggcaaactggctcatctggtcttgcggcccccaaccaggaattcactcagcacaagaacacaagctctgactctctatgatttcatccttgacccaaccagtcagcatttcctattccctggccccctgactgccaaattaccctttaaaaaacaccagcttccaaattttcagggaggctaagttgagtaatagtaaaactccagtcttctatttagctggttctgtgcttatgaaactctttgcctatttcaataacactgtctcagtaaatcagcttttctgggcagtgggtatgatgaacccaccagttgattacactcctccaccacgtagctgattatgacacctacccttctcagacaccatcagctccaatgttggtgccttatttggacttattctttgtgggtttgtttgtttgtttgtttgtttttcttttttcaaaattaatctctccttctcactcgtacctccaacctctcacatcatctgacccccacaagtacacatacacgattcaccagaatgacgtaggacaatcagggaattctttttaaggatttcatgcgagactgttaatggtttagtgagttatacttttatttgcaattttaaactcttaaaaaaacctcttaagtcaaaagattgcatctttcgtggttatttcccacaagtgctaatacttagtaccctaatctccttcaggagtgaagatgaagctggcttctataaacacgtccctacccttccatcctgtcagcctattttgggactttaccctaaacatgcattgaacggaagctctaaactcagggatcttgtggctgtgactggaggaggggaacagactcagaggctggccctaggtaggaggggcaagggagcgatccgagccccgtccccgcccctcgcatgcgcctctttttaaaaaagcgcgggcgtgccttgcgcaggcgcaatgctggggcgagggttagccgcgcaggtgcggtgaagggaggatggcggagttggtaccttttgcggttcccatcgagagtgacaaaaccttgctagtgtgggagctgagctccggacccacggccgaggctttgcrtgtgagccggggccaggatggagggagggatggagaaagctgcccacccgctgactgggagttcckgagtcctgcctmagaccctcacctgcctgagcctccgctgaaggactcttaattataaaggggatcccaactgacaactgacgacccccaacagatttttagagtcccggagaggtatctctccaccttcagaacgttttaccttccagtgcttcttaaagtttaggattttaagaggaaaacctgttgattaagtgggaagtgttttgaatcgcatccttcgcgaagagaggtttggggaatatgagggcatgtgcrgttttgttttctgggcgtgagatttcatgcatttacttgtcccacccccacagcattctctgttcacagcattttctcagtttggccttctgtattcagtccgggtcttcccaaatgctgcagtggcccatcctggtttctatgccgtcattaagttttattctgcaagggctgcccacagagcccaaaaggcatgcgaccggaagcagctttttcagaaatctccagtcaaggtgggtccaaatatggaattcctagctcckctgaaatgaagtgctgaattcaataataggttagcatttgtccagcacgctggtttacagaatattttcagatgcattgccacactaatcttccagttctctgggttttttacatgaagaaactcaaactcaaggtggttgagygacttgtttaaggttcctgacaagaattatggaaactcgagattgaactaaaacctactgatgctaaacctcatgtcattttatgctgtccctttttaagaaatctcagcttgggcaacaaaatgagaccccatctctataaaaaaaattgtaaagataaggctgggcaccgtggctcatgcctgtaatcccagcactttgggagatcgaggcgggctgatcacttgaggccagcagtttgagaccagcctgggcaacatagcaaaactccatctgtactataaatacaaaaactagccgggcatggtggcatgcgcctgtagtcccagctactcgggaggctgaagcatgggaattacttgaacccaggaggtggaggctgcagtgacccgagattgtgccactgcactctagcctgggtgacagagtgagactccatctcaaaaaaagaaagaaagaaaaataaaaaattaaatatcagccagatgtggcatgcacctgtagtcccagctacttgggagactgaggtgggaggatcgcttgagcccaggagtttgaggatgcagtgagcaataattgcatcactgcactcctgcctgggccacagagtgaaaccctatctctaaaaaatgactgaatgaatgaaatctttgccagaagacttctgcttatatttactttttaatttttttagagacagagtatccctgtgttgcccaggctggtctctaaatcctggcctcaagcagtcctcctgcctcagcctcttaagtagctaggtacaggccaccatgcccagctatatttactttttatttttattttttgagatggagtctcattttgtcacccaggctggagagcagtggcatgatcttggctcactgcaacctctgccttccgggttcaagtgattctcctgcctcaacctcctgagtagctgggactacaggcgcctgccaccacacctggctaatttttgtattttagtagagatggggtttcaccrtgttggccagtctggtctcgaattcctgacctcaagtgatccacccacctcagcctcccaaagtgctgggactacaggtgtgagccactgtgcccagccatatattatatatttactttttttttttttaaagacagagtttcgctcttgttgcccaggctggagtgcaatggtgtgatctcagctcaccacaacctccgcctcccgggttcaagcgattcccctgcctcagcctcccaagtagcagggattacaggcatgcaccaccacgcctggctgattttgtatttttggtagagatggtgtttctccatgttggtcaggctggtctcgaactcctgaactcaggtgatctacccgcctcagcctcccaaagtgctgggattacaagcgtgagccaccgcgcccagcctatatatttagttttatgtgaatttaaaatgtgtgggtgtgaccaggtcttctgccagctgttacataaaggagactgtatcatcatcatcacatcatcatcatcatactcaccatggctcacaaactgcctgtttgaaactcccttcagttctgagaggatgggaacattctttaagcggtattgtagaaaccctattccatattaacatgccaaccaattttactttcccagagccacagaatgatatctcattgtatgcctcaattcagtcatctttcccttttcaaggaccatttcaattcctgattggctacttgatctgactgcttcctactaatcttgctgcctattcttctctatattccattcctcattgaattaaccttgatcaaatctgagaactctgcttagtaatgactccaggtatactactcccacttcagtagcctgttcaatgccctcttagcctgttcaacaccctcttcaatcctggttccactttctgtgactgaaatgattacctgtgagatattatttaacttttgaactatggtctgtttctaacctgtgaccatttcacatagccactcaaatattataaaggtacaactaagattatgaaacatttacttggtatcattttgcaaataatgagtttttagtgctctttggacattgagaccatttcataagctttaggttttgagaatttcacagcataaagcctatcactgagacagtaatgaaggaaatgttctacaactcaatagataggtgagatgagagggcattcatactagatttattactaaactcaaagctttcagttactactcaccccccactgtaatctagtttaagtgttcttttctactttagcacgtacacttagttcctgtcttttttgcctttctaaatacagaaaagagaataatgttttaaaataaaatcaaggaaaggcctaaggcacctgagagggttttgtttttgctttttgggtttttgtttttttgtttggttttttcgttttgtttttttgagatggagtcttgctctgtcacccaggctggagtgcaatggcatgatctcagctcactgcagcctctgcctcccgggtttaattgattctcctgcctcagcctccagagcagctgggattacaggcgtgcaccaccacgcccagctaatttttgtatttttggtagaaacaagatttctccatgttggccaggctggtcttgaactcctgacctcaagtgatctgccgcctcggcctcccaaagtgccgggattacaggtgtgagccaccgtgcccggccaagagggttttttggttctttttttttttttttttttttttttggtgaaatgaaggaaaatggttgctgcaaagttatccaagctgacagctgtctgtgccacccagaggctcagagtttttctgaagcttcctggttgtctggaaaggctccactgtgactcacgatacaggccggtctcgccagtggcactcaacgtttaaaaactggtctttatttctttcccaacaggcatttctccttcttttcagttggagaaagtaatttcattttttacttgctcattgttttattcattcaatcgatagatcatctgtgctctattatatgccaagaactatgcttagttctggaaatgaaaaaagaataagctatggtttcatctgggacttaaggagcttataaaccagtgatagaggaaggtgcataaacaaatcaataaagaattaactttacggccaggcgcagtggctcacacctgtatcccagcactttgggaggccgaggcgggcagatcacaaggtcaggagatcgagaccatcctggctaacacggtgaaaccccatctctactaaaaaatacaaaaaattagccgggcgtggtggcaggtgcctgtagtcccaactactcgggaggctgaggcaggagaatggcgtgaacctggcaggcggagcttgcagtgagccaagatcgcgccactgcactccagcctgggtgacagagcgagactccgtctcagaaaaaaaaaaagaactttactgttaattcttattaatttctaatacaaataaatttgactttatttgtatcatttgaatttcatgaatataatatactacatttaaaaaatgaaatatataggaaaacttgtgatgtaagaaatccacaaaaatggataaaatgttttaagaattaacactcagtagatatttgcgttctcaaagaagcacgtaaatgcagatatacctctcskttcagttgcatgtaaaatttatagaagtatttgtatttcctttttttttttttttgagacagtctcactctgtcacctagggtggagtgcatggcaccatctcggctcactgcaacctctgcctcccaggttcaagcgattcccctgcctcagcctcccgagtagctgggactgcaggcacgtgccaccatgcctggctaatttttagtatttttcgtagagacggggtttcactatgttagccaggatggtctcgatatcctgactttgtgatccacctgcctcagcctcccaaagtgctgggattacaagggtgagccactgcacctggtgttatttcatcttttaacgggttagtaacttggggagggggatgggtggtgggttcatcttatctatattcaggtcatattctcaagcaggaactactgaatgggaagacagtaacaatttttcattgcacacttggtattgacaaatctcagatctatccaaaataaaatctctagcggttgtgatatttatgggtctatctcctatgattttaggttcgtcttggcaccagacataaggcagttcaacatcaagcccttgccctgaacagttccaaatgccaagaactggcgaattactactttggtttcaatgggtgktccaaaaggatcatcaaggtaaaccttgtagattttttttcacttaccacactctcctttcaacattgaaatcctagattttagacagaagtattgaactggattgtagggaggagatgtgagaggcctctaccattgaggataaattgacatgtctgaattggcctgctacctagaattaataatctcagtcaattggatggtggtatccgtaattttctccactgtttttgtggcatataataaaaaatggttgtctctatctagcaattcatttgcaaatctaacttgattttgaagccataggacacctcaactgttagcttgaatgactggagtgtagttgttttttgggttttcttttttttattgggtttttrttttgttttgttttgtttttgagacagaggctcgctgtgtcatcaggckggagtgcagtggcgctatctcagctcactgcaaaatctgcctcctgggtacaagcaattctcctgcctcagcctcccaagtagctgggactacaggcgcccaccaccacgcccagctaatttttgtatttttagtagagacggagtttcaccatgttggccaggatggtctcaatctcttgacctcgtgatccgcccacctcggcctcccaaagtactgggattacaggcgtgaaccaccacgcccagccaagtttttacttttaataacaaaacattttgaagcctacattaagaccccaggaaggaccttacattaaatatccttacagcttcaggagctttctgaccttgaagaaagggaaaatgaagatagcatggtgccacttccgaagcaaagcctgaagttcttctgtgctttagaagtggtgttgccatcctgtgattgcaggagtcctggcattggcttggtggaggagcctatggataaggtggargaaggtctgttttcactgggagtggaggagggtagggatttggagtggaaaggatctttctttttttcttactttccaaaactcatcttttcagatacatatcaagcccctccctctctgagctactgaagtcctgggcagagtttttctgtcttacaayatagggttttactgtaggcaatacctgattgaacctttaaatttaaaatcrtacagctgacttcctgccgagaagcttaggaggaagaaggaagtaatgtttttacagtttttggttaagaacttgcttcgaactaaaatagtccttcaaatatgtgtctcttgtagctctcggttatcccagcaaaaccatctaaagatttttttttatcwatttattattttttagagataggatcttgctctgttgcccaggctagaatgcagtagcatgatcatagctcactgtaacctccaacttctgggctcaagggatcctcctgcctcagcctcttgagtagcgaggactacaggcgtgcaccaccacacctgcctaattattattattattattatttttagagatggggtctttctgtgttgtcccacctggtctccaactcctggcctcaagtgatcctcttgcctcaggatcccaagttgctggggttataggcatgagccaccatgccaggtcatcatctaaagatttacataaacttttgtataaacattcagttcctttttttactcataaaagggtttcagcagaaaaagtgtctaatatagatacctagaaagggtactcagttgatactgatgttgagtatttttttagtattcatggccatcatgcttagggtttgaagtcagaggcagggctgtaggctaatggagtggagtaggctcccgggggtgatgcccagggaggagccagattatctgtaccaaagttttttcttttttgagatggagcctcactcagtcgcccaggctgaagtgcactggcgtgatctcggctcacagcaacctccatctcccaggttcaagtgattmtcctgcctcagcctcccaagtagctggggttacaggtgcctaccaccacacctggctattttcttgtggttgtatttttattagagacagggtttcaccatgttgcccaggctactctcaaactcctgacctcaagtgatctgcccaccttggcctcccaaagtgctgggattacaggcatgagccactgtgcctagcctcttttttttttttttttttttttgagacagaatctcactctgtcgcccaggctggagtgcagtggcatgatctcggctcactgcaacctccgcctcccagttcaagctattcttgtgcctcagactcccaggtagctgggattacacatgtgtgccaccacacccggctaatttttgcacttttagtagagacagggtttcaccatgtccgccaggctgtttttgaactcctggcctcaagtttcaccacattgaccaggctgttcttgagcccctggcctccacctgcctcagcctccccaggtgctgggattacaggcatgggccaccaggtccagccaaccaaacctttttcgatgagtgattccagcccttgatgcataggagggtagggtctgtaggagtgtagccttaactgatcaatttgaaatctctgggtgatgtgagacatgtgccaggttcttggctcttatctcccttctagtacctcaggaacttccctactagatggaggtagtaaaaatgggccctgccaggatgtacctataacagagccattcaaccatacgcttgtgccatctgcccttagtcatgaaggttttgagctaagaatcgtggatgcttttttattttttaaacatatagcaattatcattcaaataggcaccttaaatccatttgttttggttggatttaggaccattatcattccttatgaaaaggaagacagcccagaagcttgctattcagaaggctttgtcagatgcattccagaaactgttgattgttgttctaggtaagactgtcttgatcatccttgaagtacttcagtttcagtaagcaaataaactcattttgaaaagttaattgaataaaaatattgatatctaaagcactctatagtatgctttcatttgctaaattatttcacaccaacaggctcaaatttgttctgtgtgacatttgtgaaaaaaaatgacagcaaatattgtccccagtttacagatgtgaaaagacttgcctcagttcccacagaaaatgtttaagccaggtcttctttaattgcttacctatcatacagaatagtgattataagttttggacgcatggatttgagtcctaactctgtctcttagatttttaatgcaattaggccgggcgcggtggctcacgcctgtaatcccagcactttgggaggccgagatgggcggatcacgaggtcaggagatggagaccatcctggctaacacgatgaaaccccgtctctactaaaaatacaaaaaaattagctgggcgtagtggcgggctcctgtagtcccagctacttgggaggctgaggcaggagaatggcgtgaacctgggaggtggagcttacagtgagccaagatcgtgccactgctctccagcctgggtgacagagtgagactccatctcaaaaaaaaaaaaaaaaaaaagattttttaatgcaattttaggtcttatagccagagagatttgaaaatacttaatatctctaagctgcagtctcttcatctataaactggggttagtaattcagtcagccttatggaggacattgtaagagtaaatgagatgacaaatgtaaaaactcggagctacacttacaagataagcagacatattaactattattgtcattgttgatttatctctgaataaataagctctctgctgaagagtttattagattatgtttcctgaatcaagaattcagtttcagctttcatttctggcactgacacattgggcaagtatgattcttatacaaaaatcagctgctttgccgtgagccttggaattggtcatgctattgaatatattccctattgcttgtattccctattgagttctacagtggcacgaatcttataggctgtgcccaaaggaagcctaatgattagcaaagagtccctgaacagagttgctcttctgcttcacagccctaaaggcttagagactgagagatcctaattaagttaccacagacctttatttgcttgtaggaggtggccctgactgctctcagctttccaacctgggcaacagcccttctagtgaaagtcttacttccttggtcatcaactgtcaagtctgagtaacaacatttaagaaccaaacgaagtgtgtgtgttgtttacctctccctaatatacaaaggtatcttgcacacactgaaaacttcttagaccaaaagcctgatggctctagtttgccttgaaggtagttctattgtctataagggtatgtgagcctgtgtctgccaataaaatgttcaaatgttctctctctcagaagctttgttcattgtatctggtggaatgaattttggttcaaaaggagtagacacctgagtagacaaaagaaggcccttgcttctaatgtgaagtgtctactagcccagtggtctctattccaaatttgaacttgctttgacccccatctgatgccttaccatttagtcatattatgattgagcattttggtttccacattttttatttcttatgttattccttagttcctatctgtaagatcataaagtcctttgtaccgaatatggttgatatttcatacatatgttaaaaactgaggtgtgaggccagacatggtgactcacacctgtaatctcagcattttgggaggccaaggcaggaagaccacttaaagccaggggttcaagaccagcctgggcaacaaagcaagaccacgtctctaaaaaaaaaaattaggcaggcacagtggtgtgtacctgtagtccttgctactctggagggtgagccagggggatcacttgatcccaggaattccaggctgcagtgagctgtgacagtgccattgtactccagtctgggtgacagagtgagagaccctgtcttctaaaaaaaaaaaaaaaaagaaagaaagaaagaaagaaaaaactgaagtgtgagatgaggagataaggaaacttccaggaaaatgctcttattttctgcttttagaaaccaaaacaatgtttcatcatggggtgctaccattatatgcaggaagttttagaatgaaaaagattctgaattgatcctcgctaactttatttcagaaagtggtaaaatagctgtggagtacagacccagtgaagacatcgtaggtgtcagatgcgaagaagaactacacggtttaattcaagtatgtgaagataaaaactcaggggtaacatagccagtgtaaccataattcaaaaaaaagcagcataatttggaggataatttgtttcattcttaggaaaatgtgaaactgatactacttttgagtgcagagtatttctggggcttttcctgaagtcttgacctttggctctgaccgcttatttgaagtttggagaggagaactgaggactatcagagtattactacagttgtggacacaggagagggattagtcttcccccaggagttagggattccaggctgcttgaacacaggcctttttagaactttcttcaaacagaatcccagagatatggggagaaagtaactggccttaagaatgatcgtgctacagctttcgaaaactataatgcctttcaaatacagtttattacctggatctcaatatctcacgtatatcttgggtagaatattttgctgagatctttctgtaaatcagttacaatcatgtgctacaaaatgatgtttcggtcaacaatagaccacatatatgatggtggttccataagagtataatggagctatccctatacagctataccattttttatcttttaaacagtatttttactgtacattttccattttacatacataaataccttccgttatgttacaattgccttcagtattcagtatagtaacatacagtacaggtttatagcttaggagccataggccataccatatagcctaggtgtgctgtaggctataccacctaggtttgtggaagtatatgctatgatgttagcacaagggtgaaatcacctaatgacatatttctcaagcttctcctcacatggcaagcaacgcatgactgtatatgaaagctcttaaatagggattaagtttctaaattaatctctgaaagaaaacagtcattatttactacatatggaattctttaaaaaaagtagcaaaagtgttttttttcagtaggaacttaatttggggctagagtgttttatttaactttcaccccaaagttgcaaagcgttttgttttgaagtttttccctgtaaaatagttattttaattcaatttaaataaaacccatcaaggaaacttcaagctttaagaagtctagcttcctgtgaaatgtgagagaaagtcagcactgatttcagaaatctgattataacaatagatccatccctaaatgaggcaagtcttggaatcccttccattgtaaaaccattaatctgcaccatatacctatgctaggcactggcataagatgaagcacgttcttagagttcacatgctggtgattgtgccagacaatgagtaataaaataggtaacaatggctgtggaggaagtcagctgggttccagttatagtcgcatttcaggaaattatttaacagctgactttaacaacctaagcctcttctccatgtgtgcacacagggtagacctctgaagagtggcgctgtaatttctagggtaatggctgtgttaagtcaaggcaggatgacagttcaaacttctctcccagactgaattgcccacctcccaaaacccctcctacagaaaatttggagtcttcacttattccctggcagcccctacctaatagagtggtgaattatcaaacatgcaacaaaggatatggaaagtttagcaaaaacggcaacattttggaatgaatgaccgtaatgtgcgttctgcctgccaccctaactagcgcacattttgcaggtcccttgctctccctggaagcagtatggccaagaggaggaagggtatctctcggatttcagcttggaggaggaagagttcaggctgccagaacttgactagcatttctgaatatcccaaggcgaggtcatgtaacttccttgggaagctctgtcgtgcccctaccccacgccgccccaccactataggctgctggagtcctggaaccacctgggtcggccgcccaaatctttcctggcgaaggggagggaaggggtgttctggtggagtgggaagggaggcttgggtaggattgtgggataagatcgccctggtgacgaggagcggatctcgaacggaacttaataaaggttgcctagataaagatatggtaaataacggacgaggcggggccgcggttgctaagggcgcgggcatctggtggctgccataatggcttctgctcagtgcgggacgccaacttctgtcatgtaccggctgcgtctctggtccctatggcccctcctcacgtgacaactactgtgactactagtccaggaggctcagcctctggagtgggtccagggcccactccagctgacctccgaccccctgaggccaactgagccctgggcttggcgctcctccgatctccccccggaacctccctatgcgtttatccacccccacccccatacagacccgggagctttgataacctgaggtcctctactgccacccagatgtcagcctcgcctcaggaaccgactgagactttggttccatttctggacacagattcagctggagagctgcccctggggccagagaagttcgctgttgcacaccaggatctgaatgataagctgactcacaagaaaggctcccagagttggttccaatgctagactgggatcagaaccagacggtagctcggcctctttgcctcaaaagtaaggttcaaactgtaagtctagatcaggctgcagatcattaggcatatgaaatacttgttccacctctagatagtcagaattcaaaagcaatgaagattagtgtttcacccaaaaacctgaagaagaaagatctacctaagcatcggaggcttgctaaggttgttgttggaactccacaccgatttgtatcaaaacctcagtgtcagaaacaaactttacaagcatttagtatttagattcaggtatggatatactgtatctgggcagccttcctccagaagtccaggtgaaagatgagcctccagggccccatgagcaagttggacttttgccaattctatctagagcccgaaactcaaaatccacagaccctccaagagatccagtcatcttcactccagcaagaagccccagcacagcttccacaggtccctgaatacgtagaaacttcttcaaccccgtaggaggccccagctcttccttctcagtcccttaagggggtccattcttcaacagagcaggaggccccaacacagctgctacctgccctgaagagattgtagctcagttatgaatacgttatcaggtaaatgttgcattaaaaagttggagtgaggccaggtgcagtggcttacacctgtagtcctagcactttgggaggccaaagagggtggataacctgagatcaggagttcgagactatcctgaccaacatggtgaaaccctgtctctactaaaaatacaaaagtttgctgggtgtagtggtgagcacctgtaatcccagctactcaggaggctgaggaaggagaatcgcttgaacctgggaggtggaggttgcaatgagctgagattgcaccattgcactccagcctgggcgacagagtgagactccatctcaaacaaacaaaaaaagttggagtgaagctcatcactcacacttgcccaatgtaacagtcaaacttgtggatttggagcttacaataagtccaaagccagataagaaacttacatcaagccgggaacaggccaca

SEQ ID NO: 97980 - DNA, 22801 bp, Homo sapiens
agcttaagcaaacaagggaacaatggaaagtataacagcaaactgcttatgatttccttgttgaagtcctttatcttcatgcagatacaataagaatacagtactggccacttaccagctctgggcttcaacccttcacacctggcccctcaacaaccagtacaatgtactgctttctctactgtcactgggagagtttaactgcagagcataatcaagctttcttaattctttagcttccttctggctatacttgactccccattcagccccaggatcatgtttgttaaatggttagctactttaacattgctgtcattaacaccctaaccctctaccagtccaaagagtagtactcagacctgcagtgtgaacatctctgggaggttgttagaagtgcaggatcaggggctctgaatcagaatccacgttagcaagatctactggtgatcctcatatgcacattaaagttttagaggcatgggctggcctcccccagctctcacccttttccattacaaaatgccacccctctgccaaaaactatgcataaatcacctggacttagggctccttcacaatcttcttactcattttttatttcctagtactttgagaatagctcctcaaaccccctttccacccgccatcctctcattcccatttttccctcctctcatttctattttctttctaacttgacagaagtcagatgactttgctgtgctaatattttttttccttctctgcctcaatatatttgtggtcttctgccaccctctgtattattttctcaagtctcagatagagtagcatcttcctcatttgtaagctagcctctctacttacgcccttgatacactttccctttccccttctttgggatcttgctatcttactgatctcccctctcccagaatcatgtccaccatctccactaagcccttcctttttgcatccaaagggacacagatcttattttaagaaaaccacagcatccagtcatattcactggatcctactcctttctggtttatgatctatttctccttattcaccatcagattttgcatacaaatggtctagagcagtggtttccaactgggatgacttagccatcgagaggacatttggaagtgtctggagacatttttggttgctgcaactgtgggaaatgctactggcatctagtgggtagaggccataatgctattaaatatcctacaatgcacagggcagcctcccaccgcaaaattatctggctagggtggctacttatcccagtttgccagtaactttcctggctataggcttatagcactgaatgtcctgtgtcccaggaagcacctcagtcctgggcatactgggaccattgttcatcctatatatatctcaccccaaatgtcaaaagtgccaaagttgagaaacgctgctctacaaggaacacccattaactttacatttttctcaccaacttcctttccttcaattggaactttaatttctgtcttcttttctactgaaatagttttctttctttcctttttttttttttttttgtttttgttttgttttcttagagacagggtctcaccctcacctacgcaggagtgcaatggtgcagtcatagctcatttcagcctctaactcctgggctcaagtaatcctcgcaccttagccccctagcagctacgacaggcacaccaccatcctggctaatttttaaaatttttatctttgtagagattggatctcgctatgttgctcaggctgatctggaattcctggcctcaagtgatctccctaaagtgttgggattatgggtgtgagccactgtggccaggctgaaattgttttcttaaaagtcaccagtggcaccttccaatcaataaatccaatggcttttctccttcctcaaccctttggatttccttctaagcatttgatactgttgaccactatttttttgaagcccttttttttttcatacttttggtatgtgccaagaggtatgtgctcttttgtgggttcctaattcctactgttttttgttttttgttttttttgagatggagtctcagtctgtctaggctttgcctaggctcactcactaggctggagtgcagtggcgccatctcggctcactgcaacctccacctcctgggttttaagcaattctcctgcctcagcctcctgagtagctgggattacaggagcccgccaccgtgtccggctaatttttgtatttttagtagagatggggttttaccatgttggccaggctggtctcaaactcctgacctcgggtgatccgcccacctcggcctcccaaaatactgggattacagtcctgagccaccacatctggtccctactctgtcttaaatgtagattgtttcttagtttgatgtttcttggtgcttttctttattctcctattaaataatttattccactctagcttcagatctcatctctattagttgattcccagatctctttcctgagtcttagtctttcatttccaattgattgaggggtttccatggatatccagcagaatccaatactcaacctgagtaatggcaggttaagaagaacatttaatagactggctaggaggaaagacaatatagtctagcttacatttccagccttgtcttccactttggtcctgtattaagccttaagttctattgaaccaggataactctatccatgcccttaaatgtgctttccatggttttgcttcatgtcttcttgctcattggaaaacacttctgcctttcttcaaatcttcctgatcatcccaatcaggaaaatgtggaatggtgaaaatactggatcaggagtcagaagacctatttctgtcactttacttgcttttagacttgggaccattacttgagttttctataactttatatattttaagtaaagaaataatcctgtgtctgcctttctcaagatagctaatatgaaaaaatagtttgaaagatggtaaactgctggtatatagtatatttagtatttaagtattgcatgacctcctgaactctgataatactttgagcctttctaatggaatcttgccatctcttacttgtagagacagttaatacacatttcttaaaagtagagaccacaatgtaaatctttttcttgcatagtttctgtcattgtacatgtcatgttaacagattctgagtaaagactgatgaaagaattgcaattctacctattagtctttatttttgtttcactaattccaaacattttatactatatcaaatttatcaaccccctcccccttttttttaaatctccaatttaggtgatgtctttccagtgcaaatgaatccaataactcaatctcagttcgtacctttgggtgaagttctttgctgtgctatatctgatatgaatacagctcagattgtagtaacgcaggaatcacttttggagcgtttgatgaaacatcacccaggtagagtaataaatttttgtctatttgtacttcactgtatgtgtttggtttctatttataattagtcttaagcacataaactgggtgatatccttttttcccctcttctatagaactttatatcagaaccctgccagaagaagtcctgcatcaacaaatttgataagggtatttcttttacttttcagataaacttttccaaaaataaatgcttatggcaataaataaataaataaatcacactctgtggaaaggagtgcaaaatgagaaagtaaagtttatttcccctcatctcctattttttcattctcacttcccagaggtaataactgctattatcatttcttatatatgataatataataaatttttcataacataaattggatctttttttttttttttgagacagaatcttgctctgtcacccaggctagagtgcagtggcaccatctcggctcactgcaacttccgcctccccgggttcaagcgattcttctgcctcagcctcctcagtagctgggattacaggcgcctgccagcatgcccagataatttttgtatttttagtagagatggggtttcaccatgttggttaggctggtctcgaactcctgacctcatgatccacccgccttggccccccgaagtgttgggattacaggcaagggccaccatgcccggcataaattggatcattctatacattccctcaacacgtttctcttattaacttaaaaacacatctcggagatctttccatgctaacatatattgatatgtctcattctttattttacttgagacaaggcctcactctgttgcccaggttagagtgcagaggcactttcttagatcactgcagcctcaaactcgtgggttgaagcaatccacctgcctcagcctcccaagtagctgggaccacaggtgcgcaccactcattcttttatttatttattttcttccttttcaagaatggcatctgggccgggtgtggtggctcacgcctgtaatcccagcactttgggaggccaaggtgggcggatcacgaggtcaagagattgacaacatcctggccaatatggtgaaaccccatctctactaaaaactacaaaaaaaaaaaaaaaattaggcacggtggcaggtgcctgtaatcctagctactaaataaacgaatgttttcctcagtcacagtttaaatttataatgggtttttatttgagtgaattcagattttttttgtctatttactcattaacctacccatatgactttgtgtggaccaaattattttcctgttatttttatttttatttttgagacagggtctcactctgttgcccaagttggagtgcagtggtgcaattacagctcattgcaacctctgcctccaagggttcaagcaatcctcccacctcagcctccaaagcatctggtactacagacacccgccaccatgccctgctaatttttgtatttctagtagaggaatgatttcaccatgttgcccagcctggtcttgaactcctgagttaaagcgatctgcctgtctcagcctcccaaagtgctgggattacaggtgtgagccaccatgcctggcctattcctattatttaagttataaatattatttatgcttctttggctttttttttttttttttttttttgagacagggtcttggtttgttgcccaggctggagtacagtggcacaatcatagctcactgcagccttgaactcctgagctcaaatgatccttccacacctggctaatgtttaaaaatttttttgtagagatgaagtcttgctatgttgcctagcctggtcttgaactcctgggctcaaatgatccttccacacctggctaatgtttaaaaatttttctgtagagacgaagtcttgctatgttgcctagcctggtcttgaactcctgggctcaagtgatcctcctgcctcagcctcccaaaactctgggattataggcatgagccatcacacccatccctggcattttaatcacatgtattatgttacaatcagctctgggtttatcaagccaatgtgtagtcatttcagagttactgatttcactcattaaaatttttcttattcaaaatctatctgtaaaatgcttgtctgttttaggcattgcaattccatcggaagatattctttataccactctgggaacgctgattaaagaaaggaagatttatcacactggagaaggatacttcatagttactcctcagacttacttcattacaaatacaaccacccaggaaaataagagaatgctgccatcagatgaaagtcgcctgatgccagcttccatgacatatctggtgagcatggagagctgtgcagagtcagcccaagagaatgctgcccccatatcccactgtcagtcttgccagtgtttccgggacatgcacactcaggatgttcaggaagcaccagttgctgcagaagtgactaggaagagtcacagaggtcttggggaatccgtatcttgggtacagaatggggcagtttcagtgtctgcggagcaccacatttgtgagagcaccaaacctttaccatacacaagagataaagaaaaaggcaagaagtttggttttagtctcttatggcgcagcttatctagaaaggagaagcccaaaacagaacacagcagtttctctgctcagttcccacctgaagaatggcccgtccgagatgaagatgacttggacaatatccctcgagatgttgaacatgagataatcaaacgaattaaccccattttgactgttgacaatttaatcaaacacactgtcctaatgcaaaaatacgaagaacagaaaaaatataatagccagggcacttccactgacatgctgacaatcgggcataagtatccttcaaaagagggggttaagaaaaggcagggtctgtctgcaaaacctcaagggcagggccattctcgaagggatagacacaaagccaggaatcagggaagtgagtttcagccaggaagcattagactggagaaacaccccaagctccctgctacacagcccatccccagaattaaaagcccaaatgaaatggtaggtcagaaaccacttggtgagattacaacagtgctaggttcccatttgatttacaaaaagcgaatcagtaatcctttccagggtttgtctcaccgaggaagcacaatatccaaagggcacaaaattcagaagacgagtgatctgaaacccagccagactggaccaaaggaaaagcctttccaaaagcctaggtccttggattcctcaagaatctttgatggtaaagccaaagagccatatgctgaacaacctaatgataaaatggaagcagaatccatttacataaatgaccctactgtcaaacccatcaatgatgacttcagaggtcacctcttcagtcaccctcaacagagcatgttgcaaaatgatggtaaatgctgtccctttatggaaagcatgttgagatatgamgtgtatggtggagaaaatgaggtaattcctgaagtcttgaggaaaagtcattcccactttgacaaattaggggagaccaaacagactccgcatagtctgccatcacgaggtgcctccttttcagaccgaacaccctctgcttgtagattagtggataacacaatacaccagtttcaaaatcttggccttttggattacccagttggcgtgaaccctttaagacaagctgcaagacaagacaaagactcagaagaattattgagaaaaggatttgtccaggatgcagagactacaagcctagaaaatgaacagctttctaaygatgaccaggccttgtatcagaatgaagtggaagatgatgatggtgcctgtagttcattatatctagaggaggatgacatttctgagaatgacgacttacgtcaaatgctgcctggccacagtcagtattccttcacaggtggaagccagggaaatcatttaggaaaacaaaaagtgattgagagatctctgaccgagtacaacagcacaatggagagggttgagtctcaggtgcttaaaagaaatgaatgctacaaacccactgggctgcatgctaccccaggtgaaagccaagaacctaacctctctgctgaaagttgtggcytaaattcaggggcccagtttggttttaactacgaagaagaacccagtgttgctaaatgtgtacaggcctcagcacctgctgatgaaagaatctttgattactatagcgcaagaaaagccagttttgaagctgaagtcatacaagacactattggtgacacaggaaagaagccagctagctggagtcagagtcctcagaatcaggaaatgagaaaacatttcccacaaaagttccaacttttcaacacttcacatatgccagtgttggctcaggatgtccaatatgaacacagtcacttggaagggacagaaaatcacagcatggcaggagatagtggaatagattctccacggtaggtccatacaaaagtgtctgatttaggccgggcgcagtggctcatgcctgtaatcccagcattttgggaggccgaggcgggcagatcacgaggtcaagagattgagaccatcctggccaacatggtgaaaccccatctctactaaaaatacaaccaggtgtggtggtgcgtccctgtaatcccagctactcgggaggctgaggcaggagaatcgcttaaacccgggaggtggaggttgtagtgagccgagatcgtgccactgcactccagcctggtgatggagcaagactctgcctcaaaaaaaaaaagaaaaaaaaagaaaatggctgattagccactgttctacaggaattatgaaaatcaagggtattttgttaactagtcagagactactatcacacttctataatgatacaattctgccagcttttatacctttactgaataaattgtataaagttacaatgaaatctcttatatagtaggatacagtttatttttaatgtgaaccaaatttgactgtccccactactcataaatcttcaattatttctaaaaatagaaatttctgtaagccaagcactttctgaactgagggttggaagttttcacttctattcctggctctacacaggttgagaaagggatgtggctactatccactaatattttatttttgagatggagttttgttcttgtcacccaggctggagtgcaatggcgtgatctcggctcaccacaacctccgcctcctggattcaagtgattctcctatctcatcctcccgagtatctgggattacaggcatgcaccaccacacccagctaattttttatttttagtagagacgagttttctccatgttggtcaggctggtcttgaactcctgacctcaggtgatccgcccaccttggcctcccaaagtgttgggattacaggcgtgagccactgcgcccagcctaatattttctttctttttttttttttttttgaggcagagttttgctgtcgtccaggctggagtgcagtggtgcaatctctgctcactgcaacctccgcctcccgggttcaagcaattctcccactttagcctcccaagtagctgggatcacagccatgcaccacaacacccagctaatttttgtattttttagtagagacggggttttgccatgttggccaggctggtcttgaactcctgacctcaagtgatccgccctcctcagcctcccaaagtgctgcaattacaggcgtgagctgccatgcccggcctccactaatgttttccatgccaatttgtttaaatgttgtttggattataaaaatagtatagccatgatagaacacttaagtactgaaaagtatttttttttcttttaaaatagctaacaatcttactggttgaaaaatattttttaaaacacctatacttattctaacacacacacacgcgcgcacacacgcacacacacgcgcacacacacatatatgttttgagatggagttttgctcttgttgcccaggctggagtacaatggtgtggtctcagctgactgcaacctccgcctcctgggttcaagcaattctcctggttcagtcccccaagtagctgggattacaggtgcccgccaccacgcctgactaattttttgtattttcaatagagacaaggttccaccatgttggccagactggtctcgaactcctgacctcaggtgatctgcccrcctcggcctcccaaagtgctgggattacaggtgtgagccactgtgcctggcctaacatctagatattttttaaaaatcattttatatttggtttgtttctgtataacacttcagtccaaatgtatagatctatagattttgtctactgggctcgtactgagttactattttgcatgttgctttttaaaattaatagcctatcatatgaacattttccctatgttatttaatagtttctcaaaggtcattctaaaatttggttcatatctttgccagtattttttttttttttttttttgctttgagacagtgattgactctgtcacccaggctggagtgcagtggtacaatcacagctcactgcagcttcaacctccctgggctcaagtgatcctcctaccttagtctcccatgtacctgggactacaggcatatgtcactatgcccagctaattttttttttttttttttttttttttttttttggagagatggggtttcaccatgttgctcaggctggttggtctcaaactcctgggctcaagcaattcagcctcccaaacggctgggattgcaggtgtgagccactgagcgtgcctggccctacacttttttctatgcatttgtaagttgctctgttgttttttctttgagacagggttgcagtctgtcaccagctggagtgcaatgacacaatcatagctcactgcagcctaggcctcctcggctcaagccatcccccaacctcagcttctggagtagcttggattataggcacatgctactatacccagctaattttttgtagagatgaggttttacagtgttaccagtctggtctcgaactcctgggctcaagggattctccygcttcagtctcccaaagtgctgggattacaggcatgacccaccgcactggccatcaggctaattaaaaagtttttttgatcacttctcggccttttggctaagatcaagtgtaaaacgtttttttgtggagacaatatattgctatgttgcccaggctggccttgaactggattcaaccatcctcttgccttggcctcccagttgtgggattgcaggcatgagccctgtaccagggcttaataaaagtatttttaacaacaaatcatacrgagccatggctttcttttttcatgtaacttatgtatatcctgttattgataaatgtagcttaagcttggtgtttgtttgcttatttgttttttgagatgtagtcttgctctgtcgcccaggctggagtgcagtggtgcgatctcggctcacagcaacctctgcttcctgggttcaagcaattctcatgcctcagtctcccaaatagctgggattacaggcacacaccaccaggcccagctaatttttgtgtttttattagagacagggtttcaccatgttgtccaggctggtcttgaactcctgcctcaggtgatccactcgtctcagcctccaaagtgctgggattacaggcatgagccactgcgcctggcctcaagcctttttttttccttgcctcagcctcctgagtggctgggactacatgcgtgagccaccatgcccagctattttgtgtgtgtgtgtgtgtattttttttttttaacagagatgaggtttcaccatgttggccaggctggtctcgaactcctggcctcaagtgatctgcccaccttggcctccctggtctcaagtgatccacccaccttggctgggattacaggcgtgagccacaagcttgttctttttaatggctgtttagcattctgttatgtggactatatatatatgtaactattattttcctttttttttttaagagacaaggtctcacactgttgcccaggatagagtacagtggttcagtcagggctcactatagccttggcctcctggtctcaagcaaatcagcctcctgtgtagctgggaccacaggcttgcaccaccacacccagctgctgctgcttattattattttgttaagaatgaggtctcactatgttgtccaggctggtctcaaactcctgggctcaaacagttctcccatcttggtctctcaaagtgctagggttgtaggcatgagccactgtgcccagcctattttcctttctttgacatttagatcattcccaattttttgctattaacaaatcaatctgcagtgagttatttttacataaaaatgtttgtgggcatttctgagtttttttcttaggatatattcctagaaatctacattttaaaaacgtatcattacttctttattgggggtgcaagaccttttctttttttttttttttttttgagatggagtctcgctctgtcacccaggctgcagtgcagtagcgcaatctcagctcactgcaacctctgcctcccgggttcaattgattctcctgcctcagcctcctgagtagctgggattacaggcacacgccaccacgcccagctaatttttgtatttttagtagaggtgaggttttcaccatgttggccaggctggtctcaaactcctgacctcaagtgatctacctgccttagcctcccaaagtgctgggattacaggtgtgagcccccatgcccagctattaagtatttaagataatcaaaacatgtcttcaaatgtgaacaatggtggtgtaaaccaaaaagccatgggttccttttctttctctgtggcaaaaacaaaacaaaaacagatgagagacattactccttgataggtgactaggaattttgatttgcaaaattttgagaaatttaatttcttaaggattgcttatttttaagcaatatgctttcctgaaaggctagctataattgacaggcatttagaggaaagggaaaggaaagtaacatttgaacatcaactgtgtgccatgatggttataaggattagggggatagagatgaacaagacattgtttctacttacaggaagtatacaatttagttggggagacaaacaataaacataggcaagttgaacttaagaacaaagcatgagactttaacagtcaaagagtgatggaattgagtgatgggctgtttagagaaagacttattagacgaaatatgtttgagatatattttaatgtaatggacagttgatggagagtagcaaagtgggaaaagggaatgtcgaaaagcaaaaataggctggacgcagtggctcacgcctgtaatcctagcactttgggaggctggagcgggtggatcacgaggtcagcagttcaagaccagcctgaccaacatggtgaaaccccgtctgtactaaaaatacaaaaattagccaggcgtggtggcacgcgcctgtaatcccagctactcaggaggctgaggcaggagaatcacttgaacccggaaggcggaggttgcagtgggccaagactgcaccattgcactccagcctgggcaacagagtgagactctgtttcaaaaaaaaaaaaagcaaaaatactttttttgtgtgtgtgacagagtctcactctgttgctgaggctggagtgtagtgggtgcgatcttggctcactgcaacctctgcctcataggttcaagagattctcatgcctcagtctcatgagtagctgagattacaggtgtgcaccagcatgcctggctaatttttgtatttttagtagagacagggtttcaccatgttgtccaggctagtctcaaactcctggcctcaagtgatctgcctgtcttggcctcctgaagtgctgggattacagagcctaccaaacagtattgtgagttagctgaagcaaggcatatgtgttagataatgggctaatatagcttgttccttctagaaaagaacattgtaatattaaaaatataataatttgcttttctcttccatatgatttctcataaaagtaataaatttcacaggaagatattggccacttcagatatatggaagtttttcggggaacttactgtttctgactagaacatacttgatactagatctgagaagagatgtttttcagaaaatataaacttctgtgaaggcagctgtcaaataattgagatgctattgtgaagcctttaaaatgtaaagagcacttyggatttttaaaggttaactkatttgataagtgtacctttgtattagtaaatgtactacttcaaagtagcaaatkraagtataatgccttggttagaaattcaagttcccttcgaagccaataattctgttatttttaatatctttaggacacagagtctgggatctaataattcagtcattttggatggactaaaaagaagacagaattttctgcaaaatgtcgaaggcacaaagagcagtcaaccactcacatctaattccttactaccgctaactccagtcataaacgtttaattttcttttggaaacctacttttttctttataaaaaggtagagcattattacagaatctttcaatcatgtaagaattgagtatataagaattgtctaaaggcaagcatatctatactattaaccacattacacattttgttctaattactggctttttttcctcttttggtgtcttaaggctttttgaagcttattttactgtgagtttattgggmgtatatagattattttcgattaaaaagtggaattattggtccccttccaattgtaattatcttgaatttttatacattagtttctcaaatatatagaatgccaatttacttcctgtagtgaatttttttttaacctacactaatattgagttctaagttaagtggatctcaccagatttcaacacaaaatcagaaaacagtgtgtgttgaagcagtgtctgttgcaagaaaacagtgtctgctgcaagatatctatgcaaccctaggtctttatcattaccaagaaagagtttacataaatgtgttggctactctgcaacaagaattcctttaatcattgctgcccaggggcttctctttgaccagcttggacatgaacaaatggttcccaatgtgactgacaatgtcgaaaattcctgtggcaagaggcatctggctgtactactgttcctctggttcctccctacatttcaggccttctttgagatggagtcttgctctgttgcccaggctggagtgcagtcgcacaatctcggctcactgcaacctctgcctcccaggttcatgccattctcctgccccagcttcccgagtagctgggattacaggcgcctgccaccacacccggcaaattttttgtatttttagtagagacggggtttcaccgtgttagccaggatgatctcgatctcctgacctcgtgatccacccgcctcggcctcccaaagtgttgggattacaggcatgagccaccgcacctgacccaggccttctttatagatggcagtgagaagtcagatggtggagatagaatgtggagatagaagggaagcagaatggttaccgaatggcttgggagtaaaagggaggttctgaatgagaggtttagagaaaggtggaaggagtctggtagacatttagcaattcatctgcattttggtccatttccactcatggtaagacctagaattttttctgttaagctttttcagaccaagtagtagaatggtcagttctcttgggtttggggaatatggagcaatcaagactggtttcagcatgtcgagaagatgatggtgctgatttatggttgagggaatgtcttttcttttcttttttttttttgagacagcatctcgcactattgccagggctgcagtgcaatggtgtaatctcggtttactgcaacctctgcctcccaggttcaagcgattctcctgcctcagcctcctgagtagctgggattacaggtgtgcaccaccacacccagctaattttttgtatttttagtagagatggggtttcactatgttggccaggctagtctcgaactcctgacctcgtgattcgcctgcctcggcttccaaagtgctgggattacaggtgtgaatgactgaataattggagagtgtctctttctgactctcaccatactgacaacagtgaagtccagagagaagcccggcactggagaactttgtgcagtccctgtggaagtgcaaatgacattcactgctctcttttgcagtggtcagctcactcactcttgactattggctttcagtggaccccaactgactgacataccactgcattcttagaagattaattgttgtcaaaacaacagtgtaaaccctgctctaagtgccaagagaggtgggtaatctggtatagaaaagacttgtaggggaagtagaggtgagagtatagttttaggggggtctcacagcatggaatcagcaccagtgaatggaagttaagagaagtattttaacaacgaaaaaaaaatttttttgagacggggtctctgtcactcaggctggagtacagtggcatgatcacagcacactgcagcctcgacctgttggactgaagtgatcctcccactttagccccccgagtagctgggactacaggcgtaagccaccaggcttgtcttaattttattttttgtagagacaggatctcactatgttggccaggctgatcttgaacttctgtcctcaagcartcctcccacctgggcctcccaaagtgctggaattrcagatgtgagccactgtgcctggcagaattttatattagacaaagctatctgaagatgaagtaggtagctttggaaaagaatgaatttcccattgtttagggcattcaagcagaagcttggtgatccctttactgatatgttggagggcaatttccagaatttagtttaactggctggctgaactacatgattttgaagaatccttccaactgtaaggtttttcatttgttctgtttttttaggagatggggttttgccatgttgcgcaactaatgaagtccatctaattttgccactggatgcattatgacactctccctgttttaaaggaatgtattaaatgaatcaagctcattatgaaaccagtaaaattttctcctatgaaactcatcatataacacagacattaaagatgggaatatgtgcgattaaattgtttgggagattctactctaaaataggtgacctgcatttttctccctagaaataactgctttttgtggcaactttagttcttgatttatctttcctaatgcagtctattctctaatgagaaatctgtttttttgaggcagcttaatgatctgaggttaggagtcagacacaagtttgaattccaattccaaatccttcgtagctgtgtgatggagcaagtcaccaaattcctctgaattggttttctcatctgtcaaagggagatagtaatgatgtctcccttacgggattgttgtgaggcttggggatgatctatcaaaagtgcccaatgtaggcctgagcaaccccactgtgggcgcggctgtggaatggctttgggtcttgaaaagaaaagtgcccaatgcaggaggtacctaatattattatacatatatatgtatgtatgtattttaatatattttatagtaacaaaacttgcttgataggtaaataaatacatggcccactatacaggtcccctgtttttgtcaggttgtctggaattactccattacagatttagtcctttgggaaggttataggatgtatctgccatcaaaatccaggtatgccatggggaggtattatgcctttcactaacaagttttcagttgatagcttattttataagtaggaataaaatatgcaaaatatgggcttattgtagacattcatacaacatacatcctctctcatctgagatttcagactcctagggatccctggcatagctaggttttttgcaaaccattttcattatttcaaaaatcctaatagaaattgtactcaattcctttgccttactctaattccttgctagctaaaagatcctttctttgcaaatagttgaaattacatcagctcagtaatgcaacactatcccatgctggtgtggcagttaaactgcatttgtgtcttattcatagattagaataatgaccatggatcaatcatccctaaatacaatttatcagacaaaatgttacaaaatttcaaatcttttttttttttttttttgagacagtctcactgtgttgcccaggctggagtgcaatggcatgatctcagctcactgcaacctctggttcaagcaattctcctgcctcagcctcctgagtagctgggactacaggcacatgccaccatgcccagctaatttttgtatttttagtagagacagggtttcaccatgttggccaggatggtcccgatctcttgacctcatgatccgccacctcggccccccaaggtgttgggattacaggcataagccaccacaccgggcctattttgtatttttagtagagacgggtttcaccatgttggccaggctggtctagaactcctgcccctgtcctcaggtgatctgcctgcctcggcctcccaaagtgctgggaatacaggtgtgagccaccatgcttggcacaaatcttttttcttgtttccttttttttttttttttttttaagacggagtctcgctgttgtcacgccggctggagtgcagtggcgcaatcttggctcactgcaacctcagcctcccggattcaagcgattcttctgcctcagcctcctgaatagctgggattacaggtgcctgccactacgcctggctaatttttgtacttttagtagagacaaagttttgccatgttggccaggctggtctcgaacccctgacctcaggtgatctgcccgcctcagtctcccaaagtgctggaattataggcgtgagccaccgcgcccggccccagatctttttttatgtagtggcgcgcacatacacacacacacaccccaaaccaaaatgtcaagtctatgaggaagagcaatggaaagagcctgaagagaaaagattgggaaccatggcattttgagaacctatctacagctactaaggctttttgggtgttgggaaaacaggctattgcttaacaagggtggggaagagcgacatgaatgtcatgaaacaagaatgggggcatcaaagacaaattcatcattactttgctggtgtcttacaggactttcttccctttgaaaccttagtaacattttttcccctttggaaaaaatgtcagaggtcctaagagcgggcctgaaaaaagaaaggagtagatgtctggaagaagcagaagccgcttccaaacattacttggataatggtgccctcttctggggtgactgatgtgacaatgtgactctgaaaccctgtctcctactacttggttcaaaacatccagaaagtaattgactaaagaaacaatgagactaaaggttaagcacttacaaaatcatttaaaagtttgaatttaggagctagatacatgcataaatatacatatgataaatgtattcaaagatgtctcttttccttttttttttttttttttttttgagacagagtctcactctgtcacccaggctggagtgcagtggcgtgatctcggctcactgcaagctctgcctaccgggttcacgccattctcctgcctcagcctcctgagtagctgggactacaggcgcccgccaccacgcccggctaattttttgtactttttagtagagacggggtttcaccatgttagccaggatggtctccatctgctgacctcgtgatccacccgcctcggcctcccgaagtgctgggattacaggcatgagccaccgcgccggccaaagatgtctcttttccaatgctgtcaaaacctcaagctaatgtaagcacctctgtacctcatttccatagtgctgttatatcagcggatccaatttcctgtgctatcagcattactcttctcacttttctagcaagattttagaactgacttggtttaggttccatggcaatgggaaaaataccctcctccttccctcccattctctttgcctttacgctctttctgcttttccatactcaacacttattttgtgcccccaatatgtcttaaatcagtttttaactgccacttaaactatttccatgtcacagcatttaaaaatgatggttcatgacgaagctgctggggataaaacgttcaattcctcttgtcacataagattgacgtgcagacgcaaacaggttatttgatgacttttaccttcaactctctaactacagagtaaaactaacctagtcctgtagttctaaaaagattagagagaggcaagtttggaaatagtcatcttctttttatatcttttttttttcttttgagatggactttcactcttgttgcacaggctggagtgcaatggcttgatctcggctcaccgcaatctcctcctcccgggttcaagcgattctcctgcctcagcctcctgagtagctgggatcacaggcatgtgccaccacgccccgcgaattttctatttttagtagagatgggtttcctccatgttggtcaggctagtcttgaactcctgacctcaggtgatccgcccaccctggcttcccaaagtgctggcgtgagccaccgctcccggcccttttctttttatatcttaatggtcagtttaaacaagctgaggcaaagggcaagggaaatctttataggaccttgtaacaggagtagcaactgaagcacccaactcttaagtgttgtaaaagaaagtacatcagtgactctggtaagatgtttggaaaataaagatgttctaataagattgtatcttgaattattgtgcattttaattattcatgcacagtatgcctccccctaaccccaaatctcatcagacacaatctcttgagatttacagacagagcaaatatgaagaaaacaaagttctccactcctgcatcccgttcccacgttttctagttgattgaggcaaaaatgatatccccggagaacacatgtgtaatgtggtacatatttttttcagctaagccactccttggtcaaattactgacacatcggtttatacttgccctttccatctgacacagacagcagccagagatttggttcagtgaatttagggcttagaaaggcagagtctgtagtgttgcaagtcacagaaggtcattctaaaacactcgtatacttgttaatcacttgaatagggagatttgaacagtctactcctttcttttttttcaggcccgctcttaggacctctgacatacaaatgaatgccaaagagtgctcaggagctcaacttttacttcagctgttattaaccttcaaccacaagacaataacatctgttccttttatcccaattttacgtgcggcattcttagccatatctacactgtgtttttatgcacatcatcataccctgttgtagggctataaagaccctactatggtagaattgggagtggactgagggattaggacaaaaggatgtggaaaaccgcagatctagagatgcatagctattctcataacctaggaagagaggtggatttctccgtcatcaatagctgaacactccttgtgtttctaagtattgaatccataaagttacatgcaaacatacagcccttgccttcaggccaagccgtagttatgcagaaggcttgaagcaatcacagatttaacatttgtggttccagctattcaggaccaattcccaaactccacgacatgtaacaatttgtaattttgctaggacacagtttgatgcttaggttttaaggctggtgtgctagacgttatcaagtggtttgtgagagtagccctgtgtctccattgggtagagtagctgggtcgcaaggatcatgaagagatgaagaaatggctgtgaaaagccaactagcctcggtgatagtaagcaaaggtatagaaacactaaggaagttaccctttgtattgtcaaaggtttcagttttgtgtaaggtggtgattcacgggcagttaatctccatcactaaaattaaatccttttttattcattgcaaatagataatctgtggaagacattttggcttttctcgctagcagaaaatgtgaggcttcttcaggtttttcctgttcattgtttcacgggagcatcttccccaaaacactgcaaaactcaaagttctcaggctgatgtggcagaaagagcattgatctcggcttcaggagctaaattctctagtcctgactgtgccactaacagactgtgggacttcagacaagtacattcctttctcgggtttcttatgtcaaatggacagcgtgagaaggatcacaatgaaccagggatcagcttcacgattaaaacctaagacttaagagacggacatctgtccgttcctggctacacctccggcccatctggcccaccccaaactgcgcgaagcccctctccaccgacgccaggcctgtggcctcgcgcgaagctgttggtcgttaacatctcccccgcaatgggcgggatggagggcttcagcttccggctgcaaatggcgaggcggcgcgcggcgttgcccactggcctcggcatgggcctgcccacgcacccgcccagcgcgcgccggaccctgtctaccgccgttgaagggcttcccagccctagcagtgcgtactgggaagcccccaaaaggctctgcgaggccgaggagacccgttcggagtgggggaggggaagataaaccgaactatttatgttaatcagtgcatgcttcctttatggagattggccagggttttactctagtaaccaatcacttcagaacaagggcgggcccgttgatatctctcacactcattggttgagaggttgcggcgcaatggaaggtcttaaaccgagagtatccgggattatttttccccgccgtgcggtgcgtgtcccggaagtgacgcatggccaaggccgggcggccgccttgcccccgcttcctttcacgctgtcgctgcccgtaggtggttgtggccactgtgcccggagggaggcggcggtggccagtaatgcctgggaaactcctctggggggacattatggagctggaagcaccc

SEQ ID NO: 97981 - DNA, 15435 bp, Homo sapiens
acattgaaggcctgagatggggagagggtgtctggacctgggccggggcatgagagctcaagaagggacaggggcggggggtgttggggtggaaacctggcttccctacttactagctcagtggtctaggatgagtagttttgctcaagagcctctttcctcatttctttctttttttttttttttttttgagacggagtctcactttgtcaccaggctggagtgcaatggcgcaacctccgcctcccgggttcaagtgattctcctgccttagcctccctagtagctgggactataggtgggtgccaccatgcctggctaatttttgtatttttagtagagacggggtttcaccatgttggtcaggctggtctcgaactcctgaccttgtgatctgcccgcctcggcctcccgaagtgctgggattacaggcgtgagccactgtgcccagcctctctttcctcatttctgtaaaatggggatagcacctacttccctgtaggatcttttgctgaaaattagagaaattgaatgtaaagttcttagcatgtgcctagtatataatagctaacacttttatatagcacttactacatgccacgcactaagtactttacatgtattagcccatttcattctcaaaacacctctattcattggtatcgttattaccccccattttacagatggggaaactgagacagagcagttaaagaacttgcctaaaatcatacaactaataacaggcagagccaggattcaaacccagcaatctatctctagagaccatgctcttatgcaatcctcctagtaagtaacaagaaatggtaacattattattgagattaaattcaaagagtttccattcatcaagaaggcactggtttaagaaggactcaagaagatacaaagaaatgccaagatctttgcctcaaagaaactctcaatatgatttgggtgtagggtgtggggttggaacgaggctggagttatcgagcctaggattggaatgggaaggaactgggttatatggcagggaaggaagcacatagagccttcagggaaggtttggattgtggaagagagggaggggtgggaccacagcaggagagattcaatttcaggaaactgcttcttaggagctggtctgaaaggtggattttccaggggggccaaccctggctgggcggggttggctctgtccaggcgagatctgggaagggcgggtagctgcactcactggcactgggagtatgaggtcagggttcccagcgagatctgcgatgtggcggtacagggggacccccttctcagctgctcccgccttacacacggccaaggacacgcccaggatggcattggccccaaacttggctggaaggaggcaagcgggaagaaaggatgagagcttctgcagggtttggggtggctactccaggaagacgccagagctccaaaccactgagcatgaagaattggttaacagatctctccccaacagcctgagtagccctgggaacccccaccccgggggaatgtgtcagctgcatgtctgtgtccacagcccggcccaggcctggcagaaggcaggcataggaaatgcctgtggaatgaacacaaatccatccagctgcggtgtgacccaaaatgggggacccagaaataacccatcaggcctcaccccatggcctctcgccatctctcccacacctcatcccttccccaccgctagcccttcactcacacttattctcggtcccatctagctcaatcataaatttgtcaactttttcttgatccacaacgcttagtttctggaagggtgagtttgagaagggagagcagaggtcagatttctcagaagtcagggcacatgcaggggaaggataagggaaaatgtttcgggagaggcctgtctgggctgagggagcaggggcatggggaggaggctgcagcgagcgggcttccccacttgccttttgcagcagagcagggcccagagtattgttgatgttctccacagccttcaggactcctagacaggccagaggatgagttttggagctcaatcaactgggcccctttctgtggaccccagctcctcaagagccttgggggttccagtcctctacccattgtgcacccatgtcctaaagccgcccacacaggctccttctgcgctggtgtctcctcacctttccccaggtagcggcctttgtctccgtctcttagttccagagcctcatagatacccgtggaagccccactgggcacagctgctcggaatcggcctgggacaggaggaattggaagatcacagggatggctgggcgcggtggcccatgcctgtaatcccagcactttgagaggcctaggcaggtggatcacttgagatcaggagttcaagaccagcctggctaacatggcgaaaccgtctctgctaaaaatacaaaaattagctgaggccgggcgcggtggctcacgcctgtaatcccagcactttgggaggccaaggcgggcggatcacgagatcaggagatcgagacaatcctggctgacaccgtgaaaccccatctctactaaaaatacaaaaaattagctgtagtcccagctactcgggaggctgaggcaggagaatggcgtgaacccgggaggcggagcttgcagtgagcctagatcgcgccactgcactccagcctgggcgacagagtgagactccatctcaaaaaaaaaaaaaaaaaattagctgggcgtgatggcacaggcctgtaatcccagctacttgggaggctgaggcacaagaatcacttaaacccgggaggcagaggttgcagtgagctgagattgcaccactgcactccagcccgggccacagagcgagactccatctcaaaacaaaacaaaacaaaaaaaaggacctcacagggagtctctctacctctcaaagggctgaggtgtcctctctgagctcagggacaggaggcagtgcagagagagactcctgcttctcctagcttccagctctggttccacgttggaagaagggggcttgggaagaagtctgggaaagggaacccgagagaaaggagaggatatggcacagaactggggggcaaaggccaaagggttggggtcttcggaggcgagcctatccaatgggccttgtgttacccttggccgtgtgcaggtccacctccaccgtggggttgcccctggagtccaagatttcccgggcaaagattttctgcatggccatggctgcaggacaggaggtgtgagtgagtgtagacagttgatctcttaaggaaccagaaatcccttgccctttaagattcttccccactccaagaaggcaggtgctggagctaaaaataccctacaaaaaggtcacagaccaaagaggcaggcgcagccccctcccccactcagaacagctcttattccaccctcccatcctaagaatccaggggcctcttatctatagctcctgggatgccaccgctcaccaagcccccacctcccccaagcctccacttaggccttctccttccacccctctggtcaagcagtctgttctccatggctggtggccttcaaatcctttctggttctcattttcctgctccgaaatctccttgggcccccaattccctatcaggttccagctctagctgcccttttctatccatccctgctgccctcctcacagcctcctttccctagatccttcggtgttcccagagtttgtcccatctgcttgctccagccgccccttcccccagctttttcaagcatctccagtcccaggaggaaaaaaagcagaaatgtcccccacttcctccaagccaataccatgctcaccctttactacctccacccccagggctggaagattcacccgacctgggatgtcttcgctggaggtttggatggagctccgagtctaggtggcagctgggacagtgtcagctcaccccctctcaggctgcgcatttatccctgagccactcggtccccagccagccccgcctctctttctctccatcctccccccttcacactgggctggcagccaagtgcccactacagcctgaagcagaagcctctggccctgggcacctgcccccttaccaaaggtcaactactatcccccactttctgtctcccaataacagtccctgttctaattccaccctttgggaggagcaagggaggggctacagatgaggggtctccccccaccccaggattacattccccttttgcaaacgtcaagaggaatgagtgacctttaggaaaggccaggggtaacctgagccctgcaaggctggggagggggcctggaagaggggctgcaagattgacgtccacacatgctcagatcgctgggcgggcctctgtcctcagtgggggaaaggacgggaccccccaccccagaaggcgagagggtctcacctcttagggtcctcataacggccattctcggcgccgccccatcctaccctctccaggccagccagcgccgggatgagttaggggacaggaaacgaatttagacaggccctttcggctggcaaggcgcccgactgataacgctgggacagcacttgtcgcccggcgtggggactgtcggtcagagcccctttccccatcgactgtgggcgctcagcgcacggccccagcccatcaatgaatggggctgaatcaacagtgaacaaaaatgaatggaccgaggacgggtggccttttgtgagcttctgcacgcctggggctcttccggcgccccacttgtagcactgcggggaggtaggtctctgccctcggtagagatctccactttgccggctctggggccagtgcggggtctgccccgagctcctctgcagccataccagccgaccggcgggggacacacggcgcctcggcccgactcggaggcccttcccgtcggcgccggggcagcgcgcgcccggtgactcacccccgccgccctctccccacccctgctccccgccccgccggcccgcgcggcctcccagcccccaccccaggccacctgccccgccacccgtccagtctcccctctcgccccgccccctcatctcaggccgctcctcccgggatttttccaccctggggtaggggtgcggtgggccaggggtcaggagatggcgggcggggagcgccgccacgtgcccgggtgcggccccgcccgagcccgccagtgactcagccgcgcggctgtcgaggaacacggactcgaggggcgtcggggactgtgggattcggcgtggacgccagggatgcgcgccgcgctcgggaggagagagaaaaccaaccccctttccgcccgggccgcgctcggtgaccccttgcccctagcccaggctccggaagccgcccagccctcggcggcgggtcggaggaggcggtttcaccgcggccgccgcacggccgtcccgcccgtcccgccctccccaggtggctgtgagcgcacatctgactgcgaagaaacccaaagggcccgaagtgggactttccccttcttgaaaaagttgccactcttgcaacttgagtattcttccgcctcgaaaaatagccccgcctgttaagccccgcgggtgtccgcgctctgtgacctctgcagacacaggccaaggggcacggccggtgatccagacattgcctgcctggggcgggcggggctgggatgtggggtgaggccctgggctagagccgatccagagaagggacaatcctctagactgagaatgggccctggtgaacccaacctgcacgacccgagaagacgctggggacagaagtggccccggtgggtgccttcagctatgagagcgactagaggatttggccaaactcttctttgctttcttattacttgaataagtaaaatcaagggtggtgaggcggcagcgcgcacggcttcgcccccgccccttccgccaggcgggagacacgtccccagcccgccttcctttcccgcagggtccacacgggtcgggccgggcgcgctcccgtgcagccggctccggccccgaccgccccatgcactccyggccccggcgcaggcgcaggcgcgggcacacgcgccgccgcccgccggtccttcccttcggcggaggtgggggaaggaggagtcatcccgtttaaccctgggctccccgaactctccttaatttgctaaatttgcagcttgctaattcctcctgctttctccttccttccttcttctggctcactccctgccccgataccaaagtctggtttatattcagtgcaaattggagcaaaccctaccyttcacctctctcccgccaccccccatccttctgcattgctttccatcgaactctgcaaattttgcaatagggggagggatttttaaaattgcatttgcaaagttcggtgtctgggctggcgagtgggggagggagggaatggggagtaggccccgcccctaccgtcctttgcaaataaaaatctagcggggcggggggggggaggagcaggaagtggcggtgcgagggctgctgcacagcgagcggagccgcggtccggacggcagcgcgtgccccgagctctccgcctccccccgcccgccagccgaggcagstcgagcccagtccgcggccccagcagcagcgccgagagcagccccagtagcagcgccatggccgggtggaacgcctacatcgacaacctcatggcggacgggacctgtcaggacgcggccatcgtgggctacaaggactcgccctccgtctgggccgccgtccccgggaaaacgttcgtcaacatcacggtactgcgaggcctgcgcggtccggggcactgctccggtttggaccctgagggagggacttgggtgggggcgggcgcggtctagggcgcgcagcgagaggccctgactgggtgcttgccctggaagcggcgcgaatggcggctgcacgtgagtgggtccctcagttgcccgtaggtcctatgccccaggcggcggcgcccatcccgcccgctaccccgctttccgcgacggggcgttacatccggggcacagggcggggaggggcgcggcgcccggtgcggcggcccacttccgcctctcccagggcggggcggggacgcgcctcagtttttactggggattgggattgagaggggacccggggatccttggacccccagctccccgtccggctgccagcccgcgtccctctaccattgtttctcctggtgcggaagggagccccaggcgcgtggtcttggtcccttgcccaccctctgtgggctyctggcccctcctaactccgttagagagggcgaggccaccacacgcccccccagctcagcacgttggattcaacattcctgcgaggccaatcccggaagtcccctcgccctcccttcccgccatccggcggggcctggagcaggggaactttgtgagaagttctgagacagcataagcgaaagtatattggtttactaccgctgctcccaccaccatctccctgtccacactgcccggaagtggggagggggagcggaagttcaaaaggggggggaagggggtttccgggcgggaggggaccggatgtgggggcttggggtgaaagggggaggggggaaaggttcccggggtacctagacccgagagctggcctgccgggtctggcccctgtccaccttcaaaagttttccaactttcscggaaagcccccaggggtctgcttcctcatctcagagcagagatacctggagctaaactctaggttacttggagacccaggcgtccgggccctaacagctcctgcagaacctttgaccaaataagggcaaagttgcttctcttgcctcgcccgcccccctcccttcccctctccgcttctgcttttcctgaaggagagttctgagcatccaaaggctcctcacttacctcactgactccctttatttcctgggtttactttccccattaacactgacatctaaatctctagaggagtatgtcatcccttcctccctggttccatattctaagtttcagaatsatgatctttttctgcactaacgtcccacagtcctcagagtttctcacagttcattgatgtgtactgagtatrtaatttatacttagcccccacggcggggtggttctcagaagtggaagacaggtgggtctttggagaacacggtgggaatcttggtgcactgactaacttgatgggcgcttggttcctcttccagccagctgaggtgggtgtcctggttggcaaakaccggtcaagtttttacgtgaatgggctgacacttgggggccagaaatgttcggtgatccgggactcactgctgcaggatggggaatttagcatggatcttcgtaccaagagcaccggtggggcccccaccttcaatgtcactgtcaccaagactgacaagagtgagttcctgagtcttacccttcctttagctccaagatctctaatgtaccgccttctggtaatcttgagggtgcttttttgtgtgattccccaacatgaagggagtcagaccagtattgtgttccttgtctgctggatgctggaacaygggatagtccctccattctgtctcagttcctcatcttgtaattcgaagttgctgaactgcattacctcttaaattacttactgccttgagctcggattagaaactgttttctaggagtataggtagattgttggggtcytgaatcatcgagttcatcgtttgagttcttttgttagaacctggaggtggcatgcacatccacagccctttctagcctgaacacatgaatcaacagtctatgagcctttgacccctaagtttttagtctgttcctctccagcgtttaagcttgattttcctcttttgaaaagccttattgtttcagggtgactgacagcctgcctgtgtgtggtgggggggcgggttgggagagatgaggttgggttacarcccccagggctggacagctgctgaacagctggcagggggtggaattgtgacacctggatcctagcctcctttctctttcctcctcctccagcgctagtcytgctgatgggcaaagaaggtgtccacggtggtttgatcaacaagaaatgttatgaaatggcctcccaccttcggcgttcccartactgacctcgtctgtcccttccccttcaccsctccccacagctttgcacccctttcctccccatacacacacaaaccattttattttttgggccattaccccataccccttattgctgccaaaaycacatgggctgggggccagggctggatggacagacacctccccctacccatatccctcccgtgtgtggttggaaaacttttgttttttggggttttttttttctgaataaaaaagattctactaacaaggtgctgtgtgatttgagcttgggtgtcagaatgggggataggcactgtgacttgcctcctttatcgtggcttgggagcagggaggttgaggtactacaaggtgcaggaatttgagcttctggccaggtggccctgcccctccacagtggcatttccaggcctaagtcctcagtgtgctggtcaaattggtggatgatggaatagagccatctggaccagagaatgggtgcaggcctgcaggcaaggcagggctagttgagtcatccttgtgggtggggctcccccttctgagtcatagcaaatgccggctggggctgtccccatgactataggttagtgtctctcagcattcccttgctccttatggctaaaggggtgattccaccaaagggttaagttcacctgtgtgagaatgatcttacccttccttagtccacaaagaaacaattttattagcccaagaagtgaagacccagtccctctgcttgccccagccccaccccaaagcccctcaaaaggataggtgtgggtaagggagaagcttgggatggaatgtcccctatccctcagaagactggagggaagacgacggtctgtgcaaataggtcaccagaggtgtatgtgtggggggttattagaccaggataacaggggaagagggaggggacagtgggggatctgttgaaggcccaggaaaaacaaggggagctggggctaaggaaccaaaggaggtgggaagagtggggctagaacccaaaagtggggtcctttctgaggcagggtggtcccttggctccccttcatcaccctcctcttgcccttgagtttcttcctcttggtcttcgtccccaggaccccgatgaacaggctgcttgcaaatggggcaggtcttccgggtctgagtgagccaggggtccacgcagcggctgtggtaggctgcagagaggaacaaggtgaagcacctggtggctgctggtggcagaggggcatgggcaggcagtgagggcctcaccatgagcacaggggagtacccgcagcttgtccccatcctcatattcatccaggcaaatggcacagacatcatactggtctcctgggacagaaagaaaataatctagtccttcactgagccacaatgacccagggctaaggcttttaaagccttgcaaaaatttcccctcacctacaaagccagtggaagagataagacaggtaggcaggataaggtcagggcagaacatggaagaatttagggctagaagggacaagcaaagagaagcagaggtaagaagggaagtgggtttttggggaggtgtgagggtggagatagggagtggaaggaacggaaatgggcagggcttctgccacagccttatacgggcactggaggccccagggcctaaagccccagccccttggtaccggtttcttccttctctaactgaatcctccccattcctcccatttttctgctctgtccacatcccctataagcaaagtctgtccctctattgtttcccacaattatttcacttaatcatctttgctttccatctcctctcccgtcttcgttgtatttatgcataaaaacagaagaaaagacagcatctcaagctgaaaccttcctactgccatctttatttttattattatttttttgagaaagggactccctctgtcgcccaggctggagcacagtggtgcaatctcagcccccgacaacctccgccttcctggttcaagtgattctcctgtctcagtctcccaattagctgggactacaagtgcacaccaccatgcccagctaattttatttttttatagagatggggtctcaccacattgcccaggctggcctgaactcccggggtcaagggatccacttgcctcagcctcctaaagtgctgggacttttctgttttatcatgtcacccaggctggtctcaaactcctgggctcaagtgacctgcccaccttggcctcccaaagtactgggattagaggcacttgggattacgtgagccactgtgcccggccactgccatctttgtataccctatcttctgggctcaaagtccttcagaaccaggtaaactgtgggaaaagccctcttctcccctaaccccctcacccttctgatagtcatgtgtaggaatctgtttcagttgctctttggtaagtcgattccgctggagccgtttccggtgctggatacaacgagctatctgggggaagcgggggtggatggacaaggcttaggaacaaaactagacaatctaggacaagccactcccatctcccaactccagatccagtctggcctcacaggcctcagtgcttcccatcatgttccctcagctactcaccattactgctcccatggccaaaaccagcagtcccacaatccctgtgaaagggatgaggtaatagcccaaggggaaggtattgtctggaaccagaagcacccgagccctgggaaaaggatgaccagtctcagcagggcgagaaaggcaaagggagaaaaaaagagggacaaagtaactggctctggacaaagcccataggtggggacaggaatgggaagaaagtcaaagaggcagggaaggaaggacaggaggctgaatggttcgggtaatgaggaggcctgggctccaggttggcatggaactgcttgctgaaggaagaatgggaaggaggcacatgtcctaccccttctcgtagacaaagagggcacgcaggtactcggagcttctctccccaataaatacagacgggatccagatctgctgctggatttcctctgcagggatcaaggtgttactctggggactcacaaccttctactcaaatcctctgggaaccctggcatcttgcactttggccccaccccacctaaaggattggcttcttttcctgaggccttcagccttcccaccatctctgggtcctactgaaagcccagctgtatagattcccccagccttaccactattccacaccatgttcagaagttcattggaattcacattgtgtactacagcggcaccatatccagccttctgggcatttaggacctagggagacaaggcagaggacaaggagccatcatgggccttacctgtcttcattcctggtgccttttttttaccctcagctgcccagctccccttcctcattcagcaaccttgaggtcaaagttgcagtcgaatcttcgaagcagcgcaataaagactgacccattgaccggggctgggggtggtggggcaatggggctgcaggcattgtctgggtgagcctccacaaggaacccctgaaggatggaagcaaacaacagtgagatttctcctttctagattctgctctctacaggggccaccaaacacaccagcccacatgctgcacatcctctatcctcacttcctcctccttcctggggtctgagtgagcatcccaccatcacaaccttctcttagcctcttgaaaaggcaatgacataaaacatcccttcaccaaactctcccatcatccctctcgctgtcccagatgggctaatctgtaccctatactgcaagctaatgcaattatttttgccttctaatattccaattgtaattcaattctcaaaccacccatgtcactttctctcaagttctgtttcacagtcccctctccagcacatactcatacagacacactcccctcccttcagttttctttttgtttttcttttttttgagatggagtctcgttttgtcacccaggctggagtgcagtggcgcgatctcggctcactgcaacctccaccttccggtttcaagtgattctcctgcctcagcctcccaagtagttgggactacatgcgtgcaccatcacgcccagctaatttttgccattttagtagagatagggtttctccatgttggccaggctggtcttgaactgggattacagatgtgagccaccgcgcccggcctcttcaattttctaattacccatctcacaaacaactcgactgctactaaggcccaactgagttcttgctatgtggcagtctttgggatgaagtactaccaaaattgcgtatctactttgatcttcacaataaccctaggaaaacttctaatatcccattttacagtaaaacaaactaaggctcagagagattaacttgcccaaagtcatataagcaataactagcacctgagaccttcctgataaggaccgttgatcctgccttctgtcttcgtccactttcagtctccctgataacctcggagttccaggggtggacactctgtcttctccctctagattctgggttctacactagacgtgctcagttcctaacttcattttcctacctccagtttcacccaggacaaacctccccaaccccagcctaggatggaggatcttgcgaaatactaaaaaaagaaaaaagacagaaaaggaaggaagggagggaaggaggaaaagaaaagaaagaaaatcacctggaggccctcctggctcaaggtagccccaaacagagctggaaggtctgcaaagtccatgctggcattgtggtccgaggtctgcggacaaaaaaggcgatgttccccttcagcctgcaacccttcctttcagcgccctttccccatccgtccctcagactcaccgctcgaatgagcccccgggtcggggccgctccccacagcacagcggccacaaccacaggaagcgggaaggctgcagggtgcatggcagcgggaggaaagaggctgaggaggccgcgcgtcctggtagcaaggagcagaagcggagttctgcgccctccctgcccctcctttaggatcccaggggtccaaccacccccaggtcccacttcccagctacatgggggcgccggggaaggaacaccaactcaaagaatgagatatccaacccgtttagtggagctgggtgggaggcactaaatgtatccttttctggtacggggataaaacgcggaaaggggacggagcctaacacaggtgacagaaaaacttcgggaagggtggcggagctcaaggaggtgggacttcctgctaggtgggccgtgttcccagcctctggaaaagggcttccggtagagaaaatcaggccgctttcagcattggatgcttgagatgaaggacttccggtcctaaaaggccggttaaaaaaaggttagcgatggagggactgcctgtggagatggaaggggcactggtggcccagaagacgacctaataaaagtgcccggaaacccggagcctcctagtttacaaacctctcctccctctggcctccgccgctccttcaaatctcgcgagagtgctcaccacctctcccgtcccctcgcagctgaatagttgctgtgtctatcgcgagagcgctccaacttggcgagccgtactcactcgatctcgcgagaccttcaaacaaactcttctctattttcccgcgattctaattcggtgaaaacagcgcctttcctctggtttccaaatcagttacgccccttctcgcacgcttccatcaagctcctccttcagctccgccttactcccggccgcctttgcgctgcgcgcctgcgcccgcgccggcttccagcgggtgtcggacctgagagctggaggggcgtgcgcgcgccctcgctctgttgcgcgcgcggtgtcaccttgggcgcgagcggggccgcgcgcgcacgggacccggagccgagggccattgagtggcgatggcggcgacggcgagtgccggggccggcgggatagacgggaagccccgtacctcccctaagtccgtcaagttcctgtttgggggcctggccgggtaagctcaggccccagggatgggaaaagaggaggaagggaagggcaaaaggaaccgggcccggttcatctctgggtctgttgcagtgaactgtgccggcacggggtcagcgcgatctccagcgtattgcgagttccccgatgggctgctagggccccattgcag

SEQ ID NO: 97982 - DNA, 17149 bp, Homo sapiens
aaaccatccctgaacttgatcagccaccaaagctccgtggggtgctccaagggcatttggagagctccagaaatgacccttttctccaccccgacttttgctgcctcctccccctgggcttctatgtcttgggtctcttctggctgctctttgcctctgtggtcctcatcctgctgctgagctgggttgggcatgtgaaaccacaggccctggactctggccaaggtgctgctctgaccacagccacacaaaccacacacctggagctgcagaggggacggcaagtgacagtgccccgggcctggctgctcttccttcgaggttcgcttcccactttccgctccagcctcttcctgtgggtacggcctaatggccgtgtggggcctctagtggcaggaaggaggccctcagctctgagtcagggtcgtggtcaggacctgctgagcacagtgagcattaggtactctggccacagcctctgagggtgggaggtttggggaccttgagagaagagcctgtgggctctcctattggaatctagttgggggttggaggggtaaggaacacagggtgataggggaggggtcttagttcctttttctgtatcagaagccctgtcttcacaacacaggcacacaatttcagtcccagccaaagcagaaggggtaatgacatggacttggcggggggacaagacaaagctcccgatgctgcatggggcgctgccagatctcacggtgaaccattttggcagaatacagcatggttcccacatgcatctatgcacagaagaaaatctggaaagtgatttatcaggatgtgagcactcgttgtgtctggatgttacaaatatgggtggttttattttctttttccctgtttagcattttctagttttccactattattgtatattatctgtataataaaaaataattttagggttgggagtgatggctcatgcctgtaatcctagcactttgggaggccgaggcgggtggatcaccagaggtagggagttcgagaccagcctggcaaacatggtgaaaccctgtctctactaaaaatacaaaaattagccaggcgtggtggtgcacacctataaccccagctactcgggagggtggggcaggagaatcgcttgaacctgggaggcggaagttgccgtgagccaagatcgtaccactgaactccagcctgggtaacagagtgagactccgtctaaaaaaaaaaaaaaaaaaaaaaaaaacttctggccgggtgcaggggctcatgcctgtaattccagcactctggaaggctgaggcgggtgggttgcttgaacccaggagtttggcccaggcttggcaacatggcaaaacccgacctctacaaaaaatacaaaacattagccaggtgtggtggcatgcacctgtggtcccaggtacccgggtggctgaggagggaggatcacctgagcctgggagatggaggctgcagtgagccctgaaggtgccactgtactccagcctgggtgacagagtgagagcctgtctcaaaacaacttggcttcttttggtgaagagtggctggggcacctgtcatgagaattcacaaggctccaaatgccctaccctggtcacaactacttatccaatagacctccagttacagcctacacttcccctgcctggggtgcctcctctcctccagggctggccacccaccaggccaccccaggcatcagatccagctcaaaaattgccttcctggagtttaatgacaactgctgggacctacctggcagcagcctgcagtactaggggcaaaggtgggtgcctgctttgcacctgcagcctcagaagtgcagctctcctcactgcccaggtcagcaggacagcaaggggtggaccctgcagcatgcaccatcttggtgtgactgaatagtcttgggtttcctgctctcaggctgggacacaggcaaatggaaccccatttcttttctcataaatcctgccattctctaaacacactggtgtggcttcctctcctgccttgtctccagcccaatccaaggcttggggcccagagaatgggactatggagacccccatccccctccagatggtcctgaagatctcccaaacctgaaagtctgaccgaatctctccccaggtggaggaccaactcctgagcttggcagtcagggagtgccaagcactgaccccatctgacagtccagcttcatctcaagggagatacctcacagtctgtgctccaactatcacaagcctatagatcacctgctccccaacagtgttttactctaagcctttgccctcagtccagccaggtgtgctatccttgccccatccccagccagtctaaccactcagtctgcaagtcactactcccaggcgaggccaggtgctccaagttaccctgcaacactattgctacactcagtttcccaactgctcctgtataatcttgtcttctggaccaggaactccttaaggacaaggtctaggcttcaggcatctcacaatagccaccaaggcgcaggacagtgtacacagaggcagcagcaggggcgccaggatgctgagctccacctcttctgctgatgaggctctgccaaagggacagctcccacctgctgcctgcctgtcccctagcctggcaagcactcctcagtttgaccttcccaaactctcttgtgccccaagaggttttaaggctccttgaaggctggcctgggaaccacacatcttctaaagaaatggacaaggttctcactctccccagccaaggacccagatcaggtctctggccagcattcccctttcctcaagcttccagtgcccacccacttaagccctggccttccacctgcactgcctccagcccacagtggtctgacttcctctctaagtctctttatttcctccctctttaggctgcagaagcagtcatcagaccgaggggcttttcctggggattatgtgagatgatctgggcatcggtggcattcttgggcgagtggctggaggaaacacaccgggcctgggatttgagtttttctggccctgtcagctgctgtggcatgacagatttatacagcatttgcaaaaaaccagcggctgctttttctttaacaatttttcttaaaaactccagttcctattctccagcttctttgtccagtctcctcccctctcctagccaccccccagactctccagatttggggctggtgtcatcaatccaatttattaagtcctcaatgagggggaggaagggccacatctccctctgcaggccctttgaccatcttgatggcttctgctcctccctgtcccctcagctctgccttggtttccccactgacaaaggggatcttctgctgtcctgtgtgccctgaaactaaaacccagggggaggccagaaatcctcaggaagttttccagctccctgcaagaatagccaaggacagagaaatcacaggatcaggacgagcagggcaagctggagcagggggtagaacagaccaagtcctttaccgcagaggaagaaaccacactgtggaagggaaataaatagaggggtccagggcagcagagcccaggcccccagggcgcagtggctataggcgcagcaggcgagtgggagcccccggccgcttcagccactgaggaagagacgcttgtaggccttgttcatctgctccaagaagatgaaggtgaggacggtgtgggggcccaggcgggcatagtacggcgtgaagcccttccacaggctgaagaagccctcgtagcggacaactttgaacagcacgtcctagacacagacaggcagggcgctggggctaggactctaggtccccatccccctcacccagctgccttcacacctttcccaggggatccgacaccccctcccaggcccccagaatggcttcctcaccagcccgttcttgtattccggcttcccatcaatcatccgcatgttctggattctgcaggagaggacgcaggggcatgagagaccgaaagggcaccctcccacccacctccaggcccaggctgcacactcaccgggtcttggcaatgtccacaggcatggaggcagcagtggtgacaagaccgctgatcatgctggcacagaagtggcacaagatgttgtcagagaagtagcctgggggaggtgaggcgggggtggcagtcagctcagaggtggctcaggccaggctgggaactaagggcccagctctggatctcacctgagtccagtaagaactgcttggattgggagtaggaggcgagctgggcagcattgacgacgacggcccgagccatggtagggatgcagccctggagggaggggagcggggaagagtcagaaacccctaaaaccagacctcacagcccccaagtctccagcccctccactcacccgccacagtgtgaggacaccctcttcccgggtgattcgaatcagggcgttaaacacatttttgtagccacggcgctggtcagctggaagcctggtgggaaggcagaaagaggtcaagatcaggattgcccacaggtgcaaagaaaggaaggccagaacaggtaaacactctgctccagatccgggataaaaaactggtcctttcattctagattcgagggaatggggctggggttaggttcagacttggaactcaccggccatcggcagtcatgcggataagagccacttcggctggtgttcccacaaaggcaccagtggcacctgcggtcatgccaatcacagccttcagcagaaagccagggggagtaccatcagccccagtcaggcgctcaaacagcacggtatagatgccaaggcgggtagtggtgtaggtggcctgacgcagcaggccagccgacagcctgaggagcagaggggtcagcatatcaggccaaggtctagagctgccaacccacagtctaccctccatcctgaggccccaatacccagtgtaaatgcccctcaggccttctgccttcaggatactggtgagggcatggaagctggttttgtactctcgagtcttggccccttccccgctcaactgcatccggttcttcaccaggtccaggggctggacaaaaactgtagctcccatcctgggggaagacagaggtggagtgaagggccaggcattccagatctaccagtgcccactggagcctggcagcaagaggttacaaaggtcagggcctgccatgcgattcaagaatcaggatgctggtgagcatgtgtataagagtctatatgtacaccaagtgcaacgggtctgaaaagtctagttgtccagtaggggccatgcaatgaaagtgctccaagcagcttcatgacagtcaagcagtgacctggggctgcacgcagtccgacacagggaggggaggaaggggcatccaagatttaggactccaggtagtcctgcaggagccatttaatggcctggaaccccctgccgcccggccgagcttagcaatgcgctgggaaactcagctggcccggcgggggttgtgcaacgaccctgcatgcagtccataagggtcctgcaatggggccctagcagcccatcggggaactcgcaatacgctggagatcgcgctgaccccgtgccggcacagttcactgcaacagacccagagatgaaccgggcccggttccttttgcccttcccttcctcctcttttcccatccctggggcctgagcttacccggccaggcccccaaacaggaacttgacggacttaggggaggtacggggcttcccgtctatcccgccggccccggcactcgccgtcgccgccatcgccactcaatggccctcggctccgggtcccgtgcgcgcgcggccccgctcgcgcccaaggtgacaccgcgcgcgcaacagagcgagggcgcgcgcacgcccctccagctctcaggtccgacacccgctggaagccggcgcgggcgcaggcgcgcagcgcaaaggcggccgggagtaaggcggagctgaaggaggagcttgatggaagcgtgcgagaaggggcgtaactgatttggaaaccagaggaaaggcgctgttttcaccgaattagaatcgcgggaaaatagagaagagtttgtttgaaggtctcgcgagatcgagtgagtacggctcgccaagttggagcgctctcgcgatagacacagcaactattcagctgcgaggggacgggagaggtggtgagcactctcgcgagatttgaaggagcggcggaggccagagggaggagaggtttgtaaactaggaggctccgggtttccgggcacttttattaggtcgtcttctgggccaccagtgccccttccatctccacaggcagtccctccatcgctaacctttttttaaccggccttttaggaccggaagtccttcatctcaagcatccaatgctgaaagcggcctgattttctctaccggaagcccttttccagaggctgggaacacggcccacctagcaggaagtcccacctccttgagctccgccacccttcccgaagtttttctgtcacctgtgttaggctccgtcccctttccgcgttttatccccgtaccagaaaaggatacatttagtgcctcccacccagctccactaaacgggttggatatctcattctttgagttggtgttccttccccggcgcccccatgtagctgggaagtgggacctgggggtggttggacccctgggatcctaaaggaggggcagggagggcgcagaactccgcttctgctccttgctaccaggacgcgcggcctcctcagcctctttcctcccgctgccatgcaccctgcagccttcccgcttcctgtggttgtggycgctgtgctgtggggagcggccccgacccgggggctcattcgagcggtgagtctgagggacggatggggaaagggcgctgaaaggaagggttgcaggctgaaggggaacatcgccttttttgtccgcagacctcggaccacaatgccagcatggactttgcagaccttccagctctgtttggggctaccttgagccaggagggcctccaggtgattttctttcttttcttttcctccttccctcccttccttccttttctgtcttttttctttttttagtatttcgcaagatcctccatcctaggctggggttggggaggtttgtcctgggtgaaactggaggtaggaaaatgaagttaggaactgagcacgtctagtgtagaacccagaatctagagggagaagacagagtgtccacccctggaactccgaggttatcagggagactgaaagtggacgaagacagaaggcaggatcaacggtccttatcaggaaggtctcaggtgctagttattgcttatatgactttgggcaagttaatctctctgagccttagtttgttttactgtaaaatgggatattagaagttttcctagggttattgtgaagatcaaagtagatacgcaattttggtagtayttcatcccaaagactgccacatagcaagaactcagttgggccttagtagcagtcgagttgtttgtgagatgggtaattagaaaattgaagaggccgggcgcggtggctcacatctgtaatcccagttcaagaccagcctggccaacatggagaaaccctatctctactaaaatggcaaaaattagctgggcgtgatggtgcacgcatgtagtcccaactacttgggaggctgaggcaggagaatcacttgaaaccggaaggtggaggttgcagtgagccgagatcgcgccactgcactccagcctgggtgacaaaacgagactccatctcaaaaaaaagaaaaacaaaaagaaaactgaagggaggggagtgtgtctgtatgagtatgtgctggagaggggactgtgaaacagaacttgagagaaagtgacatgggtggtttgagaattgaattacaattggaatattagaaggcaaaaataattgcattagcttgcagtatagggtacagattagcccatctgggacagcgagagggatgatgggagagtttggtgaagggatgttttatgtcattgccttttcaagaggctaagagaaggttgtgatggtgggatgctcactcagaccccaggaaggaggaggaagtgaggatagaggatgtgcagcatgtgggctggtgtgtttggtggcccctgtagagagcagaatctagaaaggagaaatctcactgttgtttgcttccatccttcaggggttccttgtggaggctcacccagacaatgcctgcagccccattgccccaccacccccagccccggtcaatgggtcagtctttattgcgctgcttcgaagattcgactgcaactttgacctcaaggttgctraatgaggaaggggagctgggcagctgagggtaaaaaaaaggcaccaggaatgaagacaggtaaggcccatgatggctccttgtcctctgccttgtctccctaggtcctaaatgcccagaaggctggatatggtgccgctgtagtacacaatgtgaattccaatgaacttctgaacatggtgtggaatagtggtaaggctgggggaatctatacagctgggctttcagtaggacccagagatggtgggaaggctgaaggcctcaggaaaagaagccartcctttaggtggggtggggccaaagtgcaagatgccagggttcccagaggatttgagtagaaggttgtgagtccccagagtaacaccttgatccctgcagaggaaatccagcagcagatctggatcccgtctgtatttattggggagagaagctccgagtacctgcgtgccctctttgtctacgagaaggggtaggacatgtgcctccttcccattcttccttcagcaagcagttccatgccaacctggagcccaggcctcctcattacccgaaccattcagcctcctgtmcttccttccctgcctctttgactttcttcccattcctgtccccacctatgggctttgtccagagccagttactttgtccctctttttttctccctttgcctttctcgccctgctgagactggtcatccttttcccagggctcgggtgcttctggttccagacaataccttccccttgggctattacctcatccctttcacagggattgtgggactgctggttttggccatgggagcagtaatggtgagtagctgagggaacatgatgggaagcactgaggcctgtgaggccagactggatctggagttgggagatgggagtggcttgtcctagattgtctagttttgttcctaagccttgtccatccacccccgcttcccccagatagctcgttgtatccagcaccggaaacggctccagcggaatcgacttaccaaagagcaactgaaacagattcctacacatgactatcagaagggtgagggggttaggggagaagagggcttttcccacagtttacctggttcwgaaggactttgagcccagaagatagggtatacaaagatggcagtggccgggcacagtggctcacgtaatcccaagtgcctctaatcccagtactttgggaggccaaggtgggcaggtcacttgagcccaggagtttgagaccagcctgggtgacatgataaaacagaaaagtcccagcactttaggaggctgaggcaagtggatcccttgaccccgggagttcaggccagcctgggcaatgtggtgagaccccatctctataaaaaaataaaattagctgggcatggtggtgtgcacttgtagtcccagctaattgggagactgagacaggagaatcacttgaaccaggaaggcggaggttgtcgggggctgagattgcaccactgtgctccagcctgggcgacagagggagtccctttctcaaaaaaataataataaaaataaagatggcagtaggaaggtttcagcttgagatgctgtcttttcttctgyttttatgcataaatacaacgaagacgggagaggagatggaaagcaaagatgattaagtgaaataattgtgggaaacaatagagggayagactttgyttataggggatgtggacagagcagaaaaatgggaggaatggggaggattcagttagagaaggaagaaaccggtaccaaggggctggggctttaggccctggggcctccagtgcccgtataaggctgtggcagaagccctgcccatttccgttccttccactccctatctccaccctcacacctccccaaaaacccacttccyttcttacctctgcttctctttgcttgtcccttctagccctaaattcttccatgttctgccctgaccttatcctgcctacctgtcttatctcttccactggctttgtaggtgaggggaaatttttgcaaggctttaaaagccttagccctgggtcattgtggctcagtgaaggactagattattttctttctgtcccaggagaccagtatgatgtctgtgccatttgcctggatgaatatgaggatggggacaagctgcgggtactcccctgtgctcatggtgaggccctcactgcctgcccatgcccctctgccaccagcagccaccaggtgcttcaccttgttcctctctgcagcctaccacagccgctgcgtggacccctggctcactcagacccggaagacctgccccatttgcaagcagcctgttcatcggggtcctggggacgaagaccaagaggaagaaactcaagggcaagaggagggtgatgaaggggagccaagggaccaccctgcctcagaaaggaccccacttttgggttctagccccactcttcccacctcctttggttccttagccccagctccccttgtttttcctgggccttcaacagatcccccactgtcccctccctcttcccctgttatcctggtytaataaccccccacacatamacctctggtgacctatttgcacagaccgtcgtcttccctccagtcttytgagggataggggacattccatcccaagcttctcccttacccacacctatccttttgaggggctttggggtggrgctggggcaagcagagggactgggtcttcacttcttgggctaataaaattgtttctttgtggactaaggaagggtaagatcattctcacacaggtgaacttaaccctttggtggaatcacccctttagccataaggagcaagggaatgctgagagacactaacctatagtcatggggacagccccagccggcatttgctatgactcagaagggggagccccacccacaaggatgactcaactagccctgccttgcctgcaggcctgcacccattctctggtccagatggctctattccatcatccaccaatttgaccagcacactgaggacttaggcctggaaatgccactgtggaggggcagggccacctggccagaagctcaaattcctgcaccttgtagtacctcaacctccctgctcccaagccacgataaaggaggcaagtcacagtgcctatcccccattctgacacccaagctcaaatcacacagcaccttgttagtagaatcttttttattcagaaaaaaaaaaccccaaaaaacaaaagttttccaaccacacacgggagggatatgggtagggggaggtgtctgtccatccagccctggcccccagcccatgtggttttggcagcaataaggggtatggggtaatggcccaaaaaataaaatggtttgtgtgtgtatggggaggaaaggggtgcaaagctgtggggagcggtgaaggggaagggacagacgaggtcagtactgggaacgccgaaggtgggaggccatttcataacatttcttgttgatcaaaccaccgtggacaccttctttgcccatcagcaggactagcgctggaggaggaggaaagagaaaggaggctaggatccaggtgtcacaattccaccccctgccagctgttcagcagctgtccagccctgggggctgtaacccaacctcatctctcccaacccgcccccccaccacacacaggcaggctgtcagtcaccctgaaacaataaggcttttcaaaagaggaaaatcaagcttaaacgctggagaggaacagactaaaaacttaggggtcaaaggctcatagactgttgattcatgtgttcaggctagaaagggctgtggatgtgcatgccacctccaggttctaacaaaagaactcaaacgatgaactcgatgattcaggaccccaacaatctacctatactcctagaaaacagtttctaatccgagctcaaggcagtaagtaatttaagaggtaatgcagttcagcaacttcgaattacaagatgaggaactgagacagaatggagggactatcccatgttccagcatccagcagacaaggaacacaatactggtctgactcccttcatgttggggaatcacacaaaaaagcaccctcaagattaccagaaggcggtacattagagatcttggagctaaaggaagggtaagactcaggaactcactcttgtcagtcttggtgacagtgacattgaaggtgggggccccaccggtgctcttggtacgaagatccatgctaaattccccatcctgcagcagtgagtcccggatcaccgaacatttctggcccccaagtgtcagcccattcacgtaaaaacttgaccggtctttgccaaccaggacacccacctcagctggctggaagaggaaccaagcgcccatcaagttagtcagtgcaccaagattcccaccgtgttctccaaagacccacctgtcttccacttctgagaaccaccccgccgtgggggctaagtataaattatatactcagtacacatcaatgaactgtgagaaactctgaggactgtgggacgttagtgcagaaaaagatcatgattctgaaacttagaatatggaaccagggaggaagggatgacatactcctctagagatttagatgtcagtgttaatggggaaagtaaacccaggaaataaagggagtcagtgaggtaagtgaggagcctttggatgctcagaactctccttcaggaaaagcagaagcggagaggggaagggaggggggcgggcgaggcaagagaagcaactttgcccttatttggtcaaaggttctgcaggagctgttagggcccggacgcctgggtctccaagtaacctagagtttagctccaggtatctctgctctgagatgaggaagcagacccctgggggctttccgggaaagttggaaaacttttgaaggtggacaggggccagacccggcaggccagctctcgggtctaggtaccccgggaacctttcccccctccccctttcaccccaagcccccacatccggtcccctcccgcccggaaacccccttccccccccttttgaacttccgctccccctccccacttccgggcagtgtggacagggagatggtggtgggagcagcggtagtaaaccaatatactttcgcttatgctgtctcagaacttctcacaaagttcccctgctccaggccccgccggatggcgggaagggagggcgaggggacttccgggattggcctcgcaggaatgttgaatccaacgtgctgagctgggggggcgtgtggtggcctcgccctctctaacggagttaggaggggccaggagcccacagagggtgggcaagggaccaagaccacgcgcctggggctcccttccgcaccaggagaaacaatggtagagggacgcgggctggcagccggacggggagctgggggtccaaggatccccgggtcccctctcaatcccaatccccagtaaaaactgaggcgcgtccccgccccgccctgggagaggcggaagtgggccgccgcaccgggcgccgcgcccctccccgccctgtgccccggatgtaacgccccgtcgcggaaagcggggtagcgggcgggatgggcgccgccgcctggggcataggacctacgggcaactgagggacccactcacgtgcagccgccattcgcgccgcttccagggcaagcacccagtcagggcctctcgctgcgcgccctagaccgcgcccgcccccacccaagtccctccctcagggtccaaaccggagcagtgccccggaccgcgcaggcctcgcagtaccgtgatgttgacgaacgttttcccggggacggcggcccagacggagggcgagtccttgtagcccacgatggccgcgtcctgacaggtcccgtccgccatgaggttgtcgatgtaggcgttccacccggccatggcgctgctactggggctgctctcggcgctgctgctggggccgcggactgggctcgagctgcctcggctggcgggcggggggaggcggagagctcggggcacgcgctgccgtccggaccgcggctccgctcgctgtgcagcagccctcgcaccgccacttcctgctcctccccccccccgccccgctagatttttatttgcaaaggacggtaggggcggggcctactccccattccctccctcccccactcgccagcccagacaccgaactttgcaaatgcaattttaaaaatccctccccctattgcaaaatttgcagagttcgatggaaagcaatgcagaaggatggggggtggcgggagagaggtgaagggtagggtttgctccaatttgcactgaatataaaccagactttggtatcggggcagggagtgagccagaagaaggaaggaaggagaaagcaggaggaattagcaagctgcaaatttagcaaattaaggagagttcggggagcccagggttaaacgggatgactcctccttcccccacctccgccgaagggaaggaccggcgggcggcggcgcgtgtgcccgcgcctgcgcctgcgccggggccgggagtgcatggggcggtcggggccggagccggctgcacgggagcgcgcccggcccgacccgtgtggaccctgcgggaaaggaaggcgggctggggacgtgtctcccgcctggcggaaggggcgggggcgaagccgtgcgcgctgccgcctcaccacccttgattttacttattcaagtaataagaaagcaaagaagagtttggccaaatcctctagtcgctctcatagctgaaggcacccaccggggccacttctgtccccagcgtcttctcgggtcgtgcaggttgggttcaccagggcccattctcagtctagaggattgtcccttctctggatcggctctagcccagggcctcaccccacatcccagccccgcccgccccaggcaggcaatgtctggatcaccggccgtgccccttggcctgtgtctgcagaggtcacagagcgcggacacccgcggggcttaacaggcggggctatttttcgaggcggaagaatactcaagttgcaagagtggcaactttttcaagaaggggaaagtcccacttcgggccctttgggtttcttcgcagtcagatgtgcgctcacagccacctggggagggcgggacgggcgggacggccgtgcggcggccgcggtgaaaccgcctcctccgacccgccgccgagggctgggcggcttccggagcctgggctaggggcaaggggtcaccgagcgcggcccgggcggaaagggggttggttttctctctcctcccgagcgcggcgcgcatccctggcgtccacgccgaatcccacagtccccgacgcccctcgagtccgtgttcctcgacagccgcgcggctgagtcactggcgggctcgggcggggccgcacccgggcacgtggcggcgctccccgcccgccatctcctgacccctggcccaccgcacccctaccccagggtggaaaaatcccgggaggagcggcctgagatgagggggcggggcgagaggggagactggacgggtggcggggcaggtggcctggggtgggggctgggaggccgcgcgggccggcggggcggggagcaggggtggggagagggcggcgggggtgagtcaccgggcgcgcgctgccccggcgccgacgggaagggcctccgagtcgggccgaggcgccgtgtgtcccccgccggtcggctggtatggctgcagaggagctcggggcagaccccgcactggccccagagccggcaaagtggagatctctaccgagggcagagacctacctccccgcagtgctacaagtggggcgccggaagagccccaggcgtgcagaagctcacaaaaggccacccgtcctcggtccattcatttttgttcactgttgattcagccccattcattgatgggctggggccgtgcgctgagcgcccacagtcgatggggaaaggggctctgaccgacagtccccacgccgggcgacaagtgctgtcccagcgttatcagtcgggcgccttgccagccgaaagggcctgtctaaattcgtttcctgtcccctaactcatcccggcgctggctggcctggagagggtaggatggggcggcgccgagaatggccgttatgaggaccctaagaggtgagaccctctcgccttctggggtggggggtcccgtcctttcccccactgaggacagaggcccgcccagcgatctgagcatgtgtggacgtcaatcttgcagcccctcttccaggccccctccccagccttgcagggctcaggttacccctggcctttcctaaaggtcactcattcctcttgacgtttgcaaaaggggaatgtaatcctggggtggggggagacccctcatctgtagcccctcccttgctcctcccaaagggtggaattagaacagggactgttattgggagacagaaagtgggggatagtagttgacctttggtaagggggcaggtgcccagggccagaggcttctgcttcaggctgtagtgggcacttggctgccagcccagtgtgaaggggggaggatggagagaaagagaggcggggctggctggggaccgagtggctcagggataaatgcgcagcctgagagggggtgagctgacactgtcccagctgccacctagactcggagctccatccaaacctccagcgaagacatcccaggtcgggtgaatcttccagccctgggggtggaggtagtaaagggt

SEQ ID NO: 97983 - DNA, 43633 bp, Homo sapiens
tctatatatatataaaagtatcattaacctcactttacataggagaaaactaaatttaagtaatttgcgtaagattatactactagtatatggcagagctgaggtgtttttaataaggaaatattgtttttggctagagttagaaaaaaaatttttttttgagacggagtctcacttttgcccaggctggagtgcagtggtgcaatcttggctcactgcaacctccgcctcccgggttcaagcaattctgctgcctcagcctcctgggtagctgggattacaggcaatttatattatatataaattatgttatatataaattatgttatatataaattatatatgattatgtatatttatatatttgtatgtaaatataattataaaatgtatatatatgtgtgtgtatatacacatatacaaatacatatatatacatacatacatatacatatatagcttttgagaacttccatggtaaacattaccttacttctggggttctcaaccatgggcaattttgcacatgcccatccccctacttagaaggaggtgttacttccatctagtgggtagaggctagagatactgctactcattctatgatgcacaagccaatcctcacacaaaagttatatgacccaaaatgtcaataggttcagaaattcttagttttacgtaataaaataataaataaataactccatcatggccatgaccatgtccatcttgttcaccatggtatttacaccacatagcacagtatgtgacatgtcaatggcacttaatatgtatttattcaatgaatgaatcaataagtttaaagtataataccaaattctatttttttaagatggagtcttgctctgtcgcccaggctggaatacagcggcgtgatctcggctcactacaatctccgcctcctggttcaagggattctcctgcctcagcctcctgagtagctgggattacaggtgtgcacctccacaccctgctaattactgtagttttagtagatatagggtttcaccatactgacgaggctggtctcaaactcctgacctcaagtgatctgcccatgttggcctcctaaagtgctgggattagaggtgtgagacaccgtgcttggccccaaattcttaaccttctactgtttaatgatacatgtagggggaaaggtaaatgttcctatcttctgttatgacaccaagtgagaaaaggttttgactgcattacctggaatccctccttagcacattaagtaatctccttgtagaaggtatggagctgcctctcttggatatacttatttttcagtgggattcctgtataaaaatgagtagtcttatatgctgcagtgtgaattacagtgttagaggagaggccagtagaaagaactgtgaagatgtaaaatatggaaaactaattttgtctgagagggctggggaaggtttttatggagaagccattctgcagctagatcttttgggatggagcacatgtaaagggggcatatgatgcaaggcagggattaacataagatgcacttggaaagggagacagacagaggcaggctgggtaaggccaacacgaagctagtagtcagactgaaaactcccatgagggacaagggaaaacctgcatagagacagtaacaatgtagatgaaaaggagcattcacactgtctatgacaatgcaaaggtagaagtactggtaaaataaaaactggcttaaaaatgacaatcaggagacttagcaccatacttacccccatttcggttctggctcttgatttttcgatagtcattgtacaaaggttccaagtacttgtagcaatcaattgcagtgcctgtcagcctcatgtaaagtgcccccagcatgcggacatacctgagagacagatgacagtgaaacaacaggccatcctagaagttcctgagttttacaactagctgttctcatgacagtagtggataaacatgttcttctctttggcaggtaagaaagctgcaattgtggaggtagaatgcagcagaagaaagacagctaaaatatggagacctgagttcaagttcccatgctaccatttatggctgtgggaacatcatacatattgatcaactttcaaatatatcatcagtaaaactagaataaaacctatttacctcacaggattactctaagaatcaaaagaaatactgaattttattttattttttaaggcagagtcttgctctgttgcccaggctgcagtgcagtggcacgatcttggctcactgcaacctccgcctcctgggatcaagcaattctcatgcctcagcctccatgtagcgaggattacaggcgcccgccaccatgcccagctaatttttgtatttttatttatgtatttatttatttcttgagacagaatcttgctctgttgcccaggctggagtgcagtggcacgatctcaattcactgcagcctccacctcctgggttcaagcgattctcctgcctcagcctcccaagtagctgggattataggcatgtgccaacacacccagcctaatttttgtatttttagtagggaccggttttgccatgttggccaggctagtctcaaactcctgacctcaggtgatctgcctgccttggcctcccaaagtgctgggattacaggtgttagcaaccatgcctggcatatttttgtatttttagtagagacggggtttccccatgttggccaggctggtcttgaactcctgacctcaagcaatccacctgccttggcctcccaaagtgctgggattacaggtgtgagccaccacacctggccatatattgaattttaaaacagaaagaagatatatttaataacaatacaagaacaagtacacataaacatgactgctggttttggaaaaaagtaagtcatctgggttcaaattctgactccgtaatttactaagtctgtgacactactggtcaaatcatgtgttttctcaatccttgtaaaacggagataatgctacctaatttatggcttggtatataaacaagaaatgcattgaaagtgctaagtatagcacagagcacacagtaagtgcctaacaaaagttaggtattttctagctgttaatgctttattagagtcgttccagccaggggcggtggctcacgcctctaatcccagcactttgggaggcgaggcaggtgggtcaccgggtcaggagatcgggaccatcctggctaacgcggtgaaatgccgtctctagtaaaaatacaaaaaattagccgggtgtagtggtgggcgcctgtagtcccagctacttgggaggctgaggcaggagaatggcatgaacccaggaggccgagcttgcagtgagccgagactgcgccactgcactccagcctgggcaacagagcgagactctgtctcaaacaaaaaaaagagttgttcctcttccctttttcctatatctaactacttaaatttcctcttgggtaactaggaggcttttgaaagtcatagtttctttgtacgagaagcagaatactgtagcaaagaatatgaactctgaagccagatttgccacttactagctgtttgaacttgggcaaaattaattaatctctgtgcctcagtttcctctcctgtagaatagggattaaaagtttagaaggttgttgtgaaagtgaaatgaattattatatgcaaagcccttacagcatggcacataagaagctattatgtctgtctcctatacttgtttgtgatttcctcgagaatcggtaatacggtaataagctgacattttctaggtgtttaccatgcagcaagtgctgtgttcagagatctgcatgcattacgttctttcactcttatattatagtcaccattttacagataagcaaagtttagaaaattaagtaacctctccaatgtcatagttaatgggcaacagaatctggatgtgaacccagatcttacacctcttaaccaccaccttttgttgtttgattttcacccctgagcgtccagtgcctaccaacatatcaggcactcacttttgcttaatatgtatttagtgaatctgtgaaatcctttttcagggaaaaattaccaaaactgagaaagtaaagtagaagattaatacaatcagaacagataaaatacaaacttggcagggtgtggtggctcatgcctgtaatcccagcactctgggaggcccggggggggaggggattacctgaagtctggagttcgagaccagcctggccaacatggtgaaaccccatctctactaaaaatacaaaaattagccaggcgtgatggcacatgcctgtaatcccagctactcgggaggctgagacaggagaatcacttgaacccaggaaatgggggttgcagtgggccgagatcgcaccactgcactccagcctgggcaacacagagagactctgtttccaaaacaaaaaacaaacaaaaaatacaaactcaagggctcaaaagcaaaaatctggagtggaactctctagaaatgagatacattgtgtacacccctcttaaccaaagcccaattctaaaccgccaaaattaaacctcttatattagctagtgaacattgcactcacttgaaatcttcatttttgataaactctacaatgatatccttctcgggttgaatttgaagcatcttcaaggttaaacacagaaagggtgttggttttatgttgccaccatagacgccacccacaaaccttaactccatggctttatcgactacaagttcagctaaaaaacaaaaacaatacagtaacatattagggctaagctcttcctagttggagtggagttagttcaagctttggttctcctaaatatacatcaacagtgtaatattaggagaacgaatgtgtattaataacagtaacgacaacagctaatatacattgagaatggataataaaataggtaccctgctaagcttttcatattatctcacttaaccttttttaacaagtcatgaagaaagttctagcaatgttcttatttccaggtaaggaaaatgagggctaagaaaggtaaagtgacttgctcaaggtccacagattgtcacaggacatggatttaaagccacaattcaaatcggaagattacctggaagacttctctgaagcactgatatttataaatactggaaccggcccagatctaagaatagtaagatcatgaatttggtttcaggcatattaacgttaggtccttaaagaccttcaacagattgtgtcaaagtgttatatccggatccctgagcttaacactgttgcaacccagcctgctatcattaaatacggaataactcacaacacccaactgagacagccttcagaatatgaccttaccagattcatctgtgcctctaatactcaacacaagacgaggcacttagcaggcactcaaaatttttctgaatgatcgacatactccgttccagtaccacccccagaggccagtcgctagtcctacccgcgctcggtcaggagaaatgggccacaagggggctgagaggcgctccgcgcgcttccacttacctgtaagtccaaagcactcctctttccagtacttggactcatagattcgcgttcgaatgatcttctccaccagatattgagggttggtgccatggatgctgtgcgcatccttcactgtacggttagccattttagaatgccttcaattctatttccgtcggatcctttaatgcctcacatccaggttcagaaaaagcacctagaggaatggagaaaggtggaagaagtttcactaaacagcttaggcgaccatcttgaagccggaaacaccgtagtgtaaagggcttccgctccccgcgtcgcctatcgaatcaatgatggcggctgcatgttagcggatgtacgtcatgcgcccctcttaggtgtacggagtgggcggggcgagctagttggtgtcgcaacgaagggacggtctgggggcggggccacgccgattggcgcgaagttttcttttctccttccaccttcttttcatttctagtgagacacacgctttggtcctggctttcggcccgtagttgtagaaggagccctgctggtgcaggttagaggtgccgcatcccccggagctctcgaagtggaggcggtaggaaacggagggcttgcggctagccggaggaagctttggagccgggtgagtgtggcgtccagcgggctgcgagggactcgggggagggcgcatcggaacctctgaaactgaggacgttctctgtagactcagtcattgattcttttagctgacatgtaccaagcgcctgttcagtgccaggcactgttctgaactgttaagagcgttcctctgttccacactccgattcctaaaaggcttcccgcgctgcagggaactgagtttgcaggggggaaggcggaagccaacagcctagaagcaggagcattcctgccctccgcaccctgatgctcagtgatgactttccctccatctgcatttgtaaagcactctacttgtttcgttctttgagctatagtgtaggaaccactacagggaaggcggagcagaggttattaccccattttacggacgtaaattgcgcccagggagggacgtgtcttaggtcgcttttcgtgactaagcagtctgggctcctacccagatctttttttcagatgagctcctaactgctgggctgtctgtcattcaccttcttttcagaagagaagtctggtggcccccttcctacttctcttttctaaccccggaattgaagagtcttctgctgtgacagttggaaaaggcattcttatcctgatctatttgtgaaactgcaatgattatatacgattctagttgtctgtaacacatgaataatagtaccctcgtctctgctgtgttaggtgggctggaaatgccaaaggagtttccaatatgacagaatggtttaagtccctttgcaacagtttttaactttaatggagggcaatatgtggactttaggaggtttgtgaatctgccgaaattgaatgcaaaattttgcttgaattatgttagttccatagtattcatcaaatgatacttaataaataaaaccactgtaccttacaaataaatgcaagggattaaggtagtgggaaagtggatttaccattttgcattttttcacttaatcttccattatcctaaaatagtgcctggcacacgatgggtacttaataaatattggttgaataaacggaagattctattttctccattttgtgggtaagcaaattgaggcccaatccacaatgttcagtcagtggctgggaagcctgatttattgtaataagtacaccaaaagcaagctctcagttacatattaacattatccagtttcacacagtgtgttgtaaggtgaagtagttaagagcacagtaattgcagtctggcttttccgggtttgagttaaggctgtgccatcctgtataagataggataagttatcaccttgaagtgataataacatctacttttcttttttttattttgagacagagttctgctctgtcacccagactagagtgcagtgttgcgatctcggctcactgcagcctccacctcccgggttcaagtgatttgcctgccaccatgcccacctgatttttgtatttttagtagagacggggtttcaccatgttggccaggctggtcccgaactcctgacctcaggtgatccacccacctcagcctctcaaaatgctgggattacaggcgtgagccactgcgcccagcctttgtatttctgttttatccttgtgtgcattttataagcgtcatgaagacatttacaacccctgtatcactgtcttttaatttcactttgttagatrttttacacctattgttctgccttattcctagtatttctaaatgttacagtttcatttcttaggaattgacctttctgttttcctggatggaaagagatacggcatagtacaagatggacacagatgatactaaattgcctgtgtgtaatcttcgtagaccatgacttcaaataaaatgttttcttagtctaaaatgtatgggagtgtagcaggggcagaaaataagtctgatctcatttgaagggagggactgactatgtcttagaatccatcagataaataccaaatatttatcatggtaactcagagtttggactcttccacagaagccatggcacactaccccacaaggctgaagaccagaaaaacttattcatgggttggcagscccttgttggatcgaaaactgcactaccaaacctataggtgagtgatggggtcctttggttgtcctggaaatacagcttctcaagctaaacagtcaacttgtatctagcctgttctaattactacagattgaccatgaatgaacaggagattagaactgattgtaaggagggttttgtttgatgcaagaagatggtgggataaatatagcagttagtgatggagcaaaattatggcaggctcataaaattttgtatgtaggataatgtcatgtctatttaaggtgagttctatataacttttgatgaaaacgagatgatagatgtttttactatgtctttcccagccctggagatctctgacaatttgacattgttactgggcagcttgacagccttgggaaacatttgttgtgggaagcatttgttgttctttgtcaataactgagaggaattagggttcctaataagacctttggattcattactcagctaaaacaattcattcaacccattttgcctattcttaaatataactgggcgaattggtttcccagtaggagagttggtcagcagaaagaaatcaggattggagagccctctcctttgtgcccaggggatctgaagagcttgacccactttaagttatttcctaatgtgcttctctgttacttcctagagaaatgtgtgtgaaaacagaaggttgttccaccgagattcacatccagattggacagtttgtgttgattgaaggggatgatgatgaaaacccgtatgttgctaaattgcttgagttgttcgaagatggtgagtttgggactggaataataaaccattccttgtcatgaatgattgggaggtggggagattgtggattcttttgttcacagcagtgtgcagggcacattagactgaggtgggatcacgtaagaactagctgcgtcttcttccatctaaaaaatttctttactcaccaaagcagtattgagtaaaacggaactggaaggctcaataatttaactttttcattattttggggagtaagcaaggctattaaggcagaattgggggggatggagagaatggatgaatttgggggaaagggagaaggaaaaaacaggtaatttgtactatcatagagatgtgtcctttagttttggcatgaaggttagtaatatattttgcaagtgctacttcgttacaagtgaagaggtaagttggatttggaaggtgtagcaattggggtttcagtcagggaaaacaaaaacacttaagatattttacccagaggaacttgtgtgttaatgttggaaaggctagaagaaaaggtgacatttaccagagatgagtaagtgcaggaagccacggctgcccctaggctggaggaacaaaagggaaggtggcatcaaccagagcctacaagcccacatcgaaagccttagctgatttgctgaccttctaaccctctgcaaaacaagaggagagcacagaaatgtgggagtggggcacagctccacaaggaggattaggaagatagcaatttgaaactatctaaaactgcctcgttcaagagacagaagaagggcatggtcattaggtaatcctgtggtagtctgtatgcccaagagaaggaactgatagactgagtggataaagatgttttatattactatagtcccccttatccgtggtttcaccttctgcgatttcagttacctgacaacaaccatagtccaaaaatattaaatggaaaattacagaaaaaaacaagtcataagctttaaattgtgtgccattgtgagtaatgtggtgaaatctcacgctgtcccacctgaaatgtgagtcatccctttgtccagtgtatccgtgctgtacagtatgtgtgtgtaggaaaaatcatagcatatacagggttagtggcagcatctgcaggttcaagcatctactggtcttggcgcgtaccctcagcagataaggggagagtactgcacatagataaggaggattttggacatactttctctttgacatacttagaagtatggagaaaaacctcatcaaactaatgtccagtagaggcagcacatcagaatcatgggcttcggtgtatagattctagaatcctctcttggtgctccattggatgactttagtctttctctgaagaaagctaagcagggaagagaggatgatgatgaggcactaatgagtgttctttcggttggagctattgctggtacggagtgatactaatcgtatgctgtaataataaagctgaagattgcaagcatttgccagaagtcatctcagtggttgatgctgtaattcttgtgtgtgtgtgtgtgtgtgtgtgtgtgtgtgtgacagtgacagaatcttgctgtgtcacccagactggagtgcagtggcacaatctcagctcatgcagcctcaacctcctgggttcaagcagttctcctgcctcagcctcccaagtagctgggatgacaggcacctgccaccatgcccagctaattttctttttctttcttttttttttttttttttttgagacagagtctcgctgtgtcgcccagtctggagtgcagtggcgccatctcggctcactgcaagctctgcctcccgggttcaagccattctcttgcctcagcctcccgagtagctgagactacaggcacccgccaccatgcccagctaattttttgtatttttagtagagacggggtttcaccgtgttagccaggatggtcttgagctcctgacctcatgatccgcccgcctcagcctcccaaagtgctgggattacaggcgtgagccgccgcacctggacaattttttgtatttttagcagagatgaggtctcaccatgttgggcaggctggtctccaactcctgacctcaagtgatccgcctgccttggcctcccagagtactgtgattacagacgtgagccactgcacccagcctgatgctataattcttgctaggatttttgttttgctgctgtttgatgctgtctttatagtcactgatttttatttgttcgttgcctgtgtttagagtagctcctctcagaggcctttttgtcattcctttgccggctgatagcaccattaggaaatggagcaatcccagaagagcgggtgtgtgggctggaattagattgctgcagttggtcatgtgacctttgacaaactctttaaggtcccccgtcacttgatttctttgcctgaaaagggggatagctgtagtacctaccttgtagggttattagaaggattaaggatcggccaggtgtggtggctcatgcctgtaatcccagcactttggtaggccgaggcaggcggatcacgaggtcaggagattgagaccgtcctggctaacacggtgaaaccccgtctctactaaaaatacaaaaaaataattagctgggcgtgatggcgggcgcctgtaatcccagctaattgggaggctgaggcaggagaatggtgtgaacctgggaggcggagcttgcagtgagccaagatcaaaccactgcactccagtccaggtgacagagtgagactccgtctcaaaaaaataaaataaaataaaagataacacatgttgggccaggcatggtggctcatgcctgtaatcccagcactttgagaggccaaggcgggcggatcacttgaggtcaagagtttgagaccagcctggccaacatggtgaaaccctatctctactaaaaatataaaaattagccaggcgtggtggcacaggcctgtggtcccagctactcgggaggttgagccaggagaatctcctgaaccagggaggcagaggttgcagtgagccgagatcacgccactgcactccagcctgggggacagagcaagactccgtcacaaaaaaaaaaaaaattttggcgggaggtggtggctcatgcctgtaattccagcactttgggaggccaaggtaggcagatcacgtgaggtcacgagtttgagaccagcctggccaacgtggtgagacctcgtttctactgaaaatacaaaaattagccaggtaggatggcaggtgcctgtaatctcagctactcaggaggctgaggcagcagaatcactttaacccaggaggcagaggttgcagtgagccaagatggggccactgcactccagcctgggtgacagagactctgtctcaaaaaacaaaaaacaaaaccacacatgtcaagggttaagcacagtgtctggcacataggaattgctcagtaaagtgtccttgagttgtcttaacctttccctttccaccaaattctttctagactctgatcctcctcctaagaaacgtgctcgagtacagtggtttgtccgattctgtgaagtccctgcctgtaaacggcatttgttgggccggaagcctggtgcacaggaaatattctggtatgattacccggcctgtgacagcaacattaatgcggagaccatcattggccttgttcgggtaggtgatgccaccatccttggttctaccttgaagcttatttctgtctgcctcctgaacttcatgaccccagaaatattaccggctctaataccccatagggaatgcattatttcctgtcatcttctgtgcttgcctgtctgtttcatctcaacagatatttattgagagcacgtatcatgtgttaggagcctcctacaagaggtgacatttgggttgtgacctgagggatgagcaggaattagcagatgtatctcagggggatgttatatttagctatgactgtggcatgcataaagcattgtgaggctgaatatgctggcttaaacgaggactgcaccttgagtaaatcagtacaaagagtgctagttgctacagacaaatttgtatgacaggatttcttaataaatcaggtgctaatgagcggctggtttgcaggctgaagtaagtcactggttatgagtttttcctgaagtgacttcaggctccccagcatgggattaggttgtgatgtgaggtgtggttgtatgctgattatgtggttcattgagcgttagggtagagactctcgtctggcatgattatcttaatttatctttgagttaaatgagtgaaggagagaaagctaaaggagtgtgaggcagatgcaaaagttgaggcagcaggatgagtatacgcggagaggcacagggcttggagcatctgggcaggagcacagtggtgggaatagcaggactgtgacaagacctcttcaaggagtattgcgcactctgtaggtaaaatgaggccagatcttagaaggcattgaaaaattagtttaagtaatttggtcttgctacagtgggagccattattggctgttgagcaggcgagcatgtttagataagtttgtggggaaacttggcataggcgaacagaatggactggaaaagaaagcaatggtagggtataagaatatcagctaggaggaatctgtgaaaataacccaggagtgagaggatgcatatttgaactagggtgataataataggaattgagagatgaacaataaacatttttaaaatgaaatgaaaggaataatttatttcactgatgtctttaaagtgattaatgataaaatgagtaaatactcagtaaatattcattattatgtgtttttctagcaatatgctatgccatgtctatgcgtctttagattggaaaggtaacattttaggtacagatgtggacttcaatgtttttaattgtagctctgatggaatactccttggctctcttggggctcatctcttcctacttatctatacttcctaaattcaggtgatacctttagccccaaaggatgtggtaccgacgaatctgaaaaatgagaagacactctttgtgaaactatcctggaatgagaagaaattcaggccactttcctcagaactatttgcggagttgaataaaccacamgagagtgcagccaagtgccagaaacccrtgagagccaagagtaagagtgcagagagcccttcttggaccccagcagaacatgtggccaaaaggattgaatcaaggcactccgcctccaaatctcgccaaactcctacccatcctcttaccccaagagccagaaagaggctggagcttggcagtaagttgtggaatggatcaccgtgggcaatactggggctaaagggttatgtgataaaaatgataatttatgggaaagtattgagttagtgatcacagtgcactatagcctggaactcaagtgatcatgctcaagcaatccttctgcctcagcctccccagtagctgggactacaagggtacatcactgcacttggctccattttctgggtttttttgtttttgttttttgagacagagtcttgctgtgtcacccaggttggaatgcaatggcacaatcacgacttattgtaggcttgacctcttgggctcaaatgatcctccttcctcagtctcccaagtagctgggactacaagtgtgtaccactatgcctggctaattttattttaattttttgtagcaagagggtcttgccatgttgcccaggctggtctcaaagtcctgggctcaagtgatccacccgccttggcctcccaaagtgctgggattacaggcatgagccaccatgcccaactatcaaagtttgtgtttaattttaggacttctccctttttttatttaattttttaaatatgtgaaacattaatataattcgagtcaaaactacttaaatgtacccagaaaagcactactcctttccttgtcctccaaccctgcttactccaccttctatatgttaattaattgtttccctttctggtttatctttcctatgtttcgttttggaaaaatcagcagatacatatacatatatgtatacctatatgcagacacacatatatttttatttttcgttttcttaccaaaagggtagtatactggatatattcttttccaacttgctttttccccttacaatgtatctgaaactcaccccacagcctttctgagagctcatcctcatcttgttgtagtcattcatccttttttgaattttttgtgtaggtgtcaacttcaagtataagttacttgtattcttgatagctctatagtacagtatgtgttttaggagctgaatataaatgtataaaacatttagaaaatgcagcacaaatattaactaatctgtaatatcaccttcagaaattaaggggctgactgggcatggtggctcacacctgtagtcccaacacttttggaggccgaggcgggtggatcaactgaggtcaggcatttgagaccaacctggtcaacatggtgaaaccccgtctctactaaaaatgcaaaaaattagccaggtgtggcagcacatacctgtaatcccagctactcgggaggctgaggcaggagaatctcttgaacctgggaggcacaggtggcagtgagctgagatcacgctattgcactccagtctgagcaacagagcaagactctgtctcagaaaaaaagaaagaaagaaacaagggagtttttcttttttttttctttaggtcctcatatgtcccctcttcttcctctttcaactctgttgaaattttacctttctttcaaggtatgtctcaaaagccatctttatgagcactcaggtgcttctggacacttatttcactttatgtaatataataggcagtcatgtgtatcatctgttagactagagtgttttttgtgttggaaccaggattgagcctcattcagcttttgtttaacctcagcccctggcacacgcctgcctttttaactgctcagttggtatctgcaaatgagcagctggggtccttggtgctgtggtcctcgtgatgagggagcaattccagacagttttgtgtattcacagaaccagtggattgtccccaggaaccccacttctctctattggcagatataatctgggttaagaaaaatcttggcctcattgttacttgatagcatctctagtataaatctcttcaaatgtcattgagttagggttgaaggcatgcgatgtcacccctgattgagacccactgttctgataggttatttcagggaaacctgttagagatgagaaaacactccatttatctgcaaaagctgacttaaaagttgacttatggttctaactaggaaaatcactcctaaaatttaggtgagagatgaaaaattattagagctacctgggctggagaaagcaagcctggaatgattaaaaatatagataattcctgttttacatataactcagtggctgaatttggctgtgatgagattgtgggtttgtatattgttaggtaaaaaatttrcacattgtgatgatttctcttagacttaggtaaccctcagatgtcccagcagacttcatgtgcctccttggattctccaggaagaataaaacggaaagtggccttctcggagatcacctcaccttctaagagatctcagcctgataaacttcaaaccttgtctccagctctgaaagccccagagaaaaccagagagactggactctcttatactgaggatgacaagaaggcttcacctgaacatcgcataatcctgagaacccgaattgcagcttcgaaaaccatagacattagagaggagagaacacttacccctatcagtgggggacagagatcttcagtggtgccatccgtgattctgaaaccagaaaacatcaaaaagaggtgaccagggacattacccacagagcaaattgaaatccttcacatcacgtgaagtatgtgagtcatagtcaaaaaagttagaacagtagttgaaaaacctatgtcacagaagtaytggggagctttcttaaaatacagatttytaggcctcttmccacacctagtgagtcagactccaagcactggccctaggaatctgtatttggaaatgctcttcagatggttccagtataccgagctgttatttggggatcattgctatagaagataacttcccaaacctgcattgctatccagtttgggatttcattagttcctgtggctttttgccacactttaacagtcattttttaaagcagtttttcattgttgttgttgtttcattttatttcaatagtttttggggaacaggtggtcttcggttacatgggtaagttcttaagtggtgatttctgaggttttggtgcacctgtcacctgaccagtgtacattgtaccctatatgtagtcttttatccctcacccaccttccacccttccccgagtccccaaagtcccttatatcattcttatgcctttgcatcctcatagcttagctcccacttataagtgagaacatatgatatttggttttccatttccaagtcacttcacttagaataatggtctcatctccatccaagttgctggaagtgccattatttcattgttttatggctgagtagtattccatggtaaatatgtaccacattttctttatccactcattggttgatgggtatttaggctggttccatatttttgcaattgcaaattgtactgctataaacatgcgtgtgcatgtgtcttttttttaatataatgacttcttttcctttgggtagatacccaggagtgggattgctgaatcaaatggtggatctacttttagttatttaaggagtctccacactgttttctatagtggttgtacaagtttacattcccaccagcagtgtagaagtgttcccttttctggctgggcgcggtggctcactcctgtaatcctagcactttgggaggccgaggcgggcggatcacaaggtcaggagatcaagaccatcctggctaacacagtgaaaccctatctctactaaaacataaaaaattagccgggcttggtggtgggcgcctgtggtcccagctacttgggaggctgaggcaggagaatgctgtgaacctgggaggcggagtttgcagtgagcggaggtcgcgccactgcactccagcctgggcgacagcgagactccatctcaaaaaaaaaaaagaagtgttcccttttcaccacatccacaccaacatctattattttttgattttttaaattatggccattctaacaggaataaggtggtatttcattgtggttttaatttgcatttccctgataattagtgctgttgaatattttttcatatgtttgctggctgtttctgtatcttcttttgtgaattgtctattcatgtcctttgcctactttttttttttaccttttgtttttttttttgagcgggagtcttgctctgttgcccaggctagagtgcagtggtgcgatcttggctcactacaacctttgcctcctgggttcaagcaattctcctgcctcaacctcctgagtagctgggactataggcactcaccaccacgcccgactaatttttgtattttagtagaggtgggatttcaccatgttggctaggctagtctcgaactcctgatctcaagtgatccacccatctcagcctcccagagtgctgggattataggcgtgagccaccgcacccagctctttgcccactttttgatgggattatttgtttttttcttgctgatttgtttgagttccttgtagattctgggtattagtcctctgttggatgcatagtttgcaaatattttctcccactctgtgggttgtctgctgattatttcttttgctgtgcagaagctttttagtatcattaggtcccatttatttattgttgtttttgttgcatttgcttttggggttctaagtcatgaattctttgcctaacaatgtctagaagactttttccaatgttatcatctagatttttttttttttttttttgagatggagtctcactctgtctgacgcccaggctggagtgcagtggcatgatctcagctcactgcaacctctgcctcccgggttcaagcaattcttctgcctcagcctcctgagtagctgggactaccagcgcgagccactacacctggctaatttttgtatttttagtagagacggggtttcaccatattggccaggctggtctcgaactcctgaccttgtgatccacctgcctcagcctcccaaagtactgggattacaggcgtgagccactgcgcctgcccgttatcttctagattttttatggtttcaggttttagatttaagtctctgatccatcttgagttgatttttgtataagatgagagatgaggatccagtttctttcttcttctttttttttttttttttctttttttggagacagagttttgctgttgttgtccaggctggagtgcaatggcacgatctcggattactgcaacctccrcctcccgggttcaagcgattctcctgcctcagcctcccgagtagctgagattacaggcacctgccaccatacccagctaattttttgtatttttagtagagacagggtttcactgtgttggccaggctgatctcaaactcctgacctcaggtgatccacccacctcggcttcccatttttgtatttttagtagagacagggtttcaccatgttggccaggctgatctcaaactccagaccttaggtggtccacccacgtcggcctcccaaagtgctgggattacaggcgtgagccaccatggccggccccagtttcattcttctacatgtggcttgccaattattccagcactatttgttgaacagggtgtccttttcccactttatgtttttgtttgctttgtcgaacatcagtcggctataagtatttggctttatttctgggttctccgttctgttccattggtctacgtgcctatttttataccagtactatgctgttttggtaactatatccttgaagttatagtttgaagtcaggtaatgtgatgcctccagatttttctttttgcttagtattgctttgtctatgcgggctttcttttttggtccatatgaattttagtattgttttttctagttctgtgaagaatgatgatagtattttgatgggaattgcactgaatatgttgaatctgtagattgcttttgcattgtggtcatttacacaatattgattctacccatccatgagcatgggatgtgtttccatttgtttgtgtcatctgtgatttctatcagcaatgtatcagatctaggacctttttggatgagtcttcagggttttctaggtatatgatcatatcattggtgcacattaacagtttgacatgctcttttttaattcggatgccctttatttctttctcttttctgattgctctggctaggactcattttttaactggagactattctcaaatacaaactgtacaaaaagataagacatttagaacaaactttgctgtacaaataaaaatgcaacaagccagaagttacaatttgtagtatttgctacctagaaacttcagcacctgttccataataggttgctcagtaaatgctttatattgaatatatagctgcatttctgctaaccttgagcctgtgtggataataaattcatgcatgcatcagaaacaaaaaaggacaagcacctctccctgggagtagcatattttggtctctagttggggagttggtgagtctaatttaaataaggttaaggcagactttgaactctgggtttgagtcaagcttcarttataactttttagttataattttttgccaactttttagcagaaagaaagttttactcttttcaaagtatatataaaaagactgggagccaatcaggccacttgactatcttctagtgccttttgtacactctggtatccaaaactgcttcycgtgacctcgctgtggtttcttgcagggatgcaaaagaagcaaaagcccagaatgaagygacctctactccccatcgtatccgcagaaagagttctgtcttgactatgaatcggattaggcagcagcttcggtaagactactccttggcaggcagagaaayattgctgccatctctgatatctataatcttatctcctaatgcctcttatactgtttatttgccaatccattgaaattgaccttttacctagcatgtctggaattatgttaagtttcaaataattgtcttagtctgaaggggcaagaaatacttcctgggcttaggtgactcccatccctaatcatcatgtccagcaagactgttggtgggatggggtgcctaagagcatgaacttggattctgacagatctggatttgaacctgggctttgtcatttaccatctgtgtaaccttgggaaggcaaaattacctttctaagcctgaaattcctcatctacaaaatataataatatacatgtcataaagttgttgaggggtttaatgagataatataaataatgctcctaacagagtgtctcggtagcaagcacccatgtcacctggtcacaggagggaccctgcaatacttgtaatccacactaatgttatagagttcttcttatttagacttgaacactgagtatcaaaaaatatgtccctaccattcaggtttctaggtaatagtaaaagtgaccaagaagagaaagagattctgccagcagcagagatttcagactctagcagtgacgaagaagaggcttccacaccgccccttccaaggagagcacccagaactgtgtccakgaacctgcgatcttccttgaagtcatccttacataccctcacgraggtgccaaagaagagtgtaaggttcttctaggtttacttcccattgaagcatccctctcttagtttaaaagttacaaatgctgaagtcacagattagtaacagctggaatctgaggacagatctgttatattcaatgctattctttgtggaatattcatggagaaggggacctaagtgaacactaggactgaaaatgaatctagtagagagtgatttttgaggtaagtcccttttacggtacagaatcagatggccaagagctgaacttcctgagggaagtaagtacaagacccactcctctttgcatttcccacggagcactggcagagtgggtatcgcatgtacggccaccgagctgtggtgttagttttgttgtcccacttgatacacctgagaaaccgggagtgctacttacatattggtaacaaatcatgtcacagcaagatggaaggaggagatcaatgaacatcttttctgcttcctgtggaactttagcagaacactgaaaaggtattcagatcaggatcttctcatgttcgaatgtgcttgagaaatgtttgaattaaagttaaattgacagagcatcttattctttggaacacagttgagaaatcttaattagaagactttctaaagctgatgtccatttttccgtatgaagatgtgatttggcttgggttgaaatcaaagaaaaatctcggctgggcatggtggctcatgcgtgtaatcccagcactttggaggccgaggtgggtggatcacttgaggtcaggaattcaagaccagcctggccaacaatggtgaaaccctgtctctgcttaaaatacaaaaattagccaggcatggtggcaggtgcctgtaatcccagctactctggaggctgaggcgggagaatcacttgaacctgcgaggcagaggtttcagtgagctgagatcgcaccatagcactctagcctgggcgacagagtgagactctatctcaagaaaaaagaaaagtctctagggaaaggaatccagtagatcagtagtccccagcccctttggcaccagggacccccttcgtggaagacaaactttctacggatggcaggggctggggggatggtttcaggatgaaattgttctaccctagatcaccaggcattggattctcataaggagtgtgcaacctagatcccttgcacacacagttcgcaataggatttgcactcctatgagaatctaatgcctctgctcctctagcagaaggcagagctcaggtggtaatgctcaccccacccaccactcacctcctgctgtgtcctggttcctaacaggcctctggtttgattgtgtctcctggcccccacccaaaagtagggatatagggtgtagggtaccttcagcataataaaaaagggcagaagcccatcaggtttcttgataccttctcagcaaggccttgtcaacacttttctgttttctccaaaattaataaatgtaaggcctttttgtttttttttgagacacgctcttgctctgtctcttgcccaggctggagtgcagtggtgcaatctcaactcactgtagcctcaacctcctgggctcaagcgatccttccacctcagcctcccaagtagctgggactacaggagtgtgccatcatgcctagctaatttagagggggctttcacctctgtgttgcccaggctgtcctcaaactcctgagtttaagcagtcctcccttcttggcctttctaagttttgggattacaggcgtgagtcaccgcaccagcctgtaaagccttttaaacagtttaagtgctttctgcctcgggaggaaatggagagattgttctctctctagccaggctgaaaacagagggtgggtggagtgaaatgccccatagaagggaatgctttgtagaaacgccatgaagatgagggaagcagcagcaggcttgttctagcaagccatgagcaaggaagaagatagagggctgttagactacactaagcggtgacctgggggtttggagtggaaaaatctgccaaggtttctccaggtcccgcaccgtgggccatggaagtcctgggctgatgcttggccatatcttcaaataagcccagggaaagatctaatgaatcaaacctagtttatgcctcctcttctcttctgtatttgggcagagtagttagggtgtcttaaacatttcttgtctttcaagataatattttacttttaaatagtatttcatccaaacttaattctttcctcagactgatattgttataaatcctgatactatacatacattagaaaaaagaaaccatatttggacgatgaacaaagtttatgcaatgtgaggtgagagagggagagtcatggtcctttatccaggaaggaactaagaggaattcaccacctctcttccttttatcagatcagcacaaatcacatttgctggtgtgtcctggatggtgttttgctttttccttgtgaaatatgttctttgttttcaatacagctcaagcctagaaygccacgttrtgccgctcctcagatccgtagtcgaagcctggctgcccaggagccagccagtgtgctggaggaagcccgactgaggtactgctgctgttgattccccttcagagaggcaggaaccatggggcctctgctttcattcacataaaattagcagtcactggtctacctaataaaggtagatacactgtgtgtctatacttttacctatctaggtaaagtgagtgtatgtttagaaaaaagaaacctctcaggcagcatctgggttagccagtgtggacaggccctgggaggactggccttcccgtctactgccatcatttccgcagggatggaagatgattagtcaggacagtgcctctttgttttgatgccctttagaaccatatggagactttcatataagtctggatcctgtcagaaatcaagcaaaatctgaatctcctgtgggatgaggtccacccatgtgatttgggtggagaaacggaggccaaggattatgaggccaaatggagggatttgagaatgaagggattctctagcatttgaaattgagttttcaggtagaaacatagacaagaaaccataatcattttccattgattaatgagtagatggttggggaatgttcstaaagtcttscttttctcccgtttaccaccaatggtaggctgcatgtttctgctgtacctgagtctcttccctgtcgggaacaggaattccaagacatctacaattttgtggaaagcaaactccttgaccataccggagggtgagtcatgtgaggcaggcagggtagtttggggaataaggcccytgctagyggaatgccttgggtgttacagttcagccatacaggctttctccagtatcagcagactagaccaaatcgttgctgaagcccaaagcttctgaaacatttgttgccaaagtaatcctatagtaacagaaattttgcctttcagaaagaatgaaactggccttcattgagtaggcagtttgcatatagcattatgcaaactgtggaatgaatgattctatataagcaggtcctactctgaccagcttccaaggatggtccctactgcccccacctccacatttcaagggtctcggtccttccctcagtatacattcccacactcctaactgattatarcktgtagtggctggctgagacctaccccacgggttttcctctcttgctctaggtgcatgtacatctccggtgtccctgggacagggaagactgccactgttcatgaagtgatacgctgcctgcagcaggcagcccaagccaatgatgttcstccctttcartacattgaggtcaatggcatgaagctgacggagccccaccaagtctatgtgcaaatcttgcaggtaagcagagctgtttaggctttttggaaaatgctgtttcttcgtgacacatgaaaaaggaaagagttacttaattttgcgtgtattgcatgttcatgatataccaggcattgtcctttctgtagaggtagcaagggcaaggaagacagaattcttaccctaagagacttcaaagtctaggagctggataatgattacaagccaggaagccagtacttacccacatggtgaaaactgtgagctyacaggtagcagtgtggcaacatggaaaaggggtccgtggcaggccagaggttaagccttgctctttgtccatgggctgttattttggagcaggtaacatccagttatagaattctgtaatagtgattttaagggggcttctggcccagcctgtgactcatttgcatttcaaactcatataccttctttatcttctctttcggtgccttctcttgtccttccaagtaaaggttaagactagattgggaggcagaatataggataccgaagtcctcaggttaaatgcctccctccatttgcagatttaactttaagcccaagggagtaagacccttacagttcctcacaactgtgtttctcctaatgcagaagctaacaggccaaaaagcaacagccaaccatgcggcagaactgctggcaaagcaattctgcacccgagggtcacctcaggaaaccaccgtcctgcttgtggatgaggtgaggtgcccatgggcggacaggagaagaaacagggctgtacytcaggagcaagtgctggatgggagggaggaaagtcctggctcccttctccattcatatgagcccattttctggtgctgagaggcgtgtgtcaatggattgttttggtgctatgacttgggaaacatgcagctaaagcagtggttataggtcttcattttgaagcaccagctcagtctctgtgattgactctgcacctctctcctttgccctggcagctcgaccttctgtggactcacaaacaagacataatgtacaatctctttgactggcccactcataaggaggcccggcttgtggtcctggcaattgccaacacaatggacctgccagagcgaatcatgatgaaccgggtgtccagccgactggtaggttctagggcagttcccatgctgttcttgcagatctgtaagcttggccaagaagttctgcaaaaatggtccaggtgtggtggctcacgcctgtaaaccccgcactttgggaggccaaggcgggcggatcacttgaggtcaggagttcaagaccagcctggccaacacagtgaaaccccgtctctactaaaaatacaaaaattagccaggctaatttttacttaggaagctgaggcaggagaattgcttgaactccggaggcagagtttgcattgagttgagatygtgccactgcactccagtctggcaacgaagcaagagtccatcccaaaaaaaaaaaagttctgcaaaaatgaatactaaaataaattgggatgttaagaaatgtgatttctgcaatgcttgtagtttctatgttggaatatgtaaccattgcatgattttctgcaaacatcatatcttggtgttctgctgctcgtggacttttaaactgcaccaaaccatggaggtttaattatttaaaaaaaaaatgttttaggctgggcacagtggctcacgcctgtaatcccagcactttgggakgccaaggcaggtggatcacctgaggtcaggagttcgagaccagcctgaccaacatggagaaaccccatctctactaaacagacaaaaattagccaggtgtggtgacgcatgcctgtaatcccagctactcgggaggctgaggcaggagaatctcttgaacccgggaggcggaggttgcggtgagccaggatcacgccactgcactccagcctgggcaacaagtgtgaaactctgtctcaaaaaaaaaaaaaaaaaaaaaaaagttttagcacttataacctgccaggcagtgttaggtgcttggaataatgcaataaaccaggcagatgcaatgtctgccctcacaggccttgcagttcagcaggaagcgcaatgagaaatcatgaagagcctggtaagtgaagccaagtgcagtgacaatgtatagcatagatctgaagatcctctcacccacttcaattaaagcacctcagcttttatctacttccaaatgattctgatagaatcaaaggtccttaggccgggcgtggtggctcatgcctataatcccagtttaggccgggcgtggttgctcacgcctgtaatcccagcactttgggaggccgaggcaggtggatcccraggtcaggagatcgagaccatcctggctaacacggtgaaactctgtccctactaaaaatacaaaaaaattagctgggcgtggtggtgggcaccagtagtcccagctacttgggaggctgaggcaggagaatgacgtgaacccaggaggcggagcttgcagtgagccgagatcatgccactgcacggtagcctgggcaacagagcaagactccgtctcaaagaaaaaaaaagaatcaaaggtccttaaatgaaatgaaaaaatagttcaaaaactactgccctacaggacaccactggtcattgtcagtaaaggcagtggtagtctaggtatgaaatgtgtaatttgttatatgggacctgggaattgggtttgggggcccaagggtgactttccacctggataatcactgggcartcaaccaacttattcctctgtcattttggctccccagggtcttaccaggatgtgcttccagccctatacatatagccagctgcagcagatcctaaggtcccggctcaagcatctaaaggcctttgaagatgatgccatccagctggtagccaggaaggtaagtcaccagctgcacccataaatcagtcagcacatctttgctgagtacctgctsggtatgaggccctatgctggtgctctgaggttggagagaaatttagaaagtcgtgtaaaaatatcaaaaaagacaagattatgagaaattccttagccttgttattttatgattagagggccctaaatattgtgggtttatatgcaaactaatatgaattcattcagggagcaagcagttttgcatgatgaaagggacaatatagtcaggtagacaaacctggtttgaattctggctttaacgcttagtaggcatgcagaaagttataggaaagttacttaaaaatttcctgagcctcagttttcttctctgaagaagaatgagagcacttccctcatagggtcattgtgaaaatataacaatatcatgtctattacatgcccagcaaggcacactctccaggctagatatgaggtattagatgcccctctcctccaagtctaataggagaatgctccctgagagttcaccacagactagtctccccggctgctgaggaacaaagtgggttaaatgtctgcctcaagcagaaagaaagaaagaaaaaccgtacatccacaagtatttcagcatgtaaaataattataaacttatttctagtttcctcttgccgacacactcttcaccctgaatggctgtagcagcagcacatgactgtgactcctgcttggaactagctactgtattagggactggggtaagaggtgagccaattgtgtgcctgtctccaggctttgctttccaggagagagatcctcaaagttatcatctaggcattttatgggtagagtttttcacttttgctattatgctatctatctagactatctaagaggctttttcttttctttgaatgatcctttttttatgccacccttttttttttttttgaaacagcatctcactcggtcgcccaggctggagtgcagtggygtgatctcagctcactgcaacctccgccttctaggttcaagagattctcctgcctcagcctcctgagtagctgggattacaggcgtgtgccaccatgcccagctaatttttgtattttagtagagatggggttttgccatgttggccaggctggtcttgaactcctgacctcaggtgatccacccaccttggcctcccaaagtgctgggattacaggagcaagccactgcgctcggccaatgccatcctatttatttgaaattgtcctttcccgttttcctccaagatgcttctgtcagttgattttggtctctatcttgcatcgttagagactttccacagttgtcttggttgtcctctcaggtgtaagggtggagattaaacagctggctctgaacatgtgagtggggcttattcactatgagatttgctgtgggatgatctgagtgggccagtatcactgtctttcctcctttcccatgggaatagtcagatttctcagtatgcttcccctgtcctgtctggagggcagtgttctgggaatgaggggctggtgtcaggtacagaagaggtcttccagtttggcatgcatatagtaatcatctatttttggtaagggacacctcttctacaataatgcctagcattcctaggaccagagactttttgctaaactttgcttgagaataaatttcctttgttttttttgttttttgttttgagacggagtctcactctgtcgccaggctggagtgcgatggtgcaatttcggcttaccgcaacctccacctcccttgttcaagccattctcctgcctcagcctcccaagtagctgggactataggtgcacaccaccacacccagctaatttttgtatttttagtagagacagggtttaaccatgttggccaggctggtctcaatctcttgacctcctgatccacccacctcagcctcccaaagtgctgggattacagccaataaaacttttatttataaaaacagatggtgagccacactttgttgtttcctgatctaaggcatctttagtttcttaacgtcctcaactttttttaactttcaaccacaaccaaatattctctacttttggctgggtgcggtggctcacgcctgtaatcccagcactttgggaggctgaggcaggtggatcacaaggtcaagagatcgagaccatcctggctaacagggtgaaaccctgtctctactaaaaatacaaaaaattagccgggcgtggtggcacgagcctgtattcccagctactagggaggctgaggcaggagaatcgcttgaacctgggaggctgaggttgcagtgagccgagatcgcaccgctgcactccagcctgggagacagagcgagactccgtttcagaaaaaaaaaaaaaaaaaataccctactttagctaaacaacccccctttacctctttccagcaccactaactcctgagcattttgaggatttttaatgtaacttagatttgttcttggattcctcaatataggtttaggatttggctttctccagtccactacactaaccgctactcttccatgtctttctaacttgcagaattattattattataatttttttttttgagacggtttctcgctctgtcgcccaggctggagtgcagtggcacaatctcggctcactgcaacctccacctcttgggttcatgccattctcctgcctcagcctcccgagtagctgggactacaggtgcccgccaacatgcccagctaattttttgtattttcagtagatacggggtttcactgtgttagccaggatggtctcaatctcctgacctcgtgatctgcttgccttggtctcccaaagtgctgggattacaggcgtgagccaccgcgcctggcactaacttgcaaaattatatttttaaatcttctcctgatgcttcccttccttttagagtcttggggtgggttgttgttgtcattgttttttgagacagtcttgctctgtgacccaggctggagtgcagcagcacaatcttggctcactgcaacctccgcctcccaggttcaagcaattctcctgcctcagcctcctgagtagctgggactacaggcaggcacccgccaccatgcccagctaagttttgtatttttagtagaggcggagttttaccatgttgtccaggctggtcttgaactcctgacctcaagtgatctgcctgccttggcctcccaaagttaaaggattacaggtgtgagccactgcacctggccagagttttggtgttttgtttgttttttttttttgagagggagtctcactctgttgcccaggctggagtgcagtggcacgatctcagctcactgcaacctctgcctcgtgggttcaagcaattctcctgcctcagtctcctgagtagcaggactacaggcatgtgccaccacgcccagctaattttttgtatttttagtagagacggggtttcaccatgttagccaggatggtctctatctcctgacctcgtgatctgcctgctgcagcctcctaaagtgctgggattacaggcgtgagccaccgcgccccgccccagcccggtttttttaacaaagattcagaagacatccaatttggatgctgctcttcctcaaatctcttgcccatagtttcaaagccctctctatttctttacatatgacgaagcgaatctgttttatattctatatcctatagttatgatacctgaagtctttaggggtctgattctgataaccattgattctgctggttcccatgcatatgtggcttggttttcttatttttttgtcttgatttttattttattttactatatgcatggaattcagcatgctcctttatttgagagttaattggggcctgggttgaagttgaattcatttagaatttgtttttttttttttttttttttgcttctaggggcactaccaactgttaccatttttaaaataaaattctccacttgagaattgtaggaaatacaacataaatttgggctccaaatccaagcaagggcttatggttgtaaaaactcgagagtgtctgggtagggtggctcatgcctataatcccagcactttgggaggccaaggtgagaggatcacttgagcccaggagtttgagaccagcctgggcaacatattaaaaccccgtctctacaaaaaatttaaaaattagcccaatgcgatggcatgtgcctgtagtcccagctacttgggaagctgaggtgggaggattgcttgagccgaggaggtggaggctgcagtgagtcatgatcatgccactgcactccagcctgggtgacagagcaagaccctctctcaaacaaaaaaaccaacaaaaagtcggctgggcgcagtgggtcacacctgtaatcccagcactttgggagggtgaaaccccatctctactaaaaatacaaaaaattagccaggtgtggtggcagatgcctttaatctcagctattcgggaggctgaggcaggagaatcgcttgaaccccacaggtggaggttgcagtaagctgagatcccaccactgcactccagcctgggcatcaagagtgaaactctgtctcaaaaataaataaataaataaaacccaagttttttgtgtgtgcccacatccacctagcaccaaggtcaagtaggccgtttttcctgccatccgttctgcgtgatgggtctcactcaccctgtactgaggctgaagtggaggtcaagtttcaggtgcctgcaggatgtcctgttaggttccatgttggctgggccttagcttcttcttgtgtctcccttgtcccagcagcagcccgaagggatgcatagggttgccaagtgtcactgatacccttggggtcagactggtttaggtgtttccttaccccccagagttcccctttcactttgtcttgaggcccttgagtccctgctattcaccacacaaagtgcctcttcaccaggctgtacaggtggtaatgggaggggaggagaactgacgaagcaggaagggctacaggacayccttaccagttcaatactggggattagaggaagggaaaaatgtaagccgatagtcatgtttgtgtcctgggttacttggaaagtgatttttttttttagatggactctagactggagtgcagtggcgtgatcttggctcactgcaacctccacctcccaggttcaagtgactctcctgcctcagcctccccagtagctgagattacaggcatgtgccaccatgcccggctgatttttgtatttttagtagagatagggtttcaccatgttggtcaggctggtcttaaacttctgacctcaagtgatccacctgcctgggcctcccaaagtgctaggattacaggtgtgacccaccgcgccccagaccctggctaatttttgtgtttttagtagagatggggtttcgccatgttggccaggctggtctcaaactcctgacctcaggtgatccgcctgcctcggcctcccaaagttctgggattataggtgtgagccaccgcgtccagccccttcctacattcttgattctggtcctcttagccattgaccaagccgaccccaaattcaccacgtgctgtaaggggtgcctggctatggctttatctccagataggctccacctcaccctcttgtctttggctggctgcttctgggggcacacgtctgtctctatgcaaggagtgagaactctgtttgcagatgcttcaatagtgatcttgaaccaagcgtctctgattttagacttcatttcctgaatagtaaagctgagaatttctgtgttgtccactgtggagttaactgtaaaaccaagacagaggtttggactagaggattagagtcccatgcacaatgtaataattcatttctattcttcctccaggttccctgccagggctaagtacttaactttacgcttatgtccattgccagcactaccaagaatctcttggttcttctgggctaaggtggcctcaggaataaaatattccctcttgtaggtagcagcactgtctggagatgcacgacggtgcctggacatctgcaggcgtgccacagagatctgtgagttctcccagcagaagcctgactcmcctggcctggtcaccatagcccactcaatggaagctgtggatgagatgttttcatcatcatacatcacggccatcaagtaagatgctccacttcctgagccttcctggaaggctgtagaaacatgtttccctttctaagcttttactcattcaacctgcacttattaataacacagttatgtttcatagggacattatctagtcagggaaacagaaatataaccctaggataatagaatatttgccacttattgagctatattataggtgtttagggcataaaagtgctatgataggaacaaaaaaaaaaggaagcagctgcttctctcacactgattgatgtgctcagctcatgaaatgagggcacaggtatttatgagtgaccagtgtatttccggatgtagttgctatgtttcctcacttccacagtgacattttctgtatcagtttgagagtttgggggtcagggagatccttgccacataatataggagaaattatttcccgggttttctcttttctaaagacacagaaaagttttctttggctttcctctgggctggggttacagccactgacaaaaactyacatcccctcgtttcctttaagaaattcctctgttctggaacagagcttcctgagagccatcctcgcagagttccgtcgatcaggactggaggaagccacgtttcaacaggtgatctcctcctcttttcaaatccttctagattttggacttacgcttttaaaatacatggaaatttccatgaatgtgtgacactctattttgtgccacctagagtatgtgaaagaataccagaccggcacctattttaatgtgacattttgtagagctgcatgagaagagacctttagcgactggtttctgcatgttagattgaaggcctgtgtgccagacactgttcaaagaatgaggaacaagacaaagttactccctgattacagcttatgttgtagtggagtcaaggctttcagaatgaggccatatttgagaacaaatcacagatcaatccaatccctgcatgggcatagttcaattagatcaagtgagagggatcagtagggcatgtgctttgttagtttacttaagactctagtaattggctgccttggaagatgaattgttaaaggtgtttatgagtgtgtacctgagagtgtgtatgtttgtgtatgtatgttttagacatctttatttaactaaaataagtcaggaaaacattttcctttcagctacttatttattgggttggttgtaaattcttgtttaaaattttagctactcgtcatgttttgcccattactgttctcctcctagagtctgagatagctcttctgcagagagtgactttcattttagtttgtaaacatttcctgaacatctgcagtgtgccattaactgtgatgaatccttgaaccccaagctgatttggttaacatccctgttcctgacaaactcccagtcttggggctgggacggggatagactcatagatatttagaatggaaagtgaccagaaatgctccagatttagctgacccagtagagaacgttagggtaggaatctatgtttccagctatcctcctgcctccctttatttctttattcaattttctctctaggcctttgtgcttttccaagggtcatgccttggcatttgctcactgtacctgataaggaaagtggccttgtagcaaaatttgacttgaattttgacagtctcaattatgaaactctcagcccctggagacaagactatttgtatcaccagtgagagttactagtcattttatatccattaactcacaagggatgtacagtgtattttatagataaaattgaagctcaaaagagtgcagtaacttggccaggtctacatatttaggtaaatggtagcaccaggattcgggcctgctgttttctgattccaaggctagcattccattctgcctctgcattttgtgtaccactggggcaccaactgatgccttctggagtgtttgatatcctgggggccatgtgtctgattttcccaaatgaagaaagaaaggaacagaaaaagccccaggattgtatttcctcttaacctttgccttgctatttgtgtctagatatatagtcaacatgtggcactgtgcagaatggagggactgccgtaccccaccaygtcagagaccatggccgtgtgttctcacctgggctcctgtcgcctcctgcttgtggagcccagcaggaacgatctgctccttcgggtgcggctcaacgtcagccaggatgatgtgctgtatgcgctgaaagacgagtaaaggggcttcacaagttaaaagactggggtcttgctgggttttgttttttgagacagggtcttgctctgtcgcccaggctggagtgcagtggcacgatcatggctcactgcagccttgacttctcaggcttaggtgaccccccaacctcatcctcccaggtggctgaaactacaggcacrtgccaccrtgcccrgctgattttttgtagagacagggcttcaccrtgttgcyaagctagtctacaaagcatctgattttggaagtacatggaattgttgtaacaaagtatattgaatggaaatggctctcatgtattttggaattttccattaaataatttgctttttcctgagtgtttgtgaagttattacattataatcattacaaacatctgattatgaaaccaaactgtccttcctacaatagtccttccatgtgacttttatttctgttactaggcctgccatttatttaatgctaacatatataaaatataagtacacgatttacttgtatctatataaaatagttctgggagagtatgcaaaaaactggttacactgattacctctggaaagaatcagatggaaagaatcagatggccagggttaggggttagaggaggacttttcactgtatgtcattatctgtcttaagtttcaaataatataaataaaatttaggccaggggcggtggctcacacctgtaatcccagcactttgggaggccgaggcaggtggatcaggagatcgagaccatcctggctaacacggtgaaaccctgtctctactaaaaatacaaaaaaattagccagttgtggtggcgggcgcctgtagtccagctactcgggaggctgaggcaggagagtggcatgaacccgggaggcggagcttgcagtgagctgagatcgcgccactgcactccagcctgagcgacagagtgaaactccgtctcaaaaataaataaataaataaataaataaaatatagtttataaaaaaggaactactggaaataatataaatcataagtaatctctagccacaaatagctagaaagtgtaatttttacaaaggtaccatttaccataaaaacaaaacaaacctttaaatacaaaagatttatatgtcacagaaaatataaggtacttagaaataaattgatttaaatatttatttatttatttattttttccctctgtcaccaaggctggaatgcagtaatggatcatagctcactccagccttaacctcctgggttcaagtaatcctgcctcagcctcctaagtagctgggattccaggtgtgggccaccatgtccgtctcctaggaataagtctaataaagagatgcaagtaatctctagatagaaatcaattccaatcaaaatcttggcaaggtttcttgtatgactttgcagttaattctaatatttatatggaaaccaacaacaggcaatgaacatctaaaacctcatgaagtactgaggctgggcgtgggtggctcatgccggtaatcccaacactttgggaggccaaggcgggtggatcacctgaggtcaggagttcgagaccagcctgatcaatatggtgaaatctcgtttctactaaaaatgcaaaaattagtctggcgtggtggtgtcacctgtagtcccagctacttgggagtcaggagaattgcttgaacccacccaggaggcagaggttgcagtgagctgagatcacaccattgcactccagcctgggcgacagagcaagactccgtctgaaaaaaataaataaaacctaatatgaggtactgaaaaaaaacagccccacccgtgtactagtcctgtcagaaatgcttgtcctaaatttactgatgagaaaattatcagacaaatctaaatttagggagaaactctgcaaagcagctgttcaactcattgaaaatactaatatcacaagaaaaaaaacacaaaacatggaggaactattctacaccaaaggagaatagagacatgagagctaaatgcactatataaaccttgactgggtcctggatttaggaaatataaacaattataaacattattaactatgtattagacagaagtattttgtaagtgttaaattccccgagcgtgataaatttgtgattatgtaggagaatgctgttcttaggagattcataatgaaatatttataagtgatgtattatgtctgcaactcattctcaaatcatttagcaaaaatatgtatttctatattcacatatgtatttataattacatataatggattgaggatcaatatcaatatttttaaaactgcaatgaaaaagaaaaaatgagccaggcacagtggttcatacctgtaatcccagcattttgggaggccaaggcaggtagatcacctgaggtcaggaattcgagaccagctcggccaacatggtgaagccccatctctactaaaaatacaaaaattagccaggggtgatggtgtgcacctgtaatctcagctacaggggtgctgaggcaaaagaattgcttgaacccaggaggcagaggttgcagtgagccaagattgtgccactgcattccagcctgggcaacagagcaagactgtctcagaaaaaaaaaagaaggaaaaagaaaaaaatgggtaaataacaaataagtcatccaaagaagaaacacgaatgaccaagaaaatggaaacagtaaaagaggcatgcaaaccaaaaccatttcacatctattagaaaacctttctatggttacacagaacaactgggaccccaataccctgctgatggaggtggaatgacttttgaagattatttggtgaatcttagcctaggaaatgcaagaaattgtatgagccagtgtattagtctgtcctcgcgctatgaagaaatacctgagactgcgtaatttataaagaaaagaggtttaattgactcacagttccacatggctggggagccctcaggaaacttaaaatcatggtgaaaggcacctcttcacagggcagcaggagagagaatgagtgccagcaggggaaatgccagatgcttataaaaccatcagatctcgtgagaactcactcctatcacaagaacagcatgaaggaaaccatgattcaattacctcccacaagatgcctcccaggacacatggggattatgggattactattcaagatgagatttgggtgggaacacagagccaaaccatatcagccagtgtgatggttaatagagcatgcagacagcctattgtgggactatatatatatatacacatatatatatatacacacatatatatacacacacacacacatatatatatacacacacacacacacatatatatatatatatatcctattagttctgttcctctagagaaacctgactaatgcagccagcaattccattcctaagtatatgctctagagaaattcacatacgtacaccaagagtcatatacaaaaagttcatagcactctataatggtaagccattgggaaagtgacttattttcatgctatggaatcataacagaaatgaaaatcagctaactagatacagtatacatgtcaatttgagtgaagcttacaaacagggttgagtagaaaaaggttgaagaattacactgtatgtaaccaatgatataatttttaaaagctggcaaaaaaaatactatgtattgcttaaggatacctacacagaaatagaaatgctcaggaataataaacactaaatttaggataatgggtacatctttgggaaagggaggtgttgcaatatgggagatgtacaggtagctccaactatgtttgtttttcttttttcacaaaaatcagatagttttatgttgtaaaaacattagttatttgtcaaaggttatgttcttccgtcttcatctgtcaccagctgtcagcatctcctttaaatatcggttttttcttcataatgacacctgcatgtggctcgttggctgtccagatatggtttacaacctaaatgtataacactgtcaaacaagagctccattgttgtttcacatgcctgaacatgctaagttagtcctagtgttttctgtacttctcggcagatcttggagaggcaatactggaatttctcatcacagtcattcttgcttttgccacagttctcatagcacctgtcgtgttagttgcaacactttgtcagggaagggataccaatgttaagatgaacgccaaacagtggagagccacatccattcggtggggagggtttataaccataacgtgggaaaggcttagatccgtcactgcatttatactggcagagaccgtcctcgcctcccaggaggtccaaggcggcgttcaggtacgtgtctatcttatgaacgccgttccggatggtcttcagggtggccctccagtcggtggtctaggcctgctccaggcacctgataacagcggccatgaggaggagcaggagggtgagcgcggggcgcgggagaagggccaaccgcgcagcgccgggctctacgggtccccgagccgcggcggggggcgcgtccccaaagagcccccgggaagcgctaggcagcggcgcgggccccggggttgcagccgccagctccataaccacgcctccttcccggctggcaggcagggcctcgctggctttacgtgaaccgcctcggggaggcagcgcggtcgcggggacgcgcccgctcacctgcttttttttttcccttaaactggtaatagatgtccatgtagttaattcacacaacaaggaactattgagtgcctactatgtaccatgcactgctgtagacacgagacacttggagaagcaataaaaaaatttctccttctggagcttgcattctagtaaatgttaaatattgtgtatctttgtttatatcttaaatgtttcattataaaaatttttaaataattttaaaaggaatgagaaatatggatgtgaaatctcaatttaaatatggtaatgggcagggcatggtggctcacgcctgtaatcccagcactttgggaggctgatgtgggttgatcccctgagctcaggagtttgagatcagcctgggcacatagcaaaaacatgtttctacaaaaaaaaaaaaaaaaatgctgggcatggtggcacgtgcctgtggtcccagctactcaagaggctgaggtgagaggattgcttgagcctgggaggtgcaggttgcagtgagtggagatcgcaccactgcactctagcctgggtgacagaatgagatcctgtctcaaaaaaaaaaaaaagaaaaaaagtaagcaatcaggagatggaaaagccctttgtccaagtaaactgggagatcgctaactagaaaacataatttaaaagttcaaggcataggcaggagaggagatggcaatgttttagacagaagaaactaatccagcagtttaactttaaaatacattttaaaactttttttcctttctcttgggtttcaagatacaaccttgaagcaaactgcaaaagccttttcccttagctgtaaaatagaccccatatccctccctttctcactgtatatactcccttcacatttatcttactgtatgctagtatttaattatctgccttctgagaagttccaagggctaatcttgagacagacaaaccaagcctggagacacagctgcaaaattccaaagattacttcaaggtggctagtcaacagcggggccattgtggagatgagaccagcccacgctccaggtaggctgggacccaagatagccaccagaacaagacacacagacgttgtactctgtacaattcttgcatgcttcccatatcaaattttccttttaagccgttctctttccccccaaaatcgaagtggttactttagatgggaatctggccacttccccattactccgctctcggtttttttgtttgttttagtttgagacagggtctcaccttgtcacccgggttggagtgcagttgacagctcattgcagcttggacctccggggccacagcgattctcctgcctcggcctctcagtaggtaggactacaggcacgcaccaccacacccggctaatatttgtaattttttgtagagacagggtttcgccatgttgcccaggctggtctcggactcctgagctcaatctcttgttaactggactctgcaagccgcagggagaaacgtgctttccttagaaaactagactagagcatatttactgatgctaaagaggttggttttgtatttccctgggcaaataattctctctgagcctccgtttcttctagagatgatgtccatcttgcaggattgagaactggtataagc

SEQ ID NO: 97984 - DNA, 27746 bp, Homo sapiens
tggaaataatataaatcataagtaatctctagccacaaatagctagaaagtgtaatttttacaaaggtaccatttaccataaaaacaaaacaaacctttaaatacaaaagatttatatgtcacagaaaatataaggtacttagaaataaattgatttaaatatttatttatttatttattttttccctctgtcaccaaggctggaatgcagtaatggatcatagctcactccagccttaacctcctgggttcaagtaatcctgcctcagcctcctaagtagctgggattccaggtgtgggccaccatgtccgtctcctaggaataagtctaataaagagatgcaagtaatctctagatagaaatcaattccaatcaaaatcttggcaaggtttcttgtatgactttgcagttaattctaatatttatatggaaaccaacaacaggcaatgaacatctaaaacctcatgaagtactgaggctgggcgtgggtggctcatgccggtaatcccaacactttgggaggccaaggcgggtggatcacctgaggtcaggagttcgagaccagcctgatcaatatggtgaaatctcgtttctactaaaaatgcaaaaattagtctggcgtggtggtgtcacctgtagtcccagctacttgggagtcaggagaattgcttgaacccacccaggaggcagaggttgcagtgagctgagatcacaccattgcactccagcctgggcgacagagcaagactccgtctgaaaaaaataaataaaacctaatatgaggtactgaaaaaaaacagccccacccgtgtactagtcctgtcagaaatgcttgtcctaaatttactgatgagaaaattatcagacaaatctaaatttagggagaaactctgcaaagcagctgttcaactcattgaaaatactaatatcacaagaaaaaaaacacaaaacatggaggaactattctacaccaaaggagaatagagacatgagagctaaatgcactatataaaccttgactgggtcctggatttaggaaatataaacaattataaacattattaactatgtattagacagaagtattttgtaagtgttaaattccccgagcgtgataaatttgtgattatgtaggagaatgctgttcttaggagattcataatgaaatatttataagtgatgtattatgtctgcaactcattctcaaatcatttagcaaaaatatgtatttctatattcacatatgtatttataattacatataatggattgaggatcaatatcaatatttttaaaactgcaatgaaaaagaaaaaatgagccaggcacagtggttcatacctgtaatcccagcattttgggaggccaaggcaggtagatcacctgaggtcaggaattcgagaccagctcggccaacatggtgaagccccatctctactaaaaatacaaaaattagccaggggtgatggtgtgcacctgtaatctcagctacaggggtgctgaggcaaaagaattgcttgaacccaggaggcagaggttgcagtgagccaagattgtgccactgcattccagcctgggcaacagagcaagactgtctcagaaaaaaaaaagaaggaaaaagaaaaaaatgggtaaataacaaataagtcatccaaagaagaaacacgaatgaccaagaaaatggaaacagtaaaagaggcatgcaaaccaaaaccatttcacatctattagaaaacctttctatggttacacagaacaactgggaccccaataccctgctgatggaggtggaatgacttttgaagattatttggtgaatcttagcctaggaaatgcaagaaattgtatgagccagtgtattagtctgtcctcgcgctatgaagaaatacctgagactgcgtaatttataaagaaaagaggtttaattgactcacagttccacatggctggggagccctcaggaaacttaaaatcatggtgaaaggcacctcttcacagggcagcaggagagagaatgagtgccagcaggggaaatgccagatgcttataaaaccatcagatctcgtgagaactcactcctatcacaagaacagcatgaaggaaaccatgattcaattacctcccacaagatgcctcccaggacacatggggattatgggattactattcaagatgagatttgggtgggaacacagagccaaaccatatcagccagtgtgatggttaatagagcatgcagacagcctattgtgggactatatatatatatacacatatatatatatacacacatatatatacacacacacacacatatatatatacacacacacacacacatatatatatatatatatcctattagttctgttcctctagagaaacctgactaatgcagccagcaattccattcctaagtatatgctctagagaaattcacatacgtacaccaagagtcatatacaaaaagttcatagcactctataatggtaagccattgggaaagtgacttattttcatgctatggaatcataacagaaatgaaaatcagctaactagatacagtatacatgtcaatttgagtgaagcttacaaacagggttgagtagaaaaaggttgaagaattacactgtatgtaaccaatgatataatttttaaaagctggcaaaaaaaatactatgtattgcttaaggatacctacacagaaatagaaatgctcaggaataataaacactaaatttaggataatgggtacatctttgggaaagggaggtgttgcaatatgggagatgtacaggtagctccaactatgtttgtttttcttttttcacaaaaatcagatagttttatgttgtaaaaacattagttatttgtcaaaggttatgttcttccgtcttcatctgtcaccagctgtcagcatctcctttaaatatcggttttttcttcataatgacacctgcatgtggctcgttggctgtccagatatggtttacaacctaaatgtataacactgtcaaacaagagctccattgttgtttcacatgcctgaacatgctaagttagtcctagtgttttctgtacttctcggcagatcttggagaggcaatactggaatttctcatcacagtcattcttgcttttgccacagttctcatagcacctgtcgtgttagttgcaacactttgtcagggaagggataccaatgttaagatgaacgccaaacagtggagagccacatccattcggtggggagggtttataaccataacgtgggaaaggcttagatccgtcactgcatttatactggcagagaccgtcctcgcctcccaggaggtccaaggcggcgttcaggtacgtgtctatcttatgaacgccgttccggatggtcttcagggtggccctccagtcggtggtctaggcctgctccaggcacctgataacagcggccatgaggaggagcaggagggtgagcgcggggcgcgggagaagggccaaccgcgcagcgccgggctctacgggtccccgagccgcggcggggggcgcgtccccaaagagcccccgggaagcgctaggcagcggcgcgggccccggggttgcagccgccagctccataaccacgcctccttcccggctggcaggcagggcctcgctggctttacgtgaaccgcctcggggaggcagcgcggtcgcggggacgcgcccgctcacctgcttttttttttcccttaaactggtaatagatgtccatgtagttaattcacacaacaaggaactattgagtgcctactatgtaccatgcactgctgtagacacgagacacttggagaagcaataaaaaaatttctccttctggagcttgcattctagtaaatgttaaatattgtgtatctttgtttatatcttaaatgtttcattataaaaatttttaaataattttaaaaggaatgagaaatatggatgtgaaatctcaatttaaatatggtaatgggcagggcatggtggctcacgcctgtaatcccagcactttgggaggctgatgtgggttgatcccctgagctcaggagtttgagatcagcctgggcacatagcaaaaacatgtttctacaaaaaaaaaaaaaaaaatgctgggcatggtggcacgtgcctgtggtcccagctactcaagaggctgaggtgagaggattgcttgagcctgggaggtgcaggttgcagtgagtggagatcgcaccactgcactctagcctgggtgacagaatgagatcctgtctcaaaaaaaaaaaaaagaaaaaaagtaagcaatcaggagatggaaaagccctttgtccaagtaaactgggagatcgctaactagaaaacataatttaaaagttcaaggcataggcaggagaggagatggcaatgttttagacagaagaaactaatccagcagtttaactttaaaatacattttaaaactttttttcctttctcttgggtttcaagatacaaccttgaagcaaactgcaaaagccttttcccttagctgtaaaatagaccccatatccctccctttctcactgtatatactcccttcacatttatcttactgtatgctagtatttaattatctgccttctgagaagttccaagggctaatcttgagacagacaaaccaagcctggagacacagctgcaaaattccaaagattacttcaaggtggctagtcaacagcggggccattgtggagatgagaccagcccacgctccaggtaggctgggacccaagatagccaccagaacaagacacacagacgttgtactctgtacaattcttgcatgcttcccatatcaaattttccttttaagccgttctctttccccccaaaatcgaagtggttactttagatgggaatctggccacttccccattactccgctctcggtttttttgtttgttttagtttgagacagggtctcaccttgtcacccgggttggagtgcagttgacagctcattgcagcttggacctccggggccacagcgattctcctgcctcggcctctcagtaggtaggactacaggcacgcaccaccacacccggctaatatttgtaattttttgtagagacagggtttcgccatgttgcccaggctggtctcggactcctgagctcaatctcttgttaactggactctgcaagccgcagggagaaacgtgctttccttagaaaactagactagagcatatttactgatgctaaagaggttggttttgtatttccctgggcaaataattctctctgagcctccgtttcttctagagatgatgtccatcttgcaggattgagaactggtataagctccattatgaaaagtgactgacacaagcttggcagaaaacgggtatactccgtttctctccttaatatcctccatgccatttgattgcacagcagggtaggcgagtgagaacttagtgttagactctgtaaagtatttaagatgtgcagcgagctctgcctgtctgaagttttcaacggaccggaaaaggatactttcaggtgctgaattattaagaaacatatggtgggccccatttccatttccccaggcttaaaggacatggacaagcaggtgagccccgcccctgtctctcttccagggcggagcttgggtaggccccgccctcttgctcggtggggcggggcgagggctggaggcggggtaggtccagcgagcgagcgagcgcccagcgcctcgggctgagtgagggaggaggttcggtggagaggctgcaagtgggcgagggctgggcgcagcgacctcattggagccggccggtggacgccccggcggaaccgcccagagttcctgtcctgcgctacctacccgaacgcgcctgcgcgctgcgaaccccgccccggtgtcacctgttggagccccccgcccgcgtagccgtgcacatgcgcactgccggccgccggccagtggggtcacgtgttgcgcgcgagccacctcccctgctggcgcttcctgtcgctaccgctgcggcccagggcccgcgggagcccagggcggtgccgggtgagacaaggccggggtttggctcggattcaccgcgaggtatgccgcgtccccgcccctcggcgtggggagttctggggaccgcgggggtagatggaggcggcgcgggcggggcagggcggcgcgtcccgcagcgcgggagtgggggtcccgtgtcgcctccccctacggactccgttgcccaccttccgtgaggcctggctgtgtcatcggggccgcagccttggagtgtctggcctcgctttcacctgagccggagtcactcccgaaatctgacactcagagtcccccggagcgcccgccagctcctccgcccgctccccgccgcctccacgcccgtcagctggtctccccgccagcgctgtggcgagatgcgccggcttcctgccttttccccctaccttctgtgcacctcccctttggtgccagaatggggtttctgaaacaccgatacgatcccgccacttctttcccagcgccctcagaataatgcccaaacgcttttcggcttagaggttttcatattctgccgcttgctcacatttccacctcggcttgtgcattcaggcctcaccgcttatgccccagtcataccaggcctcaggttccattgtacaggccaagctgctccccacttcagagccgtcaagtgttccctcgtcttggaatcctatttccctctttcccccaacttctttgcgtgactcagctcaggcgtcaccgcctcgaaggaggagccttttctcccagggctgaagaaggggtcacctcagggcacccatggcccctggggcaaccccgtgtagtccacctccaccctgtaaatggtcattgaaggctgagaccgtcttaggttcatttctgcgctcccagtgcccagcgcaaggtctgacacaggaggtcctgtgaataactgtgagatctttatgggaatcagaatgctgagccagctttctccagagctcagctgtgagatggaactttgatgacatgtccttggatgatgaaaatgttctgtgtgtgtgctgtctggtcatagcccctcaccacatatggctgttaagcacttggaatgtgtctgttgtggctgatggactggatttttagctttatttcattttaattcattgaaatttaaaattaaatagccagctgtggcttccataagcacagctttagagcctttctgaattctacccagccttccacccaccctgaacctagagtacttccctgaatgtgctttttaaatttgagtccgttcagaacattcctcagtaaacccattaacaggtgatccccatccctcccatggcctgtgctgcttcagtgctttaattaaaggtaacccatactttggtgttcagcattgccttctttgggagtttactatccacaccttaccacgggtagcactgttgggggcgtggcttatgggctactccagcctgaatctctrtaactcttccataggtatctaggctgccatgatgccagggccaagacctcggaagggccctcaggccagaggccaaggggtggccgctgccaagcargtatggaacttagccttctaggctactgggtcggtttggggatgggggtccctagacaacttaggcaaactggatcacatgtagttcccccattagttcagagacttggagcagtgcctcctggaggtggcagagcccttagacaccctcctactagtctcttccayatacaagtggggagagggttcaggaatcaccaaagtttaggatgttctgatgggacctcagtgctctcaaaggttccttagatagggtcacaactttgcttgttagccagggatgccagggcatgagggctgtagtcagtgggaggacttcactgcctagggacagatggctgtgccccaagtggaagaacaggggggtctcctctccaattttcttcctttatttcttctgggcctacatcttgagacttcttagtccatttttactgtctttaaaaaggcaggtaagaaaggaggtggggtaaagggcatagactcaagtcgcaaagagcttgttttaaattctgattgtctcacaagactgtctcagtttcatctgaacattgggataaaaacagaatgtaagctgggtgccgtggatcacgcctgtaatcccagcactttgggaggccgaggtgggtggatcacctgaggtcaggagtttgagaccagcctggccaacatagtgaaaccccatctctactaaaaatacaaaaattagctgggcgtggtggcatgtgcctgtattcccagcttcttgggaggctgaggcaggagaatcgcttagacccgggaggcagaggttgcagtgagccaagatagtgccactgcactctagcctgggcgacagagccagactctgtctcagaaaaaaaaaaaaaaaaggatgtacctctacctagagtagtcatattcatggaaacagaagaatggtgcttaccagaggctggaaggaggggaggaaggggggttaatgtttaatgggtagaaagtttgtttcacaacatgaaaacagttctgtggatggatgatggcgatggtagcaggatattgtgaatgtccttatgccattgaactcacccttaacagtggttaagatggtaaatttcatgttgtatgtgttttaccagagtttaaaaaaataggaccttcttttttttttttttttttgagacggagtctcgctgtgtcgcccaggctggagtgcagtggcgccatcttggctcactgcaagctccatctcccgggttcacgccattctcctgcctcagcctcccgagtagctgggactacaggcgcccgccaccgcgcccggctaattttttgcattttttagtagagacggggtttcaccgtgttagccaggatggtctccatctcctgacctcgtgatccacccgcctcggcctcccaaagtgctgggattacaggcgtgagccaccgcgcctggccaaaaaataggaccttcttctcagaattgtgagaattaactgaggtggttaagataatcacatagaacgctaagaacagtgcatgatggcagctattgctgttggttgtaataatggtagtgtgttttaaattctgactcacaagactgtctcagtttcagtgtggtcttactgggttttttgttgagtccctaggaaggtaagtgtctcaaggagtaatgttgcaggcctcagtttctttctgcacattgggcctcacagactgaaggagccactgattgggacttggagagccccaagtctggctctggagctggaccctaccctgcttgttgtgtggttcctaagagtcctgctctgctctcagatggggctctttatggagtttggccctgaggacaygctgctgggcatggatgaggctgaagatgatgaggacctggaggctgagctgctggctctcacaggggaagcacaaaccacaggcaagaagccagcacccaaggggcagggtgagtttggacacagggctggtcttggtgctgggacaagatgggcacaggctggtggtagaggggttcccttgcagctggacggagccagccagatcccctggtccttccaatacccatctgccgcactcccaccaagaggcggcctcgccctgcttccccaccttgtgtcatggcctgggctggcccctccccattgtggacaaatgtgtttctcagactgactcaggtccccatccttagccctagccacggtattggtgtagggtaggggcccagttagcacagactgaactgggtacataggaagtacatagaaattgtgtccagcgagttaagtggaatctccctccacagcccagatgagaacagagacttcaggcctgggaggatcaggaggtctaaatcgtcctctcttttcaccgggaaccctcagagaatccccccactcatcccccaccatcctgtgtgtccctgagttgaggataatgggaggacctaggaaggggctcactgctcctgccttggggtggcacaagcctaggtttgaatcctagctctgccacttaaggattgcagtgataggaaaattaatgttggaagtttctcagtttattcaatatatgaaaaggggatattatccatcttgcagatttgttttgaagctctgttggactttgaaaatctttacagatgtgaaaggtgttgttggaggttggagagagtggatggccatgtctatgtcaggctaccgtaggcagaggtgcagagaaaggagcagcttgttgcttggtggggggccaaggaaggtttccctgttgagggtcttttgaactgggtcttaaaggaagagcagttttccaggtgggactctgctgtgggagggaagagggatttctgcctgggtggatctaccaagcccctcctttactcatccctgaacttatctgagttgtgctgacttgttgtgacctttttcccccagcccccctgcccatggcccacatcgagaagttggcggcagactgtatgcgggatgtggaggaggaggaggaggaggaagggctggaggaagatgcagagctgctggtgtgtctgccaggctggtatcccagggctctgaggcaagcttgggcctggtggaggagagggcagtggagaggaggctgggggtgcccctgtattctctgactctgagtgagtgcttgcccctcctggctgtacagtgggtggcgtgtctcyttgacttctggtctaagctctgcagttggggattctcagatttggagtaattactattttcaaggctatcctcggtcagattaaagaaatgttttggtgaaggggactcaggcacagtgactgacgttagggaatattgctgagagagagggtcctttactctcaggtcctgttgtgggtatggtcttgaggcccccaagctcctgggctgtgttttgtctccctagacggagctgcaggaggtcttaggtgtggacgaggagactgagcccctggatggtgatgaggtagctgacccaggcggctctgaggaggagaacggcctagaagacactgaacctccagtgcagacagccgtcctgacagcttcagccccagcagctcaggtgggttctggaggagggcccctgtgcctctgatgctcctgtgcgcccagacgtaacacgtgtgtggcctggcctgcacagcaaggctgcagtcaccctttccaggaccctcccccagcagccgccccaagcagaaactgagcacaagaaactcctccgtggcagccagcctcaaaggcctctctgttctcctagactaccccccgggagccatatcctggcttccaccaagtggggctctgtatttgcctctgccatggcctctggcctctccagtgagcctttgcttcctgccttaaggcttttaggctcttctttctcctggagtcccagagctccatcttctagggcagcttccgcagagggagaatggtaggcctagcaggccctggagtggccaggcccttagctgaattgttcataggccggagcatctcaggggctacacgctttgctggaggaacggattcacaactaccgagaggctgcggccagtgccaaggaggcaggcgaagcagccaaagccaggcgctgcgagcgcggcctgaaggtgagtcgggctaggctgggagcagggcaggggagggggctgcatgaaaggcggctggtggagatcgcaccagtggaggggaggtcaccccaccagactttgggggttggggggccacccctggcctgtcttggagcagggtctgggctgagatggctggctgggtttctggaccagttctctccctcagaccttggagtcgcagctagcctctgtgaggagaggcagaaagatcaatgaggatgagatcccacctccagtggccttaggaaagcggcccctggccccccaggaaccagccaacaggagccctgagacagaccctccagctccccctgccttggagtcaggtatctgcagatgcccaaatcctgttctagttcctggggtcatagcccacagcgtgtgtccccagcctgccaccactgttcattaccattggtcacatcctccccaggacatcctcaagccagtgaagtccgtgggcaccttcttctgtgaccctcatgtgctctctggggactgtttgtttccttatagacaacccctcccaacctgagaccagcctccctggcatttctgcccagcccrtttcagacttagacccagacccgcgggccctgctgtcatcccgacagagagagtacaaagtggctgccctcagtgccaagcgggctggagagctagaccgtgcccgagagctcatgaggattgggaaggtatggcatctggctcagggcacccaccctcattttatagataggggaaacagrctcagaaagggagctagactragattgagtgagattggcctaagtgggggttgtttcagcccaggctcttggggtcccctgtctttcacccacacctgcttttccaacttctgcagagattcggtgctgtcctggaggccctggagaaggggcagcccgtggatctgagtgccatgcccccggcacctgagggtcagtatgtatcttctcaggctgcggtggggttggggaggagtagcaggcctggggctggccaggccctcccacctacacctctactctgggtcccccagatctgaagccccagcaggcttctcaggctcccacagcaccctcagtcattcccccagccgtggagcgagtgcagccagtgatggcccctgacgtcccagcaaccccaggtagggcaggatggtgggactgtggcgtggggacctgcaggcattggagggcaggctgacctgatgcccacttcttccttctttccttcaagtggcccctacagagtcacagacagtgctggatgccctgcagcagaggctgaacaagtaccgcgaggcgggcatccaggcccggagtggtggggacgagcgcaaggctcggatgcatgagcgcattgccaaggtgggcccgcggctatgcagcccctgcctgtgctggcctcttccctggctgggtgctctgtctccctggtcctccggctagtccttgtcttttctgaaccatcatctgtttgtctctctggggctcttgctgccttagggatctttttttctcccagggctgctgtcttcccaccagtctccctctccttgccccactgtgtgtcatgttgggcagggggcctgtgggctgctgccgaccacaggcccctcccttccttcccttgcagcaatatcaagatgctattcgagcacaccgagcaggacggaaagtcaactttgctgaattgcctgttcctccaggtaagtggggcatggcctaggggctctgtgaggaggtggtccctgggcaagaagggaatgggggacagccagtgattcccacttctcatgcgtctgcctcccctctgtggagccatccatcccagccatgccccagcagagccatgccccagacagggccccgggtagctttgtgcttctctgaggctgctccctgcccctcccatgctgtctctctcycacaggattyccccccatccctggcctggagtccactatgggtgttgaggaggacgcagtggcagcgacattggcagctgcagagaaactggcctctgcagaggattcagccccggctgataaagacgaggacgaggtttggttgagggctcaaytccagggctggtggggagaatagcaggtgaggggtaaacccagaccctgttgtccatactaacaagcccaataaggtacatattctttcctccactgtacagagaaaaaacttgcccaaggacacccagctaggaaatagcagaactaggattcaaaccaaggtctttctgaacccagagccccggctccatcccyattaccctgcagtctctctcctgctggggaggttagatgtgagagcttctgaggctgcttctagctctcagatcttttaggacccaggaagagaagccacccatctcaggtcacacagcgatgtagtacagtgttaggaagacagcccaagtctgggagccgccatgactatgctagggaacacatcccctcctaacagcctcctgggsacctgcagggtgagcccccagcacaggccccagtggccaagaaacctgcacggcccacagtcccttcatcccagcgcctkcctgagcccagggcctcaagttctaaggagtcaccgagtccatctggtgagttggggacaagcagggtgaagaactgagggcctagagagggcaggtgtggccctaaccagtggccttctcccttcagtgcgggagcagctggcactgctggaggcacggaaactgcagtatcagcgggcagccctgcaggccaagcgcagccaggacctggagcaggccaaagcctatctgcgggtagccaaatggcttgaggctcagatcatccaggcccgatctggcagacctgttgatctgtccaaggtgagtcccacctggttaaccaccaggacttctcaggcggaggtggcggctggcaggcttgacaggctgtgaacaagggcagcttctgggatgaggcagggtttggacagagcatgatgacagctgggaaagagccttttgctcatactcctctacctcacggccccaaaggaaaccaggagaagggaaggtgggctgcctgtggtcagagatgacaaggctgggccaggccatgggaggcaagagtgttattttgggatagaatgggaggcgatgagttgtcatcactggactttagtagaagctgaagaattacttagtttgggctcctgcctttgttggacttggtagaggagtaatctgactcttggggcccgaggggccttgtgacctgggtaggtgccttcgcccttgacggatgaggagggtgacttcatcctcatccaccatgaggacctgcgactctcccagaaggcggaggaggtgtatgcccagctgcaaaaaatgcttctggagcaacaagaggtcagcaggcccctcgtctgttcctcccctctgtgcccacagcctccccgtggaggaagacctggagctcagaccacacagccctggactcaaaattctcagctcttccacttactcactgtgtgacttgggcaaggcactttcttctctgaactacattttcctcatctatgagatggggtgataatacccctttcagggtggtacaaacaacagagaagagggaaagaacattgtgatgtgcgtgtatgtttatgtatttatctatctgaactgccacctgttctggaaaggctgccttctgaggggatgtttgagttaggttttgatggaaggagttgctaatttggggaatggctctcctcagaagagaaaatgacaaaagtgtaggcagagaaacgtggtgggacttgggagtagtgcccttggggctgtgttgtgggaggagagaggtgaggctacagaggaaagttgaagctttgagaagtctagccttgaatgccaaccaaggcaggtcctgctctgggctcgggagtcactctgggcctctattttcagaagtgcctgctgttctccaagcagttcatgcaccagggcaacgtggctgagaccacccggtaagtgcaagggctggggctgggctcatagggtggggagcagaaaatccaccatcatgctgacatacccatccctgtcagatttgagaagcttgctcaggaccgcaagaaacagctggagatcctgcagctggcccaggctcagggcctcgaccctcccacccaccactttgagttgaagacattccagactgtgaggtaccaaggcctagggaaacaggggctccaggcagggaggggcaggaggctgggagcccaggccagagactgctacccctttagtgaggcttcccaagcctggccccrctgtgggcactggggctgctgaggacgacagggtgcatgctagtggagagcgcacagctgtctgggtgctgtggaaagagctctggaccagaagtcagagatcaaggtctgcataccagctctgccttccctcccgtcaccacccagctgggcagacaggccctggacgaagggaccttgttccactactgtccttcacttttgagcattttctccttcccgcttggctctaggatcttctcagaactcaacagcacagaaatgcatctgatcattgtccggggaatgaacctcccagcccctccaggtaaccctagggccgcccctactccaggaggctcttgcccggacactccaagtgctaggctcctggccactccctctgacttgactcccttttctccttcccaggggtgactcccgatgacctggatgcttttgtgcggtttgagtttcactaccctaactcggtgaggttcaggtagaagtaggatcctctgaaacccgccttgcattccaggaccctgtgctcactttcttcccatccctgggaggtgtggctgcagtgcctgccctgtgtgcctctttgtttatacgctgtcctgacttctccctcctcactgcttaggaccaggctcaaaaaagcaaaacagctgtggtgaagaacacaaactctccaggtgagggccacacgtgggcctctttctyctccctcagagtgtgtgggcagcactggtgtttccagagtgggttcccatctatgcccttacttgatccaccccacttgggagataaaggtgctgttaacatgcttcttctgtagttggagaaacacgcagagaggtacagggacttgcctggggcctcatggcaaggaagtggtagaaatgggatatgracacaggaattctgtatcccaattccaagtctttcctactttgttayaatctatgactaaaaagagtacaaaaactcacttccaaggccaggaccgcgatgctctaccaccctttggaggcagtaccccaaaatgcaggtggagagattgggggaaggcagccagccctgggcctccatttccacttcctcaggaaatcccgagagccaagcccctccttgctttctccccctttgccagaatttgatcaactcttcaaactaaacatcaaccgaaaccaccggggcttcaagagggtgatccagagcaaaggcatcaagtttgagatcttccacaaagggtgaggctcctatcggtcatgctgccacacgggccgggaggagggaagagcgtttgtcactgctgcccctgcatgggctcagccagcacattcctgccttccctgcccagtccaatcctctgctgcctcttgactccccaggtccttcttcagaagcgacaagctggttggyacagcacacctgaaactggagcggctggagaatgagtgtgagatcagagaaattgtggaggtaggggctggggtgtgggcaagccaaaggggttggtacgacaagagccaataygcactgaatgccacaccttgttgtaggttttcgtgctcattacttaatttgaaattctccacaagtgtgcttagagtaggtggaatcctcatttcacagatggagaggttcagaaggtctgagaaatctcacagagggacccaggagaaggcagcctccttgtttccatgaactcaatggattccacaggcaaggactatacgaccttgcctctgacaaatgaggaaactcaggtccgagaggaaagggggttctgtaagctcatatggtgtgtccttggcagagctacgaccagctccttactgataacctatgtaggctggggctcttcccactgyagcacacctggccctactgcctgcctggggaagttgttcttatgcgggccctggtctctattggagccactgagggtggttggacttcttgggcctattgtactgctttgtgccctaattgactgcctcatcttctgcccaaaagagggagtagcgtggtgaatgggaaggaaccctgggtttggggttccagtgctgactctgccacatagagtcatctgcttctctctcttggccatctgtgaagtgagggtttgggtcagtggaaggctgcttcttcaagccaatgtttcttccagaagttgccgtggggattgaggagaaaatgaacagagctctaggatgcttgtctggatttatttattacttttttaataagactcacckaaaaccaccaccacctcctcctccaaatactgggagggtagggttttcatgaatggagattcctgtgttcatgccacaggacatcttagctcctctcacttctttcctgggaatgtagggacctgcctgctccccatctctgtccccttagttaccatttccctctctgtggtcctcacaggtcctggatggaaggaagcccaccggggggaagctggaggtgaaggtgaggctgcgggagcctctgagtggccaggatgtgcagatggtcactgagaactggctggttctggagcccaggggcttgtgaggtgggcagctctctgggccttcagaacctttgccccctccttttactcaactaactactcaactcatatctggagagaaaacctaggagtttctcatctatgagaaagacctaccatgctgggtagggcttatgggctgagtttctgatgttcctcagtagaactgggaagagaaggtaaccttccaaggtttaactatctatctatctatctatcttcaggaaaccctttctmaaatctttgtgttttcactgcagtttagactgacttcttgtgctttgcacccctgtgtagccgatggccagcaccaggagaggagtcaggccgcgactgtgcaggagatgactttcccagctttgctggcttcagaagcctttgtacataagagatgctgctacccaagcaccaaagacctgttaagcatgtgcactactgaccacgactctggtctttcctgttgttggcccctctggggctctacagaaacaggctgggttccaggagcccatctccccgctgtctccccctgccccgagtctggaagagggcaaggacacttccattcctctgtaccatggagtcctgcagccccttaacccctgcgtggcaactgtgtacagcttacccctgcctccagttgcaccacttctagatgtgcctttaaaagatctaactatgggatgggagaacttgagggtgatcgggaacctcccctgctgagggtggtgtcagggttccgtgactccagtgggccagtggtagcctgtcccagacaactccgtcaccccagctctgcctgtgcctttatccctgacagctgctgcactagccttcctgcttccctraggacttagtggagggggaaagttgtttttggtactacttggtgggaagtaaggggaaggttggatcttgggtttggtctacccacccaagagaaaagactgttaactggaagaaaaaatatatatataaaattttatgtagacacgtttatttatytaggaaactaagtctaactcattgtagggattttatactcaactatacagagtatccaccaaagtcctaatctaaagtcctgctccctgtcactttttaaaagccagggtagcagtaacatgacaaacggctgctgtggcttcctcttgagagaggacagggaaagcctttcctcttcggctggttatgtggggaacttccttagtttttttccacaagaaattctcctttggctttgtttttctgaatggatggagactatgaaggggtttgtagttgtaagagatttaatattcaaaactgaaatattctgcatttcttagaaakaccccatcttcccccaccccctttttgaattattaattcaagatcaacaaagcattcctcaagatcacttttaaaaaaggttagaagtgaagcaaatacattcagcttactgatcactatagtattgcataagcacagctcaagaactgagctttgtatgtgtccttttgggggataacagggctggaccatgcttccctgcccttaaacgcagagcttttagtgggtcacagagcgggaactacacacaagtgacttttttccccatgagccctctggccgattttttttttttttttttttttgagacagagtagctctctgccagccaggctggagtgcagtggcatgatctcagctcgctgcaacccccacctcccaggttcaagcgattctcctgtgtcagtctcctgagtagctgggattacaggcacccaccactatgcccagctaatttttttatttttagtagagacggtgtttcaccatgttggtcaggctggtctcgaactcctgacctcatgatccacccacctcagcctcccaaagtgctgggattacaggtgtgagccaccgcacccggctggccaatcttatcagaagtgagctaccaaaacttccacagatgtgagatttaacacttaattgcagtcacgtgtatgcaacacagcaataatctagaatgaaaaggagggtgattagccttcataagatgacctatagagcaaagaaaggtgactggaagggttcctaacccaacctactccccttagggtgtgtatccaacccagtgcttcctaagagggttacggaccactgtggttatcctctaaagttccagccagctctaggagtttctaaattcaggcctctgttggaaatggcctatttcgatagatagaaagttttctatagctctaaaggtttctcctttgcaacccattcaatttcagtctgctgctttgctctttcaaaacagaacctccaggctgacgaggcaagacaaagcctcccaccagacttggagattgaagttcttaaaaggcctttgttgtagccaaaggcatgcatgcgtcactggtagtaggaggagcctgtcccagcttcatcttgtcctgagatttatccacatacaggaaacaggcgggacacagtggctcacgcctgtaatcccaccactttggaaagctgaggcaggtggatcacctgaggtcaggaattcaagaccagcctggccaacatggtgaaaccccgtctccactaaaaacaaaaacaattagctgggcatggtggccggcgcctgtaatcccagctactagggaggctgagacacacgaatcccttgagcccaggaagcagaggttgcagtgagcctcgattgtaccactgcactccagcctgggcgacagagcaagactctgtctcaaaacaaacacaaatacagtatccaaacattggagattagtgactcacctgcagttgggagccagctacaacccaaatcattttaaaattttcaattctttgatctcatgcaatgcacactttcttctgaattagcaaactgaataaactacagaaattttttagaatcaagaagtcttgcttacaattaaagggcaaactcctgtgactctaacatttttcctttctcacagcaccattctgaaatttgcattgttgcttctggattttgaagccttgttttccaagtatttgtgggcagctcctaaaagactttgtcccttaagtaagggcagctgctttcaggatgaaaccatgcgactgagactggcagatcctgggagcttgcacctgggtcagctccacagatggattcgtttcttctctgcctcagctgcccaggctctaaaatggcatcatttctccctacttcttagcccttctgactacatacaatccctgaattcccattgccatgattattatttttgcattataaaaatagaaaccggccaggcacggtggctcatgcctgtaatcccagcactttgggaggccaaggtgggcagatcacctgaggtcaggagttcgagaccaacttgaccaatgtgaaaccccatctcttttaaaaatacaaaattagctgggcgtggtggtgcatgactgtaatcccagatactgcgcaggctgaggcaggagaatcacttgaacccgggaggcggtggttgcagtgagccgagatagtgccattgcactccagtctgggcaacaagagcaaaactccgacctcaaaaaaaaaaaaaatagaaacatcattacaaacttgctaattccagaaacaatgttcagcaggttgattgttgtttgaaatgtgttaaatgcataaattatttcccaggtgaccagttatctagaggtaaacttaactgaaaatcttgggcccaccagtgctcaggaaccactgtggctgggggaagacaagacgtgggaatttacagaggcataatttcaaatctgtagccctagagtccagtagttcctcagaagatgttgataaaaatacattgcctagcatttgataagcatttaataattttaaaaaatttaataaattaccagaatggcaattctattcctcttaagtatagaaggatcgctgtatctcaatctttaagtttacaatccagaagatttgcctatttcgaaatgtggttcagccccttgctttatataattcttacaatatacattgtataaaagcaaggataaacaaggaaaacaattaactatcattggctattttatgcccaattccacaaatgattttactaaacacagaggacatttgatgcagctgagaaaggatctgagggccagagtttgtccttagtgggagaatttaaaagcttgcactgaaccagaataaataagtacaatggcaagcaggaagataaaccacaggaaaacaggaccagtccctgtagaagttccagacttttgaggtatgttcagacaaagctggctattagaccaaaaataagctgcccctgttaacaagtgcttcctgttcttgtcaggtttggaggtagtggttaccagggctcggtcctgacaagctgctgctctgtgggccaagcttccccttagaagctctgagtacctctgagcctgtgggaaaggtcacagtaagagttctgtgcaaccaccgtcggtaaaacctttggagaggcagatgtcgactataagctcccacctcagagagcaggatgaacctacccagatgtttcccaggccaggcctttaggcctctggaaaacagctgctgccgcaaacacagctccacagcctgctgttgcctcgtgctaaacccagcactagccactggggagcagcctgtcgctgtcccacaggcctgcgctagcttccagggaattcttggagctgtactaatactgcagaaaaactagtttagccttggctttcagaagatgccagtgacaatggagtacattgccctaaagcagtattttcaaaatgtgcattgtggaatccatttggtctaagatcaaaataaatttttaatgaaacagaaaaaggtcagagtgcatcacacatatcatggataaaccagattttggtttctaataccactcccattaaaagaagccagggctccttgcagaaatagctgattccagggctagggcaggataagcacaagataagcctgaagcatcttgttaggatagaaataaaaaagaagtactcaaaaaaaaaaaaaaaaaaaatagcatatcaccaggatgtaggagccagcttgaagggtctcttgtctagctaaagctgagaccatttgtgcaccaaaataatgaattggaaccactgaaaaaggccaggcttggtggctcatgcctgtaatcccagcactttgggaggccaaggtggggggtttgcttgagcccagaagtttgaggctgcagtgagctaagattgtgccactgcactccagcatgggtgacagagtgagacactgtttcaaaacaaaacaaagcaaaacaacagtccatgagtgtataatgaaaattaaatgaataaattgggaaggaagggcttctgcttatagtagattaccaagtgcaacctgtaaagctggagaatgcgctagaattggaaaatcattttgcaaacatagtaaaagatcagtgcaggtaagaaacatcaatgcatgctaatttaacgggacactttcataggcaagagatttgcatggtctgaaagtctacatatactggttataagttccaggtagggggatatacagagaagttggacaccttgaccaagtgatcaaaatttaccactatcaatgagggggcagatggatatcaagtcattatgggcaaaaacacataaactgattctaaatatgaggaaatatcaaactgagttgttttctgttaaaaaaaaaaaaacagggtggggttgggggtggctacattcaccaaaaatatcaatgaggctgagtgcggtggctcacacctgtaatcctagcagtttgggaggcagaggatggcggatcacttgagatcaggagttgggaggcagaggatggcggatcacttgagctcaggcctggccaacatggtgaaaccctgtctctactaaaaatacaaaaaaattatctgggggtggtggcgggcgtctgtaatcccagctactccggaggctgaagcaggagaatcgcttcaacctgggaggcggagattgcagtgagccgagattgcaccactgcactccagcctgggtgacagagcgagactccgtctcaaaaaaaatacatatcaatgacataaaagatcaagatgagtcatgacagccatagccatgtctgattctatactggaaggtttactggagggaaaaaatgctacaaagaacatcactgggcagatgccaggttaaagtatcaaatccatgtttgactgaagtagagaactgtcctacagttgtgtaagagaatatccttatttttaggaaataagcatttaggaggaaaggcctatgatgtacgcaatttactctcaaatgcctcaattttttatggagaaggagaaagggagagagaaaccctgacaaatcaaatgggacaaaatgttaataagtgaacaagaggggaatctgggtaaagtgtgcgtggggttttttgtactttcaacttcctagaagtttaaattatttctcaataaaatgtatttttaaattcctccagtatttataactaaaaatgtcctgggtgtattccatcagcattcacagaaatacccagttgaatacctgccatccacacgggcagatctccagcaatcctgaactcacctctgctctccacatgacatttacactgagttgcccttccgaaactggaagagtagattaagcccttgagtcttcgattcacttcaatgaataatctggtaaaaacaaaaatctaagtgtgacttctacttgataaacagctgtgatgtaactgggacaagatcagtgtggaattatcctttttataccaattctgtacaaagagtgcaagaactgatgctttatattttatttcccctctgccctcccatcccacccttggtgatggttgtacccatttgagcatttctgagcacatgaccataagtaaatcttgagagaggagcggaattcttgtctaaacagtaacagaaggggattagctgcaaggatagcataactgttgtgcaggaacagaagctgcccagatcttcttggtggacaatgcatagaagacttagaattatggaacatcggtccccccaaccaccctttcccacccgtctcccaaacccccactcccaccctattccccaccccattaatagtgttaacaaaagcttaatcttccagttttaaagtgcaaatgatttgggtatgactgctgttgcaacaagtctgaacagaaaaaaatgaagtcttctctgtttatacgatgttttccagaatataaaagatgagttccatgacaacggggccctcactaagctggcaggcccctccatggatcaccggcaccaaggcgctgtccagatcattcatgtactgcgagggaaggggctggccattgctccctgcttgatagccaacctataccacagagagaaaaggaggagaggttactgaacagagaaggcctctccagggctgagggcaaggaggctgagcaggaaaggagatgtcctttttggccataggctaaacatatggcagtgaatacaaatttatcctcttttctgggtgatcacttatcctgttgtttactcctcctgaccacttgacaaccatgaggcactgggtaagccacttaacctgttatggtcttagttttctggggaagggtagaggtgtgtaaaaaggtatggagtatcagaaataataccttaatctttggttgtgaaaattaaaatgagaaatacacaatgtacagctccctaacctagtaggaactgaatatttgttcttgcatccatctgttcatccatgcaccattctgagcaactacaaatgcagggatccaaagatgaatgtaacagggccctgccctcaagaggctcacatatttagcagaaaaatgcttgttctttgttttatgtgagataggaccagaatacttcattagtatagcattgggcaagccgttaagcagaaaataaatatttgttgattgatgactagtcaggaactggggccagacacagaacctttcatcattccctgataatggcacaaccctgtgatcaggaaccagtttctcctcataagcactcaggccagaagcagcttgctgggcagaattaacactcactcagtggggaagggggatcaagctgagcctacacccaagttccaagtgactcggagctaaagggttgagggaacagagaggtctggcaatttgtaaacatcaaggcaggacctggcaggtcctaccacatgctcccctctttaccccacactaagaaggaaaccagctccttggaaggcatgcaggtgaagaagccacagttcaaatggttctgagagaatctgaccaagcatcacatgtgggtatagtactattaaagagagggccaaaaacactatatccagtcaggccagaaggtcggagaattaagctctctggggtgatgcagaaaaactcacgtcagaaatacagacgttgcccaaggccagctttaaaagctgcggaagacacatcatacctgatctgagtcaagtgtcacacgtagtcccagtttggtcattccatcttccttcagaagtttcaggtgaggacagagagcaaggcaaaaagctttggcaacatgctcagtcaatctactgtgatctgcaggatcactgaggcaattgtgctggtcatcgttttctaggaaaaacacctgttccccaaacaaaagagacttttaaacttgtgcctagattttgggagaagtagattagctcactgtatatgagcaccctgattctccaagatgtgcaagaagacatgacaggaacaggacaccataaagtccctggtccaggaaaagttgggcatttgtcttccacctaaaaaaaaaacaatccctgtctctccatctctgcatccacaaaatgacagcagcagcctgcctaactccctgcaagcctccatggttgcaatggcacattcttctcagaactagaaaaggcctccattttgcattgtatgccactaaaaggtaatccctgtatgtggacaa

SEQ ID NO: 97985 - DNA, 20746 bp, Homo sapiens
actgataaaatactataatactcatttttatttttattaaaagttattagataatattaagtcagggaatgtgcccatgctaaagcccaaggactcttgtttctaataacgacttcatcttttcctaaactgctggctcaggaattcttgagattttactggaggagaaaacttagtagttaagtaaacaactctgaagtcagagagcccaagttcaaatctcaggtcaatcactaactgtaaagttcttaaggtaagtaaattagtcaccataagcttcagtttccttagcagtaaactactaatagtagcataggataagtatcccttgtcggaaatgcttgggaccagaactgtttctgatttcagatgtcctaaaattttggaaaatttgcattgaagttgtcccttggtatccatggtgaattgttagttccaggactccccatcttccccacctcacagatacgaaggtccacagatgctcaaatgccttatataaaagggtatagtatttgcatataacctacatgtatcctcccacatactttacatcatctctggattcgttgtgatacctaacacgatgtaaacgctatgtaaatagttgttatcctgtattgtttagggaatcatgagaagaaaaaaagtctgtacattcttagtacagacataaccatccttccccctgttccccaaatatttttgatccacagctggttgaatccatggatgcagaacccacaaatacagaggactgactgtacttgctgactgagcatccctaattagaaaatctgaaatgttccagtgaggatttcctttgagtgtcatgttggtactcaaagtatttcagattttggagcatgttggattttcagatttggaatgctcaaactgtagtagttatcactgttataatgatagaggaaataatgccagtaaagcctgtagaacatacggtctggcatgagaaaagtattcatataaatattagctattcttgttattcagttatttttctttctgccatatgaaagccaaaggtttgaggtaaaaaagaaacttccctatctaaataggagacaagtgctgatagccaagataatgggtaaaaggcctagacagcatttcagagatctaagacacggcccttcccatgacagtctccgaggcccaggatcaggacctggagcaaaggtcatgcatgttatgctttagcaaaaaatttggctgcattgtgcccatgtcctagggatctgtggaagtttggacttgagagtgatttagggtatctggtggaagaaatttctaagcagccaagtgttcaacatgttgcatggctccttctaacagcatatgctcagatgcatgagcaaagaaataacctaaggctggaacttatacttaaaggggaggcagaacataaaagtttagaaaatgtgcaacctgtccatgtggtagaaaagaaaagcccattttcaggagaattcaagggggctgcaaagcaaccacttgctagagaaatttccgaatctaaatagaaggcaagtgctgatagccaagataatgggtaaaaggcctagacaacatttcagagatctaagaggcagcccttcccattacaggccctgaggactaggatagaatggttttatgggccaggctcagggccccgcagccctccacagccttgggacattgcttcttgcatcccagccactctggctccagccatgactcaaagtggcccaggtatagcttgggacacggcttcagaggatccaagacataagccttggtgactttcatgtggtgtcaagcctgtgggtgcacagagtacaatggctgaggcttggcagcctccatctagatttcagaggatatatggaaaagcctgggtatctaggcagaagcctgcttcaggggtggagccctcatggagaatctctactagagtagcgcagaggggaaatatggggttggagcccctacacaaagtcctcactggggaactgccgaatggagctgtgagaagagggccaccgttctccaaccccagaatggtagatccactgacagcttgtaccctgagccttgaaaagctgcagacactcaacaatgccagcccacgaaagcagccatgggggcttaaccctgtaaagccacaggggcagagttgctcaaggccttgggagcatacccctcccaccagtgtgtcctgcatgtgggacacagagtcaaaggagatttttttggagctttaagatttaatgactaccctgctgggtttggaacttgtatggggcctgtagcctctttcatttggctgatttacccattttgggatgggaatgtttacccaatgtctataatcccattgtgtcttggaagtaaataacttgttttagattttacaggctcataggtggaagggacttgccttgtctcagaactttggacttttgagttattgctggaatgagttaagacttttggggactgttgggaaggcatgattgtatgttgcaatgtgagaagaacacatgagatctgggaagggccagcgagggaatgatagtttggatgtgcatccccacccaaatttcaccttgaaatgtaatttccaatgttgtaatctccattgtaatctccaatgttggaggtggggcctggtgggagttgactgaattcatccctcatgaatggtttagcaccatcctcttggtgctgtactcgctaaagtgagtgaattcttaagagttatggttacataaaactgtggcacctcactctctccctctcttgctcctgtttttgccatgtgacatgccttctccccctttgtttccataatgattgtaaccttcctaaggcctctccagaagcagatgccactatgctttctatacagcctgcagaactatgagccaattaaacctcttttctttacaaattatctggtctccggtttttttgtttttgtttttttttaagaggaagtcttcctctgttgcccaggctagagtacagtggtgtgaatcttggctcactgccacctccgcctcttgggttcaagtgattctcttgcctcagcctcccgagcagctgggattacagtgcctgccataatgcctggctaatttttttatttttagtagagatgggtttcactatgttggccaggctggtcttgaactcctgacttcaagtgctctgcccacctcagcctcccaaagtactgggattactggcttaagctaccatgcccggcaggtatttctttatatcaattcaagaatggactaatacagagtctaccataaaagtgaggatagtagttactggagaggagagcaagagagaggggttagtgactggggagggggcagaagggggattatctggtgctggcagtgatggttgcatggatattctctttatgatacattttagctctacaaatgtggtttaccctttttagttagatttaataatcaagagattttaaaaagcacaaaaacaaacctaaagaataagaactcattggaaaataatctgaaagatatgtaaattgcatgttttaaatagttgatttcttaaaggtaagaaaaaagagaagtcactttgtatcaggtatcagaaggttttatttgtttgtttgtttttccccccattgaccgtctctatgagcccatgttttggacaagttttaagatgaactaacttaaagtttcagtattcaaagtgagttagtgctatataaaaagggaaataaaatcacaagcttttaaatcagaaagtctgtggaagacagaataggacatgtttttagttgccaatctgagcaattaaaacgtggttaatttgaattggaaaaaaggtggccctctgggaacctggtggcagcagcagtcccatggtctctgaggcactcttggagtcactttttccttttcttgaaggataacacatgggccctcagctgagcagctctatcagccagtttcctgtctaaacaatcccactaatctgatagccttctttcacttcatcctgtccaagctggcagtgtttgtgttgagatggttgactggctctatcacatacctaatgtcttcacaaaagtgtagccacactcttagccctgtctccagaacatgttattcagacaggctgagaattttctaaattctcagatgctagttccttttctcttagcaggtccttactcgattgctcatttgtgtcacattattaagcagcaaaaagaaatcaggctacaccttccacaatttgcttggaaatttcctcaatgaaatatccaagttcattgcttacatattctattttccttccaacaatagaacacaattcagccacaatctgtcactttcttttttttttttttttttttagatggagtttcgctcctgttgcccaggctggagtgcaatatcgcaatcttggctcactgcaacctctgcctcctgggttcaagcaattctcctgcctcagccacccaagtagctgggattacaggcatgtgccaccacgcctggctaattttgtatttttagtagagatggagtttcattatgttggtcaggctggttttgaactcctgacatcaggtgatccacccaccttggtgtcccatagtgttgggattacaggcattaagccactgtgcctggcccattctgtcactttctaacaaagaccacctttcttttagtgtccaataaatgttccccatttccatctgggtcttcactaaaagtgcttttaacatttacatttctagcaacattctgatcctaatgttagtctcgaaaaaactctgaagctttctctacagttcttttctcttctttctgagccctcaccagaattgcctcaacattcacagttctactaacagttcctcttcaaggaaatctagtctttttctatcaagcaccttaaaactttccagtctctatccaatacccaattccaaagccacatcctcacttttaagtatttgttacagcaacaccccacttcccagtaccaaaatctgtatcagatttctgggactgccataataaagtaaccacatattaggtgggttaaaacaacaaaaatctatttacagtttgaaggccagaaatccatacctactatacatatttaaccaaggcgttagctgggtcatgctctctgacagctctaggggaatatccttccttgcctctttctagcttcttatggccacagaaaatccttaactttccttggctatttgtgtccaaatttctcttctaaggccaccaattattgggttaggatctaccctaatccaggatgacctcatcttaatttgattatatctgcaaaggcattatttctaaataaggtcatattcattgggaccaggggttaggacctcaacatgcctcttctggagcaggcacaattttactcaccaaatagcacaattctaaaaacagacttctgggaaaacataacatggtccatggtagtagtaatttttcttttttttttttttagacggagtctcactctgtcacccagtctggagtgcagtgtcgccaacttggctcactgcaagctccgcgcctcctgggttcacgccattctcctgcctcagcctcccaagtagctgggactacaggtgcccaccaccacgcctggctaatttttttgtatttttagtagagaatggggctttactgtgttagccaggatggtttcgatctcctgacctcatgatccaccgaactcagcctcccaaagtgctgggattacaggtgtgagccactgcgcccggcctagtagtagtaatttttatgatatgaacatacactattgagctcctggtcttctagtggtgttgcatgttagtttaaccttgtttaaccaggatgtttcccataacttcatcattaatcatttttctaaataaaagcatctttatttagaatgaactaataggaatctccaaccttcagtgcttcagtagccttgcgaagctccttaataaccgatgataaagcttctgggttaattccttgttcacaaagccgtacacaaatagacagagtttccatatctaagccagtattcaaaattcttgaaatctcaagcagaactgaaaaaagatacaaaaaaaaaaaaaacttaaggcttacagcatttaaaaatatgcatatagtactttcattaatttatatatcactgcacaataccaaggaattagcatagcatcccaggttttggaaatctgcatgtaatactttcttgcctttacttagttttagaaacttaaatataaatataaacttacaccttcccttcacataactgccttttacatcttgctatatattctagcacttgtttaatatctaacatgtatccaccatacttaggataattctgaacacttgcttattttttagtattcttttaaaatgcagtttaactagtcgcatattattccattttatggaaacactatacttaactactctgttactttaaaagttaggctgctctcatgtttctctcattaaaataatattggtaagaatctgtacatactaaattttatttcattaggataaatttctagaagtagaactgctcagtcagtaatatacatatttaatttgctgaattgacatacaatagtcaaaaaaaggtaatgtacatatttaaggctttaaaagtgtttagaaacttttataacaatttgacagcgtaatcatgtctgttgaatctaataataaaaatgaaaccttatattttttaaacttcatttgtatagtactgcattttattgtagttgatagaactcattgtctttaacatgagaagcacaaacagagaaacttggtttccaaagtgattttcagaatcccttccattacaggttgtaagtacacctgttttaagattgcttcccagagagtatttagaatattttaagtcaactgtcaacatattatctattgtttcctatatcatttccccttggcattatgcttagaaagttattccccatgaaaagattatatccaccagtattctcttccagcactttgaagtttatttcccaaaaccccccataagtatttatctccctagagtttgggtggaaaataggatctaacttttcctcccagaaatgagccagttgccccagtaaaatttattgaatgacctaagttttccccacccagttgagatgccacctttattcatagtaaattcccatatacttacaaatttgttacatgtctatcttttgtaagggcaaccatttaatttctaactttatattgcatgtagtagggtaaacattccgttgtcatctttcatttatataagccattttattcttcggatgaactgaacatttttcatcaattctaaaaacaaattccaactggattctgattaactgtataaaaactacattattattttgggaagaatggacaagttatcaatatttagtcacccattaatttaagtctaagtctttctgaaaattcttatagtatttatcatgttcatgagataggtccctcccatttcttccatatcagatattcactttcatccctagaagttcaatttgagccgggcgcagtggctcacgcctgtaatcccaacactttgggagagcaaggtggacagatcacctgaggtcgggagttcgagaccagcctgaccaacatggagaaaccccgtttctactaaaaatacaaaattagccaggcaaggtggcgcatgcctgtaatcccagctacttggaagactgaggcaggagaatcgcttgaacccgggaagtaaaggttgcggtgagccgagattgcgccattgcactccagcctgggcaacaagagcaaaactctgtctcaaaagaaaaaacaaacaaacaaaaatagcagttcaatttgagtcttaaaaaaaaaaaatgtctttcatgcctctactaaactttttggagatatggagtatagttctgatgcccttgtctgctaattctaacatctgtgtgatcgggggggtgttcgttacaattgactgaatttttcacatcatgggttatactgttctgccttgcatatctggtaatctttgattggatgccatgtacttagaattttacttaggtaccggatagttttgtatttctaattcttgagctttataatgagataccgttatctggaaatggtttgatcctttcggatattacttcttagatctgttaggcaggaccagagccctgtttaggatagggctaattattccccttatgattgaggtaagaattctgagtactgtatccaatgtcttatgaattacaaagatttccattctggctggtagttacaggcactatcctcagccctgtgtaagcacggtgcacggttcactctaatccttctagatggttccctcccagctttctgagtactttcctcacacatctgctaatcaatgctctgaatacttaagggggacacttctacagatctccagcattctttctgtgcagttctcccctctcaggtactgttattcaaactctacctgccttggtctcccaggtcttctaaactcctcctactcacttcagtgtgtccactgggttctccctgctatactgaggcctggaactctctgaaggcagtgagctggggcaacccaagaaatcactttgcttgtttcctgtctctaagggatcactgtactctgatgcctgatgtccagtgtcttgaaaaccattgttctstatgctttacctgagttttcttggttgtttcaagtagaagcataaatctaatctctgttactccatcttggctggaagatgacagctcttcccattttcatttcttcagttttgatattccaatttactgatactttgctcttcagctgtatccagcctgttattcatattatctgctgaatttatttcaaatttatttcagtagctttcaagatttctaatttctaatttctcaccataaacacttgttttataactaaatgcttatttatagtgacaaatttcacagctgttgttcctgccttcgtctatttaaggctatattcttaaactgtatttgagattgctctattatctctatttcttggagtataagcaagcagcaaaagacagtggttaggagtgtgatctctagagccagactacctgtgttcaaattctagctgtagtatttagtaggcaagttactctctctgtgccttatttcaccattctcgaaagtgaggataataagagtacctgttttaaaggattagtgtgagaattaaaggatacacttagaatggtatccatttgttttgctgacactgccttgcagtcctttggaatggtgcttggcatacggtagggctcaataaaaaagagttccctgttactaccactttccctctttttccttttccatgttagttgctcatgtttttcatctaccttaggtgctttgtcattcttggctgaaaactcatcttccatagatttattttaggtgtcctggactggtggcccattctaagataggaagccgtaccctagctttaggcctctagatcaggccttgtagtatttttggtccagatccaaaaaacacatggatggtgcttctcaatctctggctgtgacaaatggcacatttctgactcccaacttcagtgaggcagggtagcatgctttgtcagattctattcccgacaatcccctgctgtggttcccatctgctcctttcttttggggggaaacctctctcttcctaatcaatggagacttcccttcttgcttttgaacaggtctatcctgataattatattttcttactatttcctatttttttatatgcttagagtttcagcaagtgctcaatctaccatattgaatcttcactttatttttgactgtcttcacaaatggattctacttagcccttgtacattctaagtggttaccatcagtatactggaacactacatattaaactttttaatcaccagtcaccttgatgaattctatgatgcttctaacagtttttcagttgattctctcccttctctctccagtttccagtttgttctcttcatggtagacccccccacgtataaaggctatgcttattcctgacttcatgcctttgttcttgcttttctcctctgccttttatcctcccttcatataactcaatgctgttttcttagtccatctcatttgtggtttcttctttaagccttcttttcaaatggacacctatttttacttcctattttcacaaatygcctgtaatcaaaaactatttctttagtgcctaccatatgatcagtacaggttgaacactcctaattccaaaatctgaaatgtgaaatgccgcaaaatccaaaacttattaagtactgacataacaccrtagtggaaaattccacacctcatataatggatcaaagtcaaaatgcaggtgcacaatacacagttcattcagcatccctgagggaaaaaaccaaaattaccttcaggctatgtgtataaggtatatataaaacatacaagaattctgtgtttggacttgggtcccatccccaagatatctcattatgtatgtgaaaatattacaaaaaaaaaaatctgaaatccaaaacatggtcccaaggtttttggatgagagataatcaacctctaactatatgtattttgtgcctattatgctactgctgcaaatacagttatgaacaaggtatatatggtcccactcctcacagatattagtccaggaggagagatagatattaaagtaataactgattccagatataagtaaaatagtggaatacttctgaaacaaattacaagggcatcttaccaagtttggaaggacacagtgtttagcaaagacttgtctgaagaagtgacaattacacttagacatcaaaagtgagtagaaatcaaccagactaatacagaggcaggaggaagggtgatggttgagagcaaagaaaacagcttgtgtgatggtccctacactagagggaacttggtaaattcagacctgaactgctattgtgaaggcaatgtaattaacggggtgaatgggtataaaatatgaggtaagtcctagtgaagatcttagaactgtggaaagctactggatgatataaaataggaacataaaaaaatcaaacttgcattttaaggactttttggctgagtatcaaatgaatctttaaaaagtccagttatatcacaattttgataaaagactggtgggtaggatgaacaggagatatttagccaacctgaaatgagtcaagaattgaaagggcttagtgaagaacaggaggcagaggaggtgagaaagcaagactgacttctagatttctttctcaaatgtgcaactggattgatggtggtagcatggactgtttcgctggtactgccttgcagtgctagtcaaatggaatctatataccatagattctcttaactcctttctctataacgtgtttttttttttttttttgagatggagtctagctctgtcacccagtctgcagtgcagtggcgcaatctcagctcacgacaaccttcgcctcccaggttcaagcgattctcctgcctcagcctcccaagtagctgggattacaggcacccgtacttactactaaatatatatatatatatatatatatatatatatatatatatatatatatatatatatatgtgtgtgtgtgtaaagtggtgctacaggccgggcacagtggctcacgcctataatcccagcactttgggaggctgaggcgggtggatcacctgaggtcaggagttccagaccagactggccaacatggtgaaaccctgtctctactaaaaatacaaaaattagctgggcgtggtggcgggcgcctataatcctagttactccagaggccaaggcaggagaattggttcccatccccagcttcaacctgggaggcggaggttgcagtgagccaaggtcgcgccactgcactccagccagactcggtctcaaaaaaaaaaaaaaaatagtgctatgataaagcctctcataaggaataattatcaaaattaaaattcagatgcacaggacgattttagaggaaaataaaaattaaggtataaaaagcaatcaatagagagtacctaacataccaaaaagttgaaaagcaaaagaggcaaccatacacagtgggttgcgaggggggtgttgttgaaaaggcacgactattttaagcgtgtagaattttagggatataaggatgaaagcagagatctcatgcagaccttattctaaataggcagagatagttcttttcagagtgaggtgcacagataatttattaatagaaagtcagcctgcttcctcccatgtctttaacaaaatcctttcatttcatgatcaaaatgcaaatgtagccaagagttctgcaattcacatgacttaaagggaggttcaccaatgctaccattgaggggagaaatggtattcaaaaagttttgaaaattttatttttgatctcacgggttgatttaaatactgtgtaacaccacatcccctctccttcattttttgttttacttcacttttttgtgttcttactctctttataatcttcatttcacaccaagttttctcagaagagatcttgatgatgcagccaacacaaaccatcagttctcaattgtacatcagtgattccaccagagaaaatgtgagttttctgttcaaatgggatcctgtggccatatacataaggaacctaagtacagctaacctaagaaaataggctagaagtgaggtcttatactctacctttttccaaggaaatatacaagacagtaaatttatatttatatacacacacatatatatattcatacataaatccacttacaaaataaaactattaagtgttgatacatcgaaaaggatagaaaaataagctgaatattaagagtaacattctcagaaaaacagcaaggtagatactgaacaagtgaaaaattagatgcaaaggctctaaaagtgtaattctttgaaaagaaaaccagaatcagtgcagaaaaagccagcagcccctctgcaagtgctacataagaaaatgaggccgggcatggtggctcacgcctgtaatcctagcattttgggaggccgaggcatgtggatcacctgaagtcaggagttcgagaccaacctggccaacatggggaaactccgtctctactaaaaatacaaaaaattagccgggtgttctggcgggcacctgtaatcccagctactccagaggctgaggcaggagaatcgcctgaacccgggaggcggaggttgcagtgagccgaggttgcgccattgcactccaccctgggcaactacagcaagactgtgtctcaaaaaagaaaaaaagagcctacggtgaaggagagagagatacagcagtgagaatttcatagggttatcttttaacagagacggaagctgacgtgagtagaccctggaaaacgtctaggcccactgcaaataacaacatcgatcaaacactcataatacaggtggatgtgagtaaaaaggagacaaagaaagaagactacaagagagaggccatctgaaataatataaaaataattgatcatctttgatatgtttttacatggttgtcttatttaaatattcacaactcctggaggtagggttttattttacagaaaaaaaaaaaaaaaaaactaaacaggctcaatgatgtttaagtatctagtccaagctcaccacaggggcataaagtggcagaaccgacattagagggtagacagagggtaaccgcaagacacaaatttcgtgttctgcaacacttgtgtaggcttcacacacacgtgcctccggggccgaaaacaggcgacaccatagcacttgggcactggtgtcacccgcttcaagaggaaactaggataattatgaccaaaggggaacttgttcattcgccggatattaaaggtgcctacttaagtgcgaagaacaggaggcatagcggtgaccaaacacctggcccctgtccccgccgggatcccaaccttggggacccccgaagcgccccgggcgggaatcgggtgggacgcggcacgcaggagggaacgggtgtactgggtggggtgggcgtgrcgctgtcaccgcaggagatcgggcgggtagggcggacctgggatgcgggatagagggggcgcggcattcgcgckagagggacgcggtgcgcaaccggctgactaggggccgcaacgcctagcgcgcgcgacaaactacgcagcggcrgagacaactctcaagggatagggccatcagccctgcggccctggcaggtccctaccaaagatcttggaagatgccgtttggggcactaaggggacctgaagtcctccccaggctcattcccgcctgggggccttggctctgggaaggcacgcaaggtaaagggagcgcaacggamactcaccgtccatggtctcccgcaccgcattcagattcgccgccgcggccgccgccgccgccccagcaccgcygctactcgccatggctaaggccgagggaggcgggagaagggcctgacccggaactggagcgccttcctctctccgrggcaatcacacagcgcgtctcggcccacgccgggcaggctccgcccctcgcgctcgccgccggcgtgaggctgcgttgatttgaatttggagccacgttcctctgcgcggaacgtggagcgaggagttgccattcgaatttcctacgcggcctccgtgcgattggctggttcgcggatggcgggacgacacgattggctagtcgctcacaagccccgtgccctggttggcccaagacagcgcggaagcggggagttaaagagtctatgcctgtcgtggaagctggcctggcccccggagctccctggagtcggtactgggggcttcgttttgtacgcaccggtaggtacgctcttgtggtccctggcctttcctcctgtctgaatggagaggtttcttttcccagctcctgacttgcctgcccgctcgcccctggtgaatgggagcagtcagggagtaggtgtggaagagaggggcaccagaaagagtggccacgtagggttgggggcgacgcctccttcgcactccatccagggaagccggctgcatctcaaccttccagaagtagactcttttccaccccaccccgccaaggtgtagcctctgtagcctcctttgattgcaagtaatgcagtctccctttctatcccgggaggggtggaggggaggtcttggcgaaaggaggatttttggaggaaaggggaccccaggcagttaatttcctagcccctgtcaatcatacttctctggctaggactcatgtgcaagaaaggcacaagcttcctcatctcttacctgcttgctacaaagaattgtttaatagcaactgtagttggatagggtatccgaagaatgttcatagtgttgagacatgagatgatgaatttaaaaaaaattgtagttataagtcctttagttgagaagagatctgggcctgttgtaacctttagtttcctcagaggcagatctgaattcattcatatttgattgctgcgtataagccacttcacttctctgagcttaatactttcgcaaaataatatcactagtaagttactgctatagctttcaaggttgtttcgaggatcagttgagaacatttatatgtgatactttttttgtaagctgtatcatagccccaagagtgtgaggttttgagttgttttttgtgacacatttgtcgagtacattttaatagttaaaattaatatctatgggactttgtaattttaacatgcatactcttgatttctttttagttttctctctgtgctatgggagatgtcaaggaatcaaagatgcaaataacaccagaaactccaggaaggatccctgttttaaatccttttgaaagtcctagtgattattctaatctccatgaacaaactctcgccagtccttctgtttttaaatcaacaaaattaccagtaagttattcctgactagtgtttacaactaattttaaatgtaagtaattacaaataattttaaatgtaaacatctgtctttacaaggtaaggaggaaatacattatggagcatatatagctgcaatatacttttttaaattgtagtgttcattataatctagtggttaggttaataagttagctagaagattttttttttttaagttcaagaacatacgttagcttcctgcagttgtgggtgtagctacattctgtggttgacgatatagctactaatacattagagaagaagctgcatcatctaatattctgttctcacttatttggcaaacattatttgagtgttgctatgtgtcaaatacagtgctaagcagggattacactgtgaacaagttaggatcattaggcacaaatccttaaggaggttatactccgatgtatgggtcacaaactttctgttaggggccagacagtaaatatttaagctttacaggtcatttggtctctgtcacaactactcacttctgtcttgtatcacaaaagcagccataggcaatgtgtaaagagataaatgttactctgttccaatacagctttatttatggacacatttgaatttcatataattttcacatgtcacaagatatttttttgtttgttttcccaaccatttgaaactgtcaaaataattcttagcttgcaatctattataaaaagaaactaacccctattttaatgtgttaaacagaactagatgagtaatatcaaggcagtgtgataggtgatatgattagtgcttagggcaatagtaatatgaaggaaaagtgttcttcaggatattagaaaaggcttcatcactttatcttttttttttttttggtagagatgggatttcaccatgttggccaggctgatctcgaactcctgacctcatgtgatgcacccacttcagcctcccaaagtgctgggattacaggcatgagccaccatgcccgggccactttatcttattttactgttatttgctacactggataagttcttttgaccttggatctttcaacctaccaagttacttagaaaaactgcaaatagggtggctgtttctgctacactttcatacaggttttacaatgagcaagtatgtactagtggaaggtcgagcagtttatattgagtcatttcatcaatctgaccttatgatttttaattgaatcattaaaatttatctcttggtcttactaaaaataaataatagattgacggcagcttaatcctcaaagttggaatgtatggcatcttgcgtttttaggactgaatttgcctagaatatatttctaattacagattaggatttggataaacctttaattcagttgcatggttgagtacagaaaggcagcactggttgccattcataattattttaaggatcaactatgttgtgagcttttgcagccacctccaaagtgactaaggactttaatttcagttccttcttagtgaaagtaaagacgtttgttaactgtgagagatttttacttttacatgggcttagtttatcacactgatgagtgttaattgtgaaagttttatatctttattactctgttgtgatttttctcgtattacgtaattccaacccaggtgaaagattctgatattttaaaagagatacaggctgggcgctgtggctcatgcctgtaatcccagcactgccaaggtgggctgatgacttgaagtcaggagtttgagaccagcctggccaacatggtgaaaccccatctctactaaaaaaaaaaaaaaaaaaaaaacaaaaattagctgggtgtggtggcgggtgcctgtaatcccagctactcaggaggctgaggcaggagaatcgcttgaaccggggaggtggaggttgcagtgagctgagattacaccattgcactccagcctcggtgacagaacgagactctgtcttaaacaaagagagagagagatacaattaagtcagttgatcgaatgtgatatgattaccctttgccatttaatttcatggtaaagtcaaattttaaaatacaagctttaaaatattttcatattataaccattcatattatttctcacataggttagcattttgatgaactattttagtttgcctttactcataagctcactttcttttgttaagactccagggaaatttagatggtctattgatcaactagctgtaataaatcctgtagaaatagacccagaagatattcatcgtcaagctttatacttaagtcattctcggtaagttttcctttcttgcacctaagtctaataacactctcaagtgaagagaggtaggaaattctaaatgttgagtatttttctatgtaaaggtatcagggagaaaaaattttgatgcagattttttctatctaaatgaatgagttcaaagaactacattcagaaagattttcttgccaacagttccagacctgagtagatacctttttcttttacaagtaaccttttccctctgctactgaggtgacagctctgtacccctagcactcagttaagagaagaacattttgaaatttgcacttttctacatggttgtggcttctgccattaacttgtttcagtttgtctttttgatgatttggggtaaagcaaaatgctgtttcattgttatctatgtttggggaaacctaaaaccccctcaaagagttacgtatgcactgaatggaagggtatccattagcaacagagcggttttttagacatcatccaactgtaacaattcacttggaatctgaattacattttctagaattctacatatcacccagtgcagtcttatttgttgatgtgttgtttaggtttcaaggcactaatgtactgcagatttagttttttattacaaagtgtaaggtcatattattcttttgtagttttagggactcttgtttatatgttttatagtctgattttttaatatttgaaaaaaatcaaatacatggtatgaccagattttaatttgctgtcctaaggtagacatgttgttagtccaaaacaaaggataatccttttccctttgacttaagaattcagtcacacaacgttgcacacatattgagatattctggtaaatacttactggcttttctcctccatcttctctttgcttggtaacatgatgaccattcactcataaaattaatgtccacccagagtgttaataggaagggaatagaatgaggatgaagcatgaaaggattttaacttaaatttaaataatacctttgaggccaggtgtggtggctcacacctgtaatcccagcattttgggaggctgaggcgggcagatcacttgaggtcatgagttcaagaccaggctggccaacatagtgaaaccccatctctactaaacatacaaaaacattagccgggcatggtggtgcacacctgtaatcccagctactcgggaggccgagacaggagaatcgcttgaacccaggaggcaaaggttgcagtgagctgagatcatgccattgcactctagcctgggggacagagcaagactccatctcaaaaaaataaaataaataaataagtaaataaataatacctttgaaagagaaggtgagatgaatatctaaaagcaaatgagtcacagtgactaattttttgtttcacacgaacttaattatgcttaattattttgtctcatttcttcaatatattgaatgatggacaattattatattgatcagtcaagagatacttattgagtactgtgagggactgtaagaaacactgaagaagtacaagatactaagagtcaagagtcaaaaatataattagaccaaagttgtaacacagtgcttctgttcttactactaaatgatatattgtctgcaaaggtttataaagataatcttggtgtctcttagtacatagatttatcatatagaagaatggaaaagagtgggaaaatattataatttaatttaataatataattcaatgaatggttatggcttctaccaaggatagtcaatatattcttcacagagcatctcgtttcatccttagaaacaagcagtgtctttcagtatctcttcttacatattagccctctacttcaattcttcccatccttttcatgccaccatccacacagaaaattgtaactgaaaagcataccagtgtaagcaggtgagtcttggccatgtaggtgaccagtcctgaggtcccctctcctttgccaccctgcaaaggctcaacattcaggccacacctgtacctatatgcatcatactggtgttcagtggtatgctggtcaggatgctctcccctgtatgacttcttagaatcttgtttgatctgactctagagtatttggccacagtgatttttacagtttccagcaatcacctgagtatttcatgttcttgaagtccctctgatgaagtagcaaaaggtttctgaatgcagtaatcctagttcagagcttacttgctatttgctaagcttgttatgtgctgccattttgaccatgataagatgaagagaaccattgataagatgaaggccattttgttatcctc

SEQ ID NO: 97986 - DNA, 21046 bp, Homo sapiens
  misc_feature (1)...(21046): n = A,T,C or G
tttcgctatgttggccaggctagtctcgaactcctggcctcatgtgatcagcctgcctcagcctcccaaagtgctgggattacaggtgtgagccaccgtgcccaaccaaaaggttttttttataagtgaaattcagaaaaatcaaaatgtggtgggtaaaattcatcttccatagaaatggcacaaacccagtaattttcttgcagattaaaagtgtgattgaagagttgggaaggcttccaaaagtaattcacagtaacttgtgggtagactgagtgaggttagattatgatgnnnnnnnnnnnnnnnnnnnntgaaggaagtgacgtttgcgcagtttcacaaacatcagcggccccagatactccggtacttccaccttgagttctgtctcctgcgggcgacagaagaggctcagccccggtggggcctggcgggaggggcacccggctgagccctgctccctccagcgcccacgcccttcctcggagcctctgagaggaggagacgtatcggggtggggggactgagccagagagagagggaccgcgccgagcaggtggccccaggactcggttctgaggggacggggacggcaggtgggaaggtgcgctcctgccttcactttctcctccctgtggtcactgactgtgccaagcgctgggctgagcgctgccgcgccctggacgagcgcgctgtggagcccggacgcgctggtggcaattcccgctgtgcgacccctccaccccaccccgcccgaggctgaggacctgcaggggccccaccggcctggggacaaccttcccggagacctggaggcggagagggctcagccagggagagtgacagaaagggaaggcaggggaaaggcgcgcagaaagagagcggcggggaagggagggcgagcagcatcttggagctggagctcagagcccaggtgtggggggtcagcaggtccggaggctctcgaaggtggcgccaggggctttggatttggtcccgagaacaagcgggagccgttcgaatgtgttaagcagggggagtgaattagggagaaatcattccggcttcagaagggcttggaaggtctgcagcagaggtggcgaggccgctggaggtttgaaatggcttttaaaatagagaaaccgggaggaccgacgaccgctccggcgaccgcagtttccaggcaccagagctgtgtggaatgaggggcgctcaggagcatccccttaattccaaggagatcgagtagcgggaacatttattgagcctttactgtgtgtcaccaactgcccaccatagggaggaaaaaagggaggagggagcgcgcctttccaccttccgtgccccgtcccctcaccatggagtcgcggggccacctgctccgtgcgcattttctctcttcctggctccctttgccccgctttctcggaagctcggagcaagggcgtggagtgcggggagcagggctccgcaggttcaagaggacgcgggcggtcgggggcgggacggatattgggcagggacgcgggagatgctcagggtctagaactgactgcgccggattcttgtttagagggaggtgaagagaggaaggaggcgcgggtgacaccgggggaggcaggaggagagggctgggaggtggggagaggggaggacctcatccgggcatgttgctttgacgttccctgagacagacatccggatttggggatctgggagagagctagagcagtgatgggaatttgggctttcgcggaagaaaaaaagtaacaggaccgggtagaacacccggtagatatgacatgagatatgacgggaggtgggtcgggaaatcgagagcgttctcctgtcttgactccccatcccttccctctcaccacccactccaccccaggtgataaagcctgaaaggtagagatccaacagcgctagcggttgaaacgttttttaaaatagagaaagcgagaggaccgacggcggctccggtgactgctgagtttccagacaagggagctctgtgcaatgaggggcgcacaggagcatgccctcaattccaagaagatcaggtagccggaaaatttattaagcgcttactgtgtgccacctgcgtgttttctgtccaaatcagaaaaggatttggacagaaaacacgcaggaagaaggaatcaacccctggtacagcaggcaggcgaggtaggggtaggagttatgcacgtgtatgcaagcctggatggctgggaagccaacctccatctaaaggcaagcgcggacatgcacatacacacacacgcctcacaagttggattgcaagagagggtgaagtgggcgaggagacccagtcagccgtggcatttgaggaaggtacatttaggccaccgaattcattccaccaactttgcacacttgtcttccttgtgccaggctctgggactcattccttttgagggtaaaagtctgcctccctggactcctgcccctcaggcgctcccacagcccggcaccgccccctcgccattccggagccagcgcgggctaagcgggcctggccggggatgagcggagccaccgtccccatattcctcggtgccccgggatcgcaagagggagccgtggtttccggaactcctcccgcccctccgggcttttcctctgttaggcaggtggcgatccgctgtctttgcctgttatggccgctgccgtcgccctggagacaggtgagtagcgctctgagcctggagtcttcgcagatagaactctccttggcccagacctcttctcccgcttccccggcctccttccaggcctcactcccggcaggattagtatttggacagggaggagagaaggctcttgcagcgtctagaaaggctaaggtactctgcagttttcctaatttgttttgttcgcacatctttgctattcaaacacgaccccaccagcttcccagcgtgggcgagactaagggagaggacttgtgtcttaaagcgtgtcctccttgtgtcttaaagcgtgtccttgattggttttctgcttctcacatgagcttgcatacgtttgaaatatcgtcgccagacctgtgtatcattgtgttacttgtgattcttatatatgcatatgttccatcatcttttaggctctctggagtctcttgttcagcttgcatcctaagtttttcttaactgattcagcacgtgcttttgcgaaacttaatcactgttaacaattgttacaatgcattattaaaataggggaagccacagttattacagcctaccttagagatcactgttaaaatttctacatagtggcccatgagtggtaggtattgtgtctcgtttgtgttgctgttttctttgatgatttctctttacttttaaaggtaaccctcttccatgactgttccttaaagtggtgcgctgtcccaatggaccatgctctagctttccaagctgctagaactgtcagtgtttctcagccttggcactattgacattttgggaccagtgattcttcatcgttggcagaggggagggtgttgacctgtgcactgtaggatgtcaggtggcatccccggactctacccgctaggtgccagtagcacctaatgtgccacccaccccctcccaacaacttttcaaccaaactaaaatgtctctagaggttgccatatatcctctgggggacaaaatcacacttagttgagaaccactgtcccacattctacacacagaagccaaaaggatatttttaaaatgtaaatggcatcatgtcgttcccctgttggaaacccttcaatgttttcctgttgaccttagaataatctcaaattccttactgtggcttagaagaccttctgtggactggcccctgcttgcttttaactcctctcttccgttctgcttccatgtctatataattgcttctctctcactccagccacactggccttctttctgttccttgaacattcaaagctggttcccatccaccctttgtatttgctgttcttctgcctagaatgcacctgttccagatcactgttcattcacacatatctcagattacatgttaactaatcagcaaggccttccctgaccattttatcaaaagaagccacttacttccattctctatcacattacccatgtatttccttcatagtgctaatcacaatagaaaattgtcttgtttcatcattgcttgtctgccttttcaccagagtgtaagctccactagagctgggactttgccttttttactgctatagcccaagttcccagaatacagacagttcccaacttaagatggtttgacttatgatttttcgactttacaatggtacaaaagtgacattcagtagaaatagtactttaagtactcatagaaccattctttttcacttttagtacagtatgcaataaattacatgagatattcaacattttattataaaacaggctttctgttagatgattttgctcaactttaggtgttctgagcatgtttaaggtaggctaggctaagccatgatgtttagtaggttaggggtattaagtgcattttcaaattaccatattttcaacttacaatagttttaacgggaggtaaccccatcgtaagtggaggaacatctagtgcctggcacagagccggttctcaataaatataactcttctccatcttcttcaaacctcaggccaggtttcagtgacctcctctcactttctaagattatttttgcttgctggtgggtttactgtcatttttaaccacatctaacctaccttaaaaaagtgtatggatgggggtgccaggtacaaagacttagcataaagaaaacgaccatttactttgaaacataaacaaaggccaattaataatttatgagtctgttccttgcccctcgagtttttagcaggcatggaatcattccacaggtcattatttcagtttggtctctgttcctaaggggtgaaggttttctgagggctgtggatcccaaactcacctggctcagaggctcaaacagcctctctttgtccatcaacccgatttagacagcatcctgggcctgaaaaccttctgtgctggcttcaagtgaaaatagttcactgggtcaaaagtaggctggtccaagacgcaggacggtcagtaaacgttggctgtgttcagaaactgcggcttggctgtttcttacattgatttatggtttgtttccatgaaaccgaaaatgattggtccacctggcagctggctggctggctggcaactggaggcctttctgtcctggctgagggccctggccccttggtggcctttgggaagcagcatctcatcgggccgttttttcgttctggcgggcggccggcttggcccgcggggtcgggctctccgcgcagtgcagagacgtctccaccctcagggacgaggctctgacgtggcgggaggtcgtttccgtgcgctgcgaggaggattccacgtgccgggaggacgcctcgaggatgcgagggagccgcttccccgagggggagagggagggcccctcgctgcggcgctgggaggtctccacccgccgggacgacgtctccacgcggtgggacgaggtctccacgcggaccgtggacgtctctgtgtagcgggtggtccccacccggggcgaagactgcttggcccctcgggctgaggccattctgccggcgtgagggggccagggaggcctcggggcaccctacagcccaatggtcaccgcaggcagaagagaggaaaactacggtactgccatagccgggagcgccacaacacgatgacgtggaagcaccatggtccttcgaaggctaaaacactggactcctgcccctcaggcgctcccacggcccgggccccgccccctcgctattttggagccagcgcgggtggagccatcccagggctggtcggggatgggcggagccgccccgccccatatcccacagtgccccgggaccggaagagggagccgtggtttccggaacttcgcccgcgtctctgggcttttgctctgtcaggctggtggcgttttggtgtcttcgtttgttatggccgctgctgtcgctatggagacaggtgagtagctctctgatcttggagtcttcgcagatggaactctccttgacccagacctcttccccgtggcctccttccaggccttactcttggcagggttaatatttggacagagaggagagaaggctcttgtagcgtctagaaagactaaggtactctttgcagttttcctgatttggtttgttcgcacatctttgctattcagacaccaccccaccagctccctggcgtgggtgagactaagggagaggacttgtgtgttaaaccgtgtcctccttgattggttttctgcttctcacatgagcttgcctaagtttgaaatatcgtcgccagacttgtgtatcattctgctactggtgcttcttttttttttttttttttttttttttgagacagcgtctggctctgtcgcccaggctggggtgcagtggcgcgatctcggctcactgcaagctccgcctcctgggttcacgccattctcctgcctcagcctctcaagtagctgggactacaggagcccgccaccgctcccggctaattttttttgtatttttagtagagacggggtttcactgtgttagccaggatggtctcgatctcctgaccctggtgcttcttatatgcatgcgctgcatgatcttttaggctctccgcagtctcttgcatcctaagtttttctttactgattcagcccctagcgtttgcgaaacttaatcactgttaacagttgttacaacgcattattaaaataggggaagccacagttattacagcctaccttagtgatcactgttaaaattcctacatagtggcccacgagtggtaggaattctccgtttgtgttgctgttttctttgatgatttctctttaactttagagaaacttctaacttactccttttaatcagggctccgcttttcttagattycgaaggaaggtttatctcctcccactcctagtttaggaagaccatctcaacattagtcaggtttctttattgctctttccttactacaaatcagtattatatacagtgacctttgttttccatgatttttgctgtcttgtctcctagatgatgctggaaatcgacttcggtttcagttggagttggaatttgtgcaatgtttagccaacccaaattaccttaattgtaagttgttaagcacctcattaaattgagtagctattaatgatttctgacagaagagttgcagttcaaaatagtatctacttttacacattytcagttgaatgacattacacttatgctggtatatagatawaattgcgtactgggacttgtgttttgaatccaatgtgtgttggtggtgggggtgttatgtaaatasatcctttatattaggggtaasaaatcacagtttaaggattggtttgacctacakatttttttttttaatgcttttcagttcttgcccaaagaggttacttcaaagacaaagcttttgttaattatcttaaatacttgctttactggaaagacccagaatatgccaagtatctaaagtaagtttaatttttataatcctaagcatgtgtatactttattatataatagatttcttagtttcacattggcaaaaatgtatttggaatctctccacttctttttgttatcaccgtcttaatacaagacaccytcatctctaacttgtaacactgcagtaatctactccctggttatctgtgcttccacttttaccttcctgcccccatctccaccccaacccaaaccaagcaaaacagctttctacacagaaaccagcttaatcttttaaaaatataaatcagaacactttactttcttgcttagaacctttcaatggctttccattccatgcagaataaaatccagtcttttttcttggactaaagccttatacgatctggccctgccttttctgaccttgtcttttaccacccttcccatctcaccaggtttctggtccctaagaactcacaatctgtaaatgtagtagcataagccatgggctgaaattaaaagagggtatctgtaaggaaggtgtttctggggttatttgaaggaggtgatcttacctgagtcttagagttgctgtcttttatttaaggcctcttatttgccaggaacagtgctaaatgcttcatatgcattaactcatttatatatatatatttaccattcaggtcgttcagcagacactttcatgttaaggcttactaagttgcaagaaacatattataaccacaaagcaattcccttttaatggttaaaaaaaaaaaacaaaaaaaacaaaaaaaaccaacccaccttgaactcacacccctgctttgtcttaagcaggtagaaagcaataatgaacctttaaaaaaaaaaaaaagtttgagaggaaaatgtttcaaacttctctcaaagtcacttttctgtgtccaataacaattgactcacgaagcacatacgtcttatgttgcctgcaggaccgtttgcaccttttctggctttttatccatttaataatccaaagaacagacttttaagaaaagtagacttcaacgaatattgtatgtmtgtagatttacagactcagtgttggaagccttagccaccaacaagtttaatcttacccacaacgttgccgagagatggtcatctacactctggaggtttccattgagcccgtgttactctgtcagggacagctgattcgattgttagccagatattagaaagttcttccttatattgtgatataatgtacctccttgtagccccagtctgtttgtccctggatgaagctagaaccattctataccctcttgaggacaacagccttccagatatttacattcaagagagactgcaaattagccccttttgggcgttttattcagtctgcagaagattttagtttttttaatacttgccaacatttaaagatcagaaagttgtatataacaaatgcagatttccagctactytttcaaatctggaagatctagtaaccatagatcttaattctcccaagtcaacaactgggctgaagctgagagcagctgtcactactagctgctttccacctggtggaagagacactttctaccacttggcctgcttcattgatagccagtaggtgccactataacatctctcttccatctatttttctcaactaccctctgccattgtgccatggtgtccagagttctcrtgagttgaggttccctcctttggatatttggcagttgtactttatgcagttcagccaagaactaaacacaggccttcaggtgtggtcagagtacagtgggccagaggtcctttcttttcttcatgtggtcatacacctctgttaattcaacttaagtttatattacttttgggggtgggagtggggaagaggatcacattgttgacttgctggaagcattatgtcaactaaaatccttcagttcttattttcatcatgctgttgggttctccctatgttgtttctttttaaaaacaccaaatgcagaacttcccttttatactgcttctatttcatcttgttgacttgtagcctatcagagtatgattctttattgtcatctaaggtattctgatataatcactgcatgtctaaattctagttattgactaaatgctacttgagaccattctcttggttgtcacattattttacagttgaagaaactgaaccttagagaggttaagtaccttgttaaaggccacctggctggaacataacatcctggtcattttaactactaatgctgtcatgaaagggagttagccagggcaggtgtgaatagagcattctagcataagcagccaacaattagagcaactgtgtatttttagtgtgtggatagcaaatctttgctgtcttggaagttactatcttagaagcatggtattaagccctctattcaatgtggtgttcacatcagtagcattggtttcatttgggagctttttagaaatgcagarctcaggccccactccaggcctaaggattcaatctgcattttaagaagtgacccatatacacattaaagttttagaagcattgctgtagtatcctattttccacactttagtcatttgcatatcacttgtgcaactttggctttatctgcatacttcctgaagggggcctgcccctccacacctgtgggtatttctcgtcaggtggagatgaaagaatgagaaaagaaataagacacaaagtatagagaaagaacagtgggcccaggggaccggcacactcagcatgcgaggacctgcaccagtgccggtctctgagttccttcagtatttattgatcattatttttactgtcttggcgaggygagtgtagcagggcaacaggtggcgagaaggtcagcagggaaacgtgagcaaaggaatctgtatcatgaataagttcaaggaaaggtactgtgcctggatgtgcacataggctagatttatgtttcactttacacaaatayctaactagcagagagcaacaaagcagtattgctgccagcatatctcgcctccagccacagggcggttttctcctatctcagaatagaacgaatgggaatggtcgactttacactaagacattccattcccagggacgagcaggagacagaagccttcatcttatctcaactgcaaagaggcctccctctttcactactcctcctcagcacagaccctttacaggtgtcgggctgggggatgtaaggtctttcctttcccacgaggccatatctcaggctgtctcagttgggggaaacctggacaatacccaggcttttctgggcaggggtccctgcggccttccgcagtgcattgtgtctctggttaatcgagaatggagaatggcratggcttttaccaagcatactgcctgcaaacatattgttaacaaggcacatcctgcacagccctaaatccattaaaccttgattcaatatagcacatgtttctgggggcacagagttggggctaaatttacagattaacagcatctcaaagcagaacaatttttcttagtacagatcaaaatggagtttcttatgtcttccttttctacgtagacacaggaacaatctgatctcttttycccacacttcctatatgttaatgtattttaattgtctgttagcttttatgtcttttcaacttgaaataatttcacttacaaaatagctggaaaaatagtaaagataattcctgtattttsttcacccacgtattccaaatgtgtaacactacaatcagcaaaaatcagcacattaatattattacctaatctacagacctcattcacattttgccagttgttctgctggtgtgctgtatgtagtgcaggatccagtctaggcccgtatgttgcattttgctgtcatgtcttcttagtctcctttcatctcagtggtcttttcttttccatgactrtgacagaaatgatttgtatccttcatatatctgcagtcacatgaagtctatttgtcccactactggtgacgtaaattttggtaacttggttgagggtggtaccgtctaggtttctccatattaagttgctatttttccttgtgtatttaataagtatcttatagggaaatcctttgagactatgtaaatatcatattacatgtattttgcctrttttagcatcttttgaagataattgcctgaaacattttttactgtgatgattttctaattctatcattctgcatttattagtttggaattcgattgtaaggaaktatattcccttgtttcctattattttattaaagaaatttacatccatttagtgtggacttttggattcttatttttagtagaattatgaattagaattatgtattttcttgcgctaagtattccagatttggccattgggaggcccttcaagttggctcctgamtacttttgatcctcccaggaatttttagcactttttcttctggcactacgtaatgttccaggctcatcttgtacttttcctgtcttatccctgaatcacccttttctccaaggaaacctgctccttggaaaccacagtctggtcattgtgtgttcattagtaycacagtgtcattgcttctaggccctgtcagtacacaragctcaagaactatatatatatgtatgtatgtgtatacatgcacacacatatacatgtttattctatgtctatattaaaagccgtaagtacatactgatgttttcaataccagctcagtaacacagggttcattctagcctttttcctttccatgtctataactccttttctgatagccagaaatttggctgtccttatccacagtatatttacttgtccaatcctagagtatatctaatttcagaattggtatatccctgtggacaacaagagtacaatgtatgcgcatagtcctctttcacactcacttttaaatgaaagttgtctttttatccctattgaaggaaaaatgagtaactatcaattaaacacataattactaaaatatgttcatgttcttcacgttggaaaccrctagaagggaatagcatggtttgtccctaaattttcactctgcttaccagttactgtgttgtgtggtcttgagcaagttaatttaatctttctgaacttaaaccttctcrttttcgaaaatattgaacactgacctttgatgactaatcggggaaaaaaccctatgctaccagagtgtactaagttactgttatagaaatggtaggctacaagatcgtttttaagagaataactgaattataccttggcattatttacctaaattatgttgttcattcacttacaaacttaaacccaggtaccctcagtgtttacacatgttagagctgctccaatatgaacacttccgaaaggagctggtgaatgctcagtgtgcgaaatttattgatgaacagcagattctacattggcagcactattcccggaagcggatgcgccttcagcaagccttggcagagcagcaacagcaaaataacacatcgggaaaatgaaaaactggatacaaacgaggcacttaatacatgtatataatgtatttcttttgtacagtgaagacaaaaaaaatgaaaactcttcctatctacctttattatggtagcccctagaacctttagtgtgctttttcatccaactttttattgttaatagactatttctgttaaacctgaattgttctttgatttccctgtggatttgtaaggtgtttttcttttttacgcatttagcataatcagctgattaagaatggaaaagttaggtgctttagaccaaataaggcactggggcatggggtaggggtgggccaccaagtatactgaattctaaggctagctgttcctgacatatagtagggcaagaccatctcctggaaccttactgtctcagatcaactactctaccactctactctaagatgtagtgagagtagcggagtcactgacctctttaaatcataggacaggaactgcataaaggttcttgaattctgcaggacaggaaataactgtattacctgctttgcaaggtggctttaagaatcactgaatcactgtggcctcacttgacctagtcatggcaggacaactagtggttagttactaactggactcttgactttagaacaaacatgaggagcctcaaatacttgtgttcatttgggaaagctaccattgatttgggaggtaccacaaaccaggtgctatgttaagtgcttccttgaattctcattttattctaagaaccttgtttatagaagagaaaactgaggtttggacggggtgagtaacttgcctgtggttacacagctagtaagtggtagagtcagtgtgactgactcccagcttggagttcttcccasaactgggttatagagtctttccggccgctctccgccacctgcctcatcccaagtaaagcacattgagacagctgcaaaacaaactgcttctagtgctcaggagtctgttttttattaaacaaaacaaaactgcctgaattaagcagaggctagattagaggtcatgtgctttccttcagtggtgaggttaggttctacattccaaaatcaaagaaggggtttcaggaatatcatcagttgctttgcagatggagataacttaaaataaaagatactgatcttttgagagatttggaaggtgtgctctgcacctttaggagtttttaggtatttccgtcaccttcaagaatacgttcctttgagcctttactgctatttctgaagacttctttatatcttaaaaatatccatgtattacaggcaaactaaaggttcatgggcattttaatagcactctattgttyagacacatsccagtttttttaacatcatttattgctaacatgaattcaaagcaagtatacagtttattgatactagaacaaatcaggacatcaagacatgattgccatcctaaaatcttaatcttcagagaacaacatttccaccaggttggcctgaagacactcagattctaccagtttttgaggctgtaagagaaraacagtcaaatcttcactacttctataaaacgttattaggagtggaatgagttctgccttgaatgacactcatctttgaacacagaaattaygcaattcagaaactatcatctagttataacaagttttatgaaagaatcaatatatttgctgtaagatgaatcactaacatacttggctcaagagacttaaaccccaaataccaggaagctccacagactaaaacaggagacagcaagcccagtgccctcttcttcccctcaactctttaatttaggatcccaggggcatgactgaactagaagagatgcccttactttttaaccagaattatgaattaaacagaaaacaactgttgatgcaaatgttttaaggaattatgagtcaacctactttctggttttttaagagtgacttaacatgaaaaagacctaatagctagatatttacattatcagtttattgggattggccataggaatggactttcagcagcactctgaacaacaatggaattgagatgaaatgtcaagatcttttcaaatctggatccacagcaagttaaaagagttctgacagtgaattacaggcccagcatatttaaagatacttactgttccatacttaagtagtgtaggcactgctgttactttcaagttttttctgaagtcattatttggatctttccaactattcgaaaagaaaaagtgatcatgaaaaaaatttacttggtttattacagtttgcttaatatttgacatagtcctacatttaattttttagtaatcactgttcttgcaaacacttaaaaaaccttgcggactatggcttaatctactaattaccctgtgcaaagtttcaaagtgtgactaagatataaaagtaaagccagctaagttctgggcttacaccagaccaaattcgttgaattacccttacttaattcaggtgggcattttaaatttgtatttaatagcttctaattgtttaacttgtcagacattaccttgtaagacaaactgggtaagtaagtccctgaggcccttcccgcctaagtatgcaatttgtgcacgtctgcgaggtagattatacattgccacttactaaggcttttctcctacttggcagtagatgaacacacatccttcactaatgtgcttcagcccctctcgtacgactggttcagctttaaaaaaagttgagataaaataatcgcacgtcaactctacaatcaggcacgtataaactgtgttctttcccccttcccccagtcttggtaagcactcagactttaacctgcagctaactgaagaggtcaacacaagtcaggtgttcccttctggtcttagagccacgttaagggtaaggaccaaatcccagtcccgatttgcccctgcaccaccgcgcccgtaacaatggaaagcacatgtatttgctgaccaactcacgtatcctgtaagacactaatggtactgggggagtgagaagttttaaggaactagattccaagatcatccgggtaaggtggtaaaaggaagagcgctcttggcagggcggggtaggatttaatagaaggagacttggggacagctcagattgctccgcggatgtctggaaccaagactctgcctccgctaagccccccttctggccgtaggctcgaccttcctgccatttccattggacagcagcccccgaatcccggcctcaccctgcacgcagtcggggcaccagcttttccccccggcgtccttagaacccgtaaagtaggcgaaaatggtcttgccattgtgctgttccacggcccggtggaactcctcgaagccggacacgctcacctcctcatagcgggccattggcacgacgtgcagccgctactggaggagtgcacgtccggtcgccgcggttgggtcccgcgtaggcggggcgaggctgtttccgggtgggcaagagagggcggagcctgcggaagccagcgccgctgaagactacgggagcctctgacgaccataatccatccgcatggctttttgctctagttcctcagatctttctgcgctagctgcactcccaagcccaggcttagatctaccctaatctagtcccagccccgacctcatggacactggctgcaaaacttactgccttgcaacacctggatccttaaatagttcagggcctcaaaggctcccaagccgccctgcgcctgttgctatggcgactgggcaggcggccggaagcgcggccttgttgggggcccccgttgcccgcctcccagtagccgcgcctcaccctaggccaggtgggctcgggccggggctgggggggattctgggaagccgcatagagtcatggacttgggggagaggagatctgactcggaaagcctttgttgctttgtccccccagttaccttttctgccgtctaggctttacgggggcctgggactgggggcgggttcccgagactgggcgggggtgggatgggtgaggggctcggagggagaaaggctgcaaggccggagcggagtgtgtgagtgcgtgtgtggagcagcttagggagcgaggtgctaagacatcccccagggccgcggtagggaggaagggaactgccctggagctatgagccgggagactcgccgtggggccttgcccaggctgcgccggggagagcaggcggctaagatgccgggtcgctgcgtggggcccagcaggtcggggcggggggttcggcggccgtgggggaagagacggggcgcagggacgtcccgaggccgtggagcaaggcgccgggcgaagccctcggagtgggagacgcgctgtgtgagtgcagaaaggccacagggccgtcagcggccatgggggacgagacaagcggcggagacagccgacgccgccggggcgaatgaggctttgggagctcctgggaccccaggctccatcgaggctgcaagggaccctggggctgtgtgggtgaacggggctgtgggggagcccgaggtggtggggcttgccggggctgtgtgggtgaccgggtctggggaggaggagaccgaagatagaagtccccggggctgcgagagaaaaggtcgcccgggatctctgggccatgagagcattctgcacctgtggctgaaggtgcaggctatgagggccgcctcgggatgtggggaaggaagtagagtcgagctccatcccgtgcctgcaggagagggacctgtcgaaaggggtgttcctggccgagcttcctgggtagagacaagccgcggcggtcttacagggccctgggtgaaggaacaggcaagggggatccctcgggccccctcagggcccacagctctgggcttaggggcagcttacgagagagccttaggcttctgtggacagggacaggctgggagggtgcctcctgcgagtgtgcctggggctttggcgtcaagttctgaaatggccccgcacctgtggaggggagaagctgtgggggttcctgagactggggaggagataggctatgggtttgtctcaggcccttgtgaaaaagaacagactatgggcgagcctgggaccgtggggtggactggggctgtgggagcgcccagagccatggagggagagctcggctgtggcggtgctgcaggtctgtgggggagaggacagtccccgcagattcctggggctctgacacatgaagcagtctgtggggccacccctggcgtatgggggaggggacaggctgtgggggtgtccgatgctgtggaggaggagcctacttctgtgggtgccgcaggtgtgtgttacaggagacaggctgtggaggagacagactctgtgggtatgcccggcccgtggggcacaggatactctgttggggtgccctgtgctgctgaagaggaaactagatgtggaggtgacccagggttcagggaaaggggacagcctgtgtgggtggagacaggctctgggggtgatccagggtcacggggagctgcgcagactgcagagtcatcatgtcctggggagcaggcagcaggttctgggggtgccccaggcctgtgggggatacaacaggctacaggggtacccagggccttggggaaggacacgggctgtgtgagtgtcccagggctgtggggagcgggacagatggtaagggtgccccaggctgtggtggtacctggagccctgggagaagagctgagccacagcgggggcctgggcctgtgggacggacagcaagctcttggggggcccccagccgaggcagtgcctgggcttggagaggagacctgtagtgggaatgttctgagcccgtgggaaaggaggcaggctgtgggggagccagagagtctggggcctccagctttaggggtccctgggtcagtggatcaggaggctggctgtggagatgttgcatgtcagtgtgggaggaggcaggctgtgggggtgtctgagacggtgggcatacccagggcagcagatgtgccccggcaggggtgtgccacagcaggggtcctcatggcaatgggtgtgcccggctctggaaaggtgcctgccagagtgcctgctgctgtgtgggcgtctggtcctgtgtgtcaggaaggcagctctagagacattttgaacctgtgggaaaggactcgggctgccagaatatctgtggcttcggggggacccgtggctcgggaggagctgtggtctggcggggaggaatccgtggcttcagggggacccgtggctcaggaggagctgtggtcaggcggggaggaatccgtggcttcagggggacacgtggctcgggagaagctgtggtctggcggggaggattgtggttctggggccttcccgggcccatgggggaggagacagactattggggttcctgtggtgcctgaggggcctgggcttgggggggagactgactctgggggtatcccaagaccctggggacagagacagagggtcagggctcctgtggccaccgaagtccttctggctcctagggtgcctggttctgtggagctggagcctggtgatggaggcttttcaggcttgtcagggaggcagcaaactgcaggaatgcctggcactgtggggctgtctgcagctagtggggtgcccgtggctcccagggtgcctaggcctgtgcaagaggaaactggctcagaattgtggggtgaaagagagacagtgggcggacctgcagatgccaagggtcccacaaggatggaggtgcccacctcgaccaggatgcctgggcccatggcggagaagactggctctgggggtgtctcaggtttgttgggaggcagacagactacaggagtgtccatggctgtggggctgctggggtctgtgggggaggggaccatctttgagcatgtctctggcctgtctggaagaaggcagactgctgggaggcctgtggctgctagaggttccatggccgtgggagtgcccacagctcccgggcttccagggccaatggtaggggatacgggctctggggatgacggctcaggcatatggggaaggagactggccactgaggggcccacagctgccagggttcctggacctgtggagggggagacaggctctgaaggtgtctcaggcctgtggagaaggagacacggtggagccattcccgaggccgggagggtgcctctgcctctgggggtgcttgcagctgtaggagctcccatggcagggcgtgcgcctgctgcggtgtgggtgactgggtcctcaggagcagaagcggacgtgggtgtctcaggtctgaccgtgctgaggagacagtccacagggggagtgggggcttcagaggatgagacaggaggtgggaatattttgggactggccgggggcagccaggctgtggggacatctcacacctgtgtgcctggggccaggttatggagctgtccaaggtctttgggggaagaaacagcctatgagaatgctctaggcatgtcagggacaagaacagctgtgggggtaccctcagtttcaagggaggaaataggccttggccatttcagagaccacctacagccaagtgggaggaggctggctggaggagtgtctgcagtcagagtgagagggagcaatttgggagagagttatgtgggggaggctagattgaggggggcgttccagtagtgtgtgtagggaagaagttggggctgtgtgggagggaacaggttcggggtaggtttgtcatgggttgcggatgaaggcactggctgtaagggcatctcagcatgggggagagagggttttcgtggagatgccccagggtatgtagagggacaaattgggacgtttcctggagcagtgggaaagggccagattgcaaggagagtcccagaac

SEQ ID NO: 97987 - DNA, 40924 bp, Homo sapiens
acagcctggagcagagttgccaaaccacaggctcccagctgacttgcagcacccccataaatatagtagctgtaagtctaccccagggaacgctgaccaatactctcttctattgacaacatccaggacctgccttttttagcaatcaaagcttgtttacaaataaaacagtgttcccaagttaaaatgtggggaaaaaaacctgataagcctactctattgaccaatggagcagctctgtccatagaaatactcacataccatgcccaagtaagtgtaaataaacttacttacttaagtgagtttaaataagtaagattcaaatgaaagcatccaaaatctaagaaaatcctagtcacctgctgcacttcttggcttgtctgcatgtcgcgatctcatcacaatgagccatcacagctcactgcgacctccacccactgggctgaagcgaccctcccaccacacctggttaagtttttgtatttttagtagagatgggggtctcatcatgatgcccaggctggtctcgaactcctgaactcaagcgatccgcctgccttggcctcccaaagtgctgggattacaggcacgagccacagtgcctagcctagtatcacaattttcttagctaccaatatcagccataaaatgtgagctggggccaggtgtggtggctcatgcatgcaatcccagcactttaggaggccaaggctggcggatcacgagattaggagttcgagaccagcctggccaacatggtgaaagcccatctctattaaaaatacaaaaattagctgggagtggtggcaggttcctgtaatcccagctactcgggaggctgaggcaggagaatcgcttgaaactggaaggcggagattgcagtgagccaagatcgcaccactacactccagcctgggcaaaagagcgaaactctgtctcaaaaataaataaataaataaataataataaaataaaaataaaaaataaaaaagctggaaagaattgaattcatcagtctgaggtatattttttatttgccacaaattaaaactgctttttattttgaaatagtttcactcatcaggtgttacaaaatagtacagagggttgccatctaccatttctccaataactgcaaagggaacctgaggtcaaatggatgtaacacgccacattttagaatttctataccaaaaagtaggtttttactctctcagttttaagattaaaattgtattaaatgattctcaagtggggaaaaaagttgcatcacacagttacatactatgtaccattataactaaatattcccaaatagttttatgtagatcagtaacatactgtaagttagggaataatttatttttgtgttcgagaagtatattctaatgtttggatttatatttttagaaatactgttgtaagacctgagaaattcagaagacaatctgacaatagtgtagccggacaagccgcagacaaaacacctcagacaccgagttaaagaaggaaggggtttattcggccaggagcattggcaagactcctgtctcaagagccgagctccccgagtgagcaattcctgtccctcttaagggctcacagctctaagggggtgcgcgtgagagggtcgtgatcgattgagcaagcagggggtatgtgactgggggctgcatgcaccggtaatcagaacaaaacagaacaggacagggatttttacaatccctggaatctatagacaacataaccggttaggtcaggggtggatctttaactaccaggcccagggcatggcgctggtatgtctgcctgtggatttcatttctgccttttagtttttacttctttctttggaggcagaaattgggcataagacaatatgaggggtggtctcctcccttaataggttactaaaagtagccacatcaagacaaaattatcgtgatctaatatactttatgcattttatggtaagttaccaatacaagatctaaattcggatgcactttctttttcattacttcattttttatagtgcaatgaaatatgtggctaaaattttaagttatctgtgaagtagaagtatgacaacaggcagggcttttctttcgtaaaaaaatctgtgtgcataaattgaactcatgttcagctcttgggaataattaaataagactcataaattaaaaaatcggaaataggttgggcgcggtggctcatgcctgtaatcccagcactttgggaggccgaggtgggcagatcatgaggtcaggaattcgagattagcctggccaatatggtgaaacaccatctctactaaaaatacaaaaaaaaaaaaaaaaaaaattagccaggcgtggtggcacgcacctgtagtcccagctactcgggaggctgaggcagaagaattgcttgaatccgggaggcggaggttgcagtgagccgagattgtgccactgcactccagcctgggtgacagagtgagactccatctcaaaaaaaaaaaaaaaaatcagaaataaccttattattagaaattatgctcaaacttctcctacatgtatttagcatacttagtgaaagaaaaatgtctatattgctaaaaactaattgatccagcaactgagagtacactttggatagatcactcaatctctgttgtaaataaagtttccatgcaaccatgggtctatttctaggctctattctactctttttctaacctcatgtcaatagttaatgattacatcaactattacaagttagtcattcttgaagtctaaatggcaatttcccccgtgtttttccagaagtgtcgtaattattcttggcttacctgctattctacctgaattttaggcttgttaactaaaaatcctgttgggattttaattggaattgaattgaatttataggttaatttgagagaaatggatagtcctacaatgtgtggtctccctatccgtgaacttggtataatctctccatttatttagcttgttgttgttgtagcactttggccttggaatttttcttaacaatcttaatattctttttcatttggtgctaactttgactatcctccactgctgcctggcaaattattacttagccattaagtttttttttttttttttttttttgcagggggacggagtctggctctgtcacccaggctggagtgcagtggtgcgatcatggctcactgcaagctctgccacctcctctgtgaaaccttccttcattacttaggcagagttggtggatccttctcttaaggcctcaccaaccagggtattttgcatacaattgcaagaatggatatttactaacagctgactatatgccaacgcactgagttaagctctgaccatgaactcatataatctccaaaacagccatttaaaatcaaagttggtgctattatctccatttatgacaggataagctcatagagagcaacttgtctgaggcacacagccaggatgagctagggcaagatataagcccaggaactctagcctcagagtccatgctctggtgaatccctttggaagcagttgtattaagaacagaagttgtacttttacattgttggtgggagtgtaaattagttcaaccattgtggaagacactgtggcgattcctcaaggatctagaaccagaaatatcatttgacccagcaattttattactgggtatatacccaaaggattataaatcatgctgctataaagacacatgcacactatttacaatagcaaagacttaaaaccaacccaaatgtccatcaatgatagactggataaagaaaatgtggcacatacataccatggaatactatgcagccattaaaaataatgaggtcatgtcctttgcagggacatggatgaagctggaagccatcattctcagcaaactaacacaggaacagaaaaccaaacaccacatgttctcagtcataagtgggagttgaacagtgagaacgcattgacacagggaggggaacatcacacacgggggcctgtcagggggttggagggcaaggggagggagagcattaggacaaatacctaatgcatgtgggtcttaaaacctaaatgtccggttgatagctgcagcaaaccaccatggcacatgtatacctatgtaacaaacctgcacattctgcacatgtatcccagaacttaaagtaaaattaaaaaaaaagaaaagaaaaaagaactgaagttgtttacttgctctcattcatgcatcccggagaaaaaggtttgagtgcacatcctggattaggcactgagaaaggcactagctggacaggtggtgatgaataaaacagacagtaaatagaaattacatcataataatgtgtcatatattttaaaatagctacaagatattttaaatgttctcaccacaaagaaatgacaaatatttgggccagacgcggtggctcacgcctgtaatcccagcactttgggagaccgaggtgggcggatcacctgaggtcaggagttcgagaccagcctggctaacatggtgaaaccccatttctactaaaaatgcaaaaaattagccgggcgtggtggtgcacacctgtaatcccagctacttgggaggctgaagcaggagatttgcttgaacctaggtggcagaggttgcagtgagccgagatcgtgccactgcactccagcctgggtgacaggagcacaactctgtctcaaacaaacaaacaaaaaacaaaaacaagagaaatgataaatattcgagtgataaatatgctcattagcctgatttgaacacaccacaattatacacacattgaaaaatcacatggtaccccgtaaatatagacaatgatttgtcaattaaaaatgaaataacacttaaaaaataaaaaagtaaaaagtaaaaattacaccaataaatataagaggtacaaattgtgctaagtgccctggggacacaggaaaggcgggaaaacccagggctatatgcatgagagttacaaagggaaaaggacaggagggaggcaattgcaggaggggcttgggagaatgcatgtccttgggtgcaggtcacaggaaggaactcatgagcttgattcaggatgtgttgaattttcgggccgagacacgtccagtctgcggaaggctggacatctgggactctggcatcatggctgggttgaaggcagaggatggtaatcactaaggagccggctgtggttaggccaccagcatggatgagactccccaaaaggaagctgcagaatgagaggcaggcagaggagaggaaagaagaaaatcacagaggtggggatgtctttgcatccgtgtgtctccagtgcccaaaacagggcctcgcggagaagaggtgctcggcacctgtctgttgcctggcgggctgaatgaatacatgggcgactgtctcagtgtcgccttagttgtgtcccttcctctctagagctccgtttccctctgacctgggtcgggcgggcagctgcggctgctgaggctcggtggggcccctccaagacgcgtgtccgcatctgcccgccgggcgtctgcggggtgcagcgtccactggagcgcgacagcccctgggacagaggaggacagtggcctcgcttccctgtgcgatcgcccaggagctccgggccggagagtgcgagcggggaaaaggggtcctgcacctagagtggggcggacgtggcgaggaagccaggggggaccgggaagcgaggcccgcggtgcggagggcgcggggcgtggggggacacctctcggagagacaccggaggggcggaagtaaggagatggaaaggagagggagatcggggagatagacctgagagacccagaggcctgcagagagtttcatccgggacccttcagagcccaggaaagagcagatgcggacgcgggagggcgccttacgccaaagcgggcagcaccagtgaccaaaacacgccccgcttggcagccccgggacgcacctctgcctcggcagcgcaggagaggcttggacagcgcgagatgctagggcccaggctgcccctagagggctggcccgaagcgttggagtccaaagacgcctcccaccgccgccgggtggcagaattgggggcaggcgcgtcccacagaccccgaggggtggccccgccccagggccgcggggaggcgcccccgtgcggggcggagttgtcaccgccccctccccaatccccggggactgtggccccttcttaagcccgcggcgcctctagctgcccctcactcgtctcgcccgccagtctccctcccgcgcgatggcctcggcgctgagctatgtctccaagttcaagtccttcgtgatcttgttcgtcaccccgctcctgctgctgccactcgtcattctgatgcccgccaaggtcagttgcatctccaggcagccyttcggacacccggcgtcctgtgcccactaacgggcaccgatcccgggagccctgagctggagcgcacggatttcgcggggagcacagctctcccggggcgcgcgcactcaggagctccaggtgccggatgggaggtgccctgtaaagaatctgaggggcatggcgaccccagggcgcaccacccttggggtttacagatcccagggcgcaagagccgtccaggcaagcacggaaacctcgaagtgagcacagatctcagccacacagatcccagccttaggctcagcccctggctccgaatcgaatctcccacagtgcataaccctgtttccccccaaaatgccacctgcgccaacagggaacctgggagcttgcctttccctctctctctcctgtcttttcccttcgccaaagaagacttcaagctgtaggtggcttctgccgtcaggagggacctacaggaaaaaaatcatcacccacgtggatcctgcgctgtctttgccactctctggcccttccttgggccttagtgtctctatctatgatccacattccttccaacctggagagccacatctgattcataatcctgctccaggctgcaggcaggttggggttggcctgctttgcctcctgcctgctggggctgtagcaggaggcgggacacattcccagagctcgcgccttgggtggcaggacctggagttgcagggaagcttcctcccaggccctagtctcctaatgcttctgtgagggagagagagaatgaatggccttggccgcagggtgggcgcaggctccactgggctgtgcacagccagtttggcggaggcccaagccctttgaagccttttgtggctgctggctgctccttcctcgttccttctttcagccctttcactctcagcccagacaggaaacctccagctccccacctcccctccccaggcaggtttgggaaacagaggagctcttcaggggatgctctgggggggagctctagaggaagggagtgcactggggtgtcaggaagccaacctgcaagagaactggacttccaccattctgtcatctgtgtgactttagccaagtgcctgtgctctctgggccttggtgttctcatctgtacaatggggctaggtggtttggttctgacactttaaggctttgggaatcaaaagggattaacgttagttcctaggatgggggagggggagactgggaggagcccttgggtgggcctagcacaggccctggatgggtcaaggacagcagatccaactgtggaggctgtgcagttgccacaccaactgtgggcagccacacttcctctgtagcaagaagtctggggttgttattgtccaggggaagtagccaggcaggagagctgcgatttcagctctgctggtagggagtgatgttccctggaatgattatagtagcttggctgaccttcctgccacaggagaccccactcacacacacacacatacacactctctctctcacacacacacactcacaaacacacacagacacacacacaaacacacagacacacacaaaacacacgcacaaacacaaacacacacaaaaacacacgcacaaacacacacccaaacacacaaacacagacacacaaacacacacacaaacacacacacaaaacacacaaaaaacacaaacacacacatacacatacacacacacacacacacacaccctgaactggaaaccctaactcagtgtgtgtgtatgtgtgtgtrtgtgtgtgtgtgtaagagagagagagagagagattaagctgtcctttgagtgaggaccagggaggggaagaagagaacccagggagagtccttccaaaggctgccttcacgagctttccttctggcggggttgggtgaggaccctggaccttgtcttcttgttttttccctttctgcctgttttggtcaccctgcccccaccctccatggccgccccattgtgcaaggaaacccagagggtacacagcacgggcagggcagctgggaagctggtgagaagctgggaggaccttggcagcctgagcaacacagtccttgccaggaggtgactcccagggcacgccaccctctgccaacacccaggcctctctcctcaccgactgtctccagttttcctgtctccacctggattccctcctggcctcatctctgctccactctctctatccttcctctgggtctttttttaattraaaaaaaatttaatgaaataaatgatagatttcttgtatcacttattttattaaaatgtaaaaggtttcttttttgcaaatctgtaagatataaagtaaaaataaaagtacactcaaatcccataagttattcacattttgatgaacatctttccagatgaatctctctctctcttcccagacacacacacacacacacacacacagtaggttttgcctgcattttttcattaagtggtgtgtcaggacaccctgccttgttaatgttgaacttttctaacatccgcttcccatcctgccctctcccttgacactgtggaggcattctagactaggggggtcaagcctgtygacttcagggatgargcacctcctgggcttctaaatagtggcgcggaggtgagggggcagttaaccttgtgtctcgtcctctttcctagtgggtctgcttgactcctccaggaacgcacagtgtacattggtgacgcacgccacctactgcttctaagtttagagaatcaaaagttaccgaggactttgtgcgccatatgggaagaatgagcactcttaaatccacgatttgcagatgaagacatgaaacaagaggggacagggaccaggattgggagcaggaggagtaatttatgagcgacattgtttagaattgctatcacttgatgatagtaagaagcaaactaatttttagctaatattattgttttaaaattctctccaatgcgccctctcattgtctgcccctggaggcatcattctgatggcctgcccagggtacaccccgacaccaagccccaaggaagttagtggctgccaaaggccagacagtggctgacagtgggcgccaatcatatctgtctggtgtcaaagcctgggcttccagtcacgctgctgttccgcctttagttcagcggctgtcaaccagcattgaccctttctcctgccctcaccctgccccacaacaggggaactttggcaaagtacagagacattttttgctgtccaacctggagacagtcttactggcatctcataggtggaggccagcggtgctctaaacaccctgcagtgcacagctccyacaacaaagcatcatttagcccaaaatgtcagtgtgccgaggctgagggaccctgcctcccagtagggaggtgccctggtttgctcgtgggatgctgaaaaaagatttatttttttgtggctgataacacaaccctgacaaagaatttccaagtcttcctgcactgttttgtgcaaataatacatacgctcttctgggtgatgagaagcagggattgtgtacaggtgcatctgttcttcagcagcattgtcagagttaaactcagatgaatgctattgattcctttaataaacatttgcaaagatggccgggcacagtggctcatgcctgtaatcccagcactttgggaggccgagacaggtggatcacgaggccaggagatcaagaccatcctggccaacatggtgaaatcccmtctctactaaaaatacaaaaattagccgggcgtggtggcgcttgtctgtagtcccagctactcaggagactgaggcaggagaatcgcttgaacctgggaggtagaggctgcagtgagccaagattgcaccactgcactccagcctggggacagagcaaggctctgtctcaaaaataagtaagtaagtaaataaataaataaataaataaataagcaagaatttgcaaagatatcctaagtgttgggcctgttctggatgctgaggacggtgatctacaaatacagcaggttcttgaataatgttgattcattcaatatcatttcattataatgttgatgagggagggaaaaaaaaggaaggatcccttgagcccaggagatggaggttacagtgagctgtgaccgtgccacttcactcccacctgggcaacagagccagaccctgtctcaaaaaaaaaaaaaaagaaataaaagagcgagagagaaagaaaagaaaatgattactggctggggccactgtctgtgtggagcgtgcacattaccctcrtgtccacatggcttttctttggctagtatggtttccttccacatcccaaacccgtgcacgttaggtgaattggagtgtctgtatggtccctgtctgagtgagcgtgggcgtgcgtgtcagtgtgcattctgcaatgggatggcatcttgtccagggctggtttccaccttgtaccctgagctgccgggacaggatctggkcacccaagaccctgacctgctgtaactgggtaaataattatctaacttgttttcaatgtttcttaagtatatgtatagctcacattcccttcagtgtttaatattggaagtgttttggtctttatttaagatctccgtgatgtttttgtgaccagaaatatgctgtagaaatttaactgttgtttctagcaatttgcctatgggaatattggcttatgttgtttcgcttacgcattgcaatttccaaaaaccaatcaatgatgttaagtgaggactcactgtactgtttgtgctttcgagtcacgcactggttgtggtggtagaaggacagttgaggaaacagtgacaactccatatgctaatggctggggagggtactcagaggaagggcacaaaccagactatagaagaggcgcagggagacatctaagaaggaactctgaggttgggcgcggtggctcacgcctgtaatcccagcactttagggtgctgaggtgggcggatcatgaggtcaggagttcgagatcagcctggccaatgtggcaaaaccccgtctctactaaaaatacaaaaattagcagggcgtggtggcaggtgcctgcaatcccaactccggaggttgaggcaggagaatcgcttgaacccgggaggtggaggttgcagtgagctgagattgtgccattgcactccagcctgggcaacaggatcgaaactctgtcacacacacacacacaaaaaatactgatgaaacataaaacaacctagggaggtggctagttttatcacataattattattacttttatttcaatagctttaggggtacacgtagttttcggttacatgaatgaattggatagtggtgaagtctgagattttaatccctccctcctatcccaccctgtctgcttctaagtctccagtatccattcgaccacgctatatacctctggatacccatagcttagctcccacttataagggagaacatgcactatttggctttccattgctgagtcacttctcttagaacaatggcctcctaggcggcaagagcgacactccatctcaaaaataaaataataataaamccaaaaaaaccaggtattttattcttcttctccttctcctcttcctcctttcttttcttccttctccatcccccttcctctctttcttctatcccctcctcctccttctcctccttctccttctttctccttttcttccttgtcctattcttgatcttttcttttgagaggcagctaatccaaggtttgagaagatgaaagaacgtgcctagaaccacacagctgggaaggagggagscagggaggaggggtgggaatggggcaggagtcctttgcgaatagatccctggcctgacccgggaaagctgtrctgaccagggctggggaacaagatgactttgaggggaatccctctgagatcagcactgtgtcttgacaatccatgccagccgccgtccggagygttctgggggtggggagagggaggcggcaacacgctgaggcctcaggactgtctcttcagtttgtcaggtgtgcctacgtcatcatcctcatggccatttactggtgcacagaagtcatccctctggctgtcacctctctcatgcctgtcttgcttttcccactcttccagattctggactccaggcaggtgagcagacccaagggatcctggtgactttctggttctccccttctctctttctctagtccccactgtgagtcgcacaggcctgggggtgaccggaaaaccctcatttgtggattctccctggcagggagacaccactcgagcctgcatccccactccaagctgtccctgaagtcagcatctggggactgggtggctctagtgtgtggcaagggacagtcctgatgaggccttcgtgccacgctccaggtgtgtgtccagtacatgaaggacaccaacatgctgttcctgggcggcctcatcgtggccgtggctgtggagcgctggaacctgcacaagaggatcgccctgcgcacgctcctctgggtgggggccaagcctgcacggtaattacgccttctctctcttgccacgtggctctgcatgagccccagggctggaagggggtggaggatggcacagaccaggccatccactggtgagggctggccatgggcttacctggacttggctgggtggggtgcgttatagctttagtgggagagaccagatgcatgcgtggtggtggcacatggtgagcagcagtaagtaagggtcctcgaatccagaggaggtgggtcagcaagagtccttgcaggcttggaaggctttctgggggaggcagctagctgcagggttccaccgggaacaaattggatagaggctggatcaagctgtgtctgataggataagggaagcaggccagaagtggctcaactacccagctcatggggaagcagaaaggtcctctctccaagctggagcatctattcccactgcaaagaagcttcttatcttccccgatatcactcagtaccccagcttctctctccatttccaggatctctcctgccaatctagctagccatttccagctaagccatggagtcaatataatcataatcataaccataatcaatcatgatcataatgggtatattgagtgtctacaaggccccaggcatgataccaggagcttatgaattgcctcrtttaattcttaccacaactctgagagctgagtattcttactgcccacattctgtggatgagggattggaggcagagagggataaagtgatttgctcatggacacacggggattggacccagcttctctgataaggcctgtgtcctctctaatcagaaactcagggcatatcttccttttgagacaatgtgtcccctcaatgatggcacgtccttggcccagccatcaggagtcagctgctggtcagtttacggtaaattcctcctgaggcgcccctgtgtcaggggctgtgctagaccctgagcacacacagacgctagcctgccctgcaggcaacccatgcccggggctcccttggtgcctcagattcccctgagcaggggactttgtggctctctgatctgttacacatcctggcattgattccttccagtaattgctttagcatcaaatcaaaagccatcatattttctagaaatgagagaccccaggaaagtggacctcagggccctcagaattcttctgcttggctcccttgagtggccagcttgggtgggaggccactccagtgggtttcattctgcagcatgctggagagcttccacttccaaacccaagttcacacatgcttctgtatccttcctgccaccttgctcctctgagtatggtctccggttgtccaaggcactgcctgtcctgggagtcacctgtatgtgaggcacccttggtgccttgagatatcatgtagaagccttggttcttctcagacaactccattcatgcaaactctccccctcctcctagcctgggtcccrggctttgtttttttttgggtccataatgtctgcctgtgtggacagcagcttgggccctggtgcagaacagctcctaggtcccttcttcaggctcctacccctgcccctgctcctacccccaggtgaattaggagccctgaggaggagcctggctgcagcgaggcccacagactgagagtagctgagctccttctgtccctagccttggacagctggggcatgtagagccacagagcagagtcaggccctgccctgctcacagcccaaggagagagcagacatggaaacaggtgctttgaacccagcacagcgatgattagagtagggggaaggattgagaagggtcaggccagccccacctggtgcacacactgagagcgtggtcccagaggagggatgttgtttgagcaggctctgaaggaccatgaggagtcttcctgatagacagcagagaagggagcaggggttacaagcaaagggagtgtttcttctgaatactgtttgtgtgatagctccactgcagcatggaggggtcaaagtgtatgtgcggggcggaggggagatggcagggttggagtggcagccgggagaatagtcacactttcccaagctccctccccagctcaccctacccctactctgcttagcccttctgaacttctgagaggtgcaacagagtttgggggtgggtgggaatttcctagccagaagtgggaagctggggctgcctgcacataggggtattccagcacaccctagggcaagctcatattgagttggcaccatctggatgcctgggcttcccctgctagatggtggggcaggggtgctccttagaaccacgactggatctgaggcctcttggtaaccccagaagcaagcagagtagacatcagtcatgggtgtgggagaggcaggagggagagaggaatggaggaagcaaagaagggaaggagggagggaggggaggctctaaaaccgtcatccctattccaatatctgatcttgaattggcctcaacacctgtgcatccctgcaggggtggacccagtccccagttgcttccyagggagtacgggggtggggtggggattctctggctttcctccctgyccctcctctgcaggctgatgctgggcttcatgggcgtcacagccctcctgtccatgtggatcagtaacmcggcaaccacggccatgatggtgcccatcgtggaggccatattgcagcagatggaagccacaagcgcagccaccgaggccggcctggagctggtggacaagggcaaggccaaggagctgccaggtgagcccctggccagggcactgccaggccacaacagcagccttcccctccctctgctggcaaatgctttggccacctccttctccctgtctgcttcccggagccctcctttaaacacgcatagagaaaaaaaaatagaaaatactgttgtcctaagttttaggaggggattattgcayacaacttagatcctttaatagagctttgaacaaagtctcacmctcagttcccatcagttgcagaaatcagtgtgttcacctgatyattcatttgggcatctttcgagcacttagggatgcccctcactccttgctactcctgctcatcctcaaggaggccttttctgacctcctcgagcagctcaaatccttccactctctgctcccataggtctggggcttggcgtcccatgcttgcttccctgctaggtgcgaagctcagggaagacragtcagcatctaccttgccgtctgccgtgttcccttaccatccccagcccagtgcagtagagtcagggtctgtggctgacggcctgattgccagaccctgggcaaggtcctggggcttacagagaggaatcgggcacatccctgccagcaactcttatggagcccagtgggrcagctaaatcagcagagctgggatttcccaatcctcagrtcagcagcagagtcaggacctggggctgggtgggcagcccccatgactggctcagctaacagcgctgtgcccaccacagggagtcaagtgatytttgaaggccccactctggggcagcaggaagaccaagagcggaagaggttgtgtaaggccatgaccctgtgcatctgctacgcggccagcatcgggggcaccgccaccctgaccgggacgggacccaacgtggtgctcctgggccagatgaacgagtgagtccttggtcgcaccttctggggacaacgaagtgggtaccggggctggagggacctgcccacctctctctgctcctctgcagagtcctggaaagcctcggggcagccagacctggcctgggagcctggcaggggtggaaagatgtggccccatctagcctctgtgtcctggcacccctgtgcccacacagaagccttagagaggatagggagctgatgtcaggggagctaacgtcccagtctgctttctgctatgatgcaagacccaccacctcccctggggtcagggactctggctcagagagggagtgtggattgaactctgagctaaagtcatggcagatgacaatgtacttccagacgctgggtccttggttgaaacttgtagaaaatagacacctctaaaagactccccagcactccctttgctcactgcttttggtggctaatggtgatggccccatggcatccgaggtctacagatggtatgaagggctggggttgggtcattcactgcttcactgcttcgttatagtccccttgtgaggtatcaggtgaaccatgggatggtttggaactttctagccttggccacaaagggatgcaggccatgaggaccccaagagggagagaaacctgggccctgccgcggggtagtcatggtctgttgagggtggcaagatgcctggggcttccaggcatgtctggtacataaatgtactaattgaggtatgtactaattgcagtgggcaggcacaaaaataaggtgatgccatcctttgcagacaggagcctggacaggggtggggagggcagtgggcgcaggagctgggaggtggaaaggacaggtctggagcctggctgggcagaaacgtgaggttcaacaacccgtttgttttaatttcgggagtgttttctgtaatgatatccttacagttctccagtaactttctttgggaagagcagcccgtctgggctgagtggggaaagctctgcgcctgctttgacactcttgagctaaagggggcgcccctggggctagcagagccccggggatgggaggcggggcctgtggtggaagtgaccctcctccagcctccgctctgggaagcttttgagatttcctttgctaagtggggggaccgttctttgcagaaacscacagagcgagattgctgaggtctctgcagatccccaaagatgtcagccaaattacatgcatgtgtataaaaggtgtatttttcttttttttctttttgagacaagtctcgctctgtcgcccaggctggagtgcagtggcgcgatgttggctcactgcaacctctgcctcctgggttcaagcgattctccygcttcagcctccctattagctgggattacaggcgcccgccaccatgcctggttaatttttgtatttttagtggagacggggtttcaccatgttggccaggccagtcttaagctcctgaccttgtgccccacctgcctcggcctcccagagtcctggaattacaggcgtgagcccctgcgcccggccacaaagttgtatttttctggagggatgggccataacttccmtgagactcttagcaaggcctggacacacagaagagtcagtgggtcatttctcggccttgtcttgtgctgtggccatgttctgaggctcccactcgattaggggacaatgcttggcaatggacttggtggctagacctcaggaggatgtggcctccacacaggcgcgcctctcagggcccagctgctgctccgtccccacgcacagggccaggctggctcccacagctcagcatctgaggtgggggccggtgtcttcttgtaggttgtttcctgacagcaaggacctcgtgaactttgcttcctggtttgcatttgcctttcccaacatgctggtgatgctgctgttcgcctggctgtggctccagtttgtttacatgagattcaagtaagtttgagctgctcacagcctaattatgcctaattatgcctcaaagctgcagaagagccctcagactcaataggcaggtttacaaagtccttcgtgtctggccctgatctttctccagccctgtctcctgctagtctgccctcctgttccttcgaacccaggctgctcactgagctttgtgcacacgtggtcccctttccctggaatgccattctctaccttcccacctcctcagccttcaaggctagttcaaatgctgcttccctgacttttccccacccccattccatctctgagcggcccctgggcatatcacaggcctgtcctttagtatctgcatttggcttccggtgactttgaattcctccagaaccactctgatgctgggcaccccgcacagctcccagcacagggaggaagagcaggcaggttaaagcaattaaagataagctggtccccacgtgccagttcgacattgctggacaagcttcctctttgccgtgtgggtccatcaggccaggtcaccgcaaacctgtgacttagctctgagctgagcgcatacgctctgtgcctcaatgcayggggagtttaagtcgagtaaaaccagcagtgattatgaccaaatccatccaaacccagacatttactgaatayctctggtgttcccagcagtgtacaggtcctagaaagtttaccttcctgttcctagcacacaggcaagttcatcaggggtcacctttgatggcagccagactttggacagaaaccatgacctgtggctgacaaatagctaaaaaaaagttattgtttttctaaaacacacaaatttatctgtggtgcaaaggtgatcaggccacaccaggatagaaagtactcagctctgagttaagtgcctgtgctctgtgcctccatccacaggaagttcgagccaagtcaaacyaggggaatttgtgaccagagggaagagactgcagagctcagaggcaaaagtgcccacggaaacctgtgattttgtggggaaaatagggaattttcctaagttttcttctgaaggaggaactgttttgaaaactcccattaaaaagttgctatacaggccgggcgcgatggctcacacctgtaatcccaacatttttggaggccraggtgggcagatcgcctgaggtcaggagtttgtaaccagcctggccaacatggtgaaaccccgtctctactaaaaatacaaaaattagccgggcgtggtagcccacgcctgaaatcccagcactttgggaggccaaggagggcggatcgcctgaggtcaggagctcgagaccagcctggccaacatggtgaaaccccatctctactaaaaatacaaaagttagctgggcatggtggcacatgcctgtaaccccagctacttgggaggctgaggcaggagaattgcttgaagccgggaggtagaggttgcagtaagccaagatcatgccactgcactccagcctgggcgacagagcaagactctgtctcaaaacaaaaaaaaaagttgctatacatattcaaaacaatcataatmatgatagtaagaatgacaatattaatgatcattgcccaaaccccactctgtcctgcccatggacggggcaggggaaactgtttgcatggctgcctggccacccagcctggctttgacagtagctctctttgccctgcctcttgaatctgcaccagggccaaagtcctgttcatttgttcacatccgtcgaacaggtctctcaggagatggtcctgaacctgctgcaggtgagcatctgtgtctcctcatggggcaacaggaataataatgaccaacatttattgagtgctcatcatgtgccagacatgatttcgagcgctcttttcctttctttattttattttattttattttatttatttatttatttatttatttatttatttatttatttatttttgagacagtgtcttgctctgtcacccaggctggagtgcagtggtatgatctcggctcgctgcaacctccaccacctgggttcaagcaattccccctgcctcagcctcccaagtagctggaattacaggcacccaccaccaccatgcctggctaatttttgtattttttagtagagatggggttttgccatgttggccaggctggtcttgaactcctaacctccggtgatccgccctccttggcctcccaaagtgctggcrttacagatgtgagccacctcgcctggcccaagcactcttaaacttaattaattttcacaacaacctgcgaggtcagcactattattattattcccaatttacagacaaggcaactgaggcatggagaggtgatgtggtcaacacagagctttgtaacagggaagtagggggactgagacttgaacccaggccctttggctcccactgcatggcatcccctcttggggaggctgagggttgctgtccttagttgcctccagacctaagcatgaccaggtgtcagaaacactagttggggccggggctgccctagaaccccaaggcctactgagaaagaggagggagatagcatggcgccgaggccgcaagggcaccatcagcttcttgtctggccagaggcagatgtcaggcccctggagactcacagccagaacctgaagctgagtccacccagcctggcacggccttcatcagcttttgttgactggcgggggagcctgagagtgtctgcagcagggggcttctgagcatgctcgtggtggggtgcgtggctgcagtccagtcccaccccttccccttcccgacgggccactctagtttggacgcatgcagtgtggctggccggggtagctcacggcagctttgttttggctccagatctggaaggtagaggacagcttttacattcggtttgagtggtgggaacagtgctctggcccaggccacgtcctgccacaaactaagacctggtggtccctgcctgcctttgtggcctcatggacctccccacctgaggccagggagcacctgtctcagcggcaggaggcagctccactgtcagctgttgctctcactagagttcctcatctgaacgatcctggagaacgaggttaagttcttggcctctagcctaatccagaacaactatcttgctgaagagcctagtgcagcctcctaggctatatctagccaaaggggccagaccccaccccaggaccaccaagaactacatgggatattattactggttatacctaactgtcccaaccaggcttacctcctgtaatagccatgagggttctttgggacccctgccagggcagaggcatgcaaagctcaagaatctctcccctcttgttggctctgcaacatattcagtccaagttcaccatggtgcatcatggtgaaggctgttctgctgcaggaggactctgtggtccccacccctgaccctgacctaggcccctcacaggccaactggatccatttacttgcatctcatgccagcctggtcatcaccagatgaaattaacccagagatgagagcaaagctgctcagcacgagagactctgaaggcttggcggtaccactgtggggcactggcattggaagactgcatactccatgcagccccagagtctgcagctactgtggtgttggggatgagctgccagcaccaaatgcaggctctggctcctgggccactagtaataccaaggtcaccccttatgctggaaacctgaagcccctggctgagccccagggtctctaggaygacagttggcagcagagaggtgcttggtagagcacaaactttactaagccaagggtgtggcagcagagaggccctgtcttacaccagcagagccatccctgtgccggatgtctagagagtgtccctagcgggtgaccctcaggacacacggccttgcccagcagggagatcctagccagccgtgtagacctgaggtcccatcagtgttgcctccttttctgacccctgagcaccccagaaagctgtgacctgatgtcctggtgtccccatgttccaggcyaagccaccatcacaccaacacttggccctcacactctccaaggctgttcacatccagcactggcttcaggaatgagctcctattccatcaaccccttccctcctatgattatgtctcatggcccccggaagggctctcacgagggagggctctccaggacaatactcttggccttgcccaccccttcaaaccaacagtggctggaactggaatgtgtgaatggaatattcagcataccttgaggccttagtcctatgcacagtggccccagttatcccccctccacagctgagctcccctttacacctcctccaagaacctcctctcctccctgcctcctcatgccaacgccaccttaggggaggccctgcaggacaccctggacaatggacactggtcccaagggggcccatccaggatgggggtgccatcctgggctgtcttccttcttgccctagccatgcttgctgctaaccccagggtctcctggatccctaatcctgcacctccaactccagggaacacaaggacccattctgcccctgactagccctgtctgccagggttcatactcactccctgcrtctccctgagccaccttggtgatgggggttggcatcccaacaccatcgaaggcagctccaggctgaggtggaaggaggaagacttgggaagcatgtgagggagccctgttcccaccttgcgcaggctccgaagctccttatggccttcccccaggtgaccctggagcagccagtctccaggtgtctgggcacctgccgagaccctctagcctctctacagagacttttccctagtacattctgggatggaagaacaggagagggaaagaggcaggaagggcctttctccaggccccatagcaggcgargacagcattrtgtgtctttttgctacattctgctgtagaacatttaggctccatctgaccagcacctgagccaaccagtctgccctrcccttctctcatctttgcattctccagttttaaaaagtcctggggctgcgggctagagagcaagaaaaacgagaaggctgccctcaaggtgctgcaggaggagtaccggaagctggggcccttgtccttcgcggagatcaacgtgctgatctgcttcttcctgctggtcatcctgtggttctcccgagacccyggcttcatgcccggctggctgactgttgcctgggtggagggtgagacaaagtaagtcttggattcaatagaaatcgctggcttagggccaggcgcgttggctcacacatgtaatcccagcactttgggaggctgaggtsggtgggtcacttgaggtcaggagatcgagaccatcctggccaacatggtgaaaccctgtctctactaaaaatacagaaaattagcgaggcatggtggcacatgcctgtagtcccagctacttgggagactgaggcaggagaatcacttgaacccaggaggcagaggttgcagtgagcccagatcgtgccactgcactccagcctgggcaacagagagagactccgtctcaaaaaaagagaaagaaagacaccactggcttagtgcmctagtgcctaaatgctgctggtctcggctacaggtggcaagaggaatgtgggccaggcactcatgcttggtcaagacttttcctcttttgggagctgggtttcagagagcactctgttggtttcatgactcatttttgttttctgaccaagctccacaataagaccctaatgtgttcctgtggtatcctctcctccctgagtaggctgagcagaaaatccttggccaggcagggtggccagagctgtgatgagagagatttcttgggctaggagtagggttcccagagctctagtttccaaatctctgctctgccatcttccctttctcatcttcacatctggtcaaatccctccaaaggcacacatctagggagcttcatagacagagacttggcaaagggggtacatgtagtttctctcctggctaagacgttgtcagaatggaagaaaggatgagaaacatgtacatcctagaaaaggcagaagatgtgggcagggagatgctggtatgatggccatttcgttttgaaggtcggcttaggtcagcaccaaagtcttcatggtcaccctggtgaacccagacagaattctagagaacctggtcaagaagaggtcctgaaatacacttatggagaatgcacgctgagagggggaagtaaactgcttaggatcacccaaagttggtggtcaagagtgtgggcatcttgatttctagccaggattcagtctcccataccactcttatttttttatttttttgagacagagtctcacactgtcacccaggctggagtgcaatggcatgatctcaactcactgcaacctccacctcccagcaattctcctgcctcagcctgccgagtagctgggattacaggcgcccgccagcatgtctggctaattttttgtayttttagtagagacggggtttcactatgttggccaggctggtcttgaactcctgacctcgtgatccgcccgcctcagcctcccaaagtgctgggattacaagtgtgagccactgcacctggccaccactcttgaccttgacttttaaggctgtgagcctgtttctttgcatagaagcatttggacacagaactgccggagttgtgatgggtttgttgagtgactgtctctgtcgcagatgagctgtgcttttccccacctaggtatgtctccgatgccactgtggccatctttgtggcyaccctgctattcattgtgccttcacagaagcccaagtttaacttccgcagccagactgaggaaggtaagtctcctgttctgatcgcccagtcatcaggactggagccctggaaccaaagggtcactatgggatgccttgggccctagagggagaaaatcccatcatatccaagaggattggctacaaaagcctgggaaacagtggctttcaagccaccggtggtattatttagtgcaaaatatcttttttgctttttaacatttgaatttaacatttgaaattttatttatattacaacaggaacagaaaatgtttcaaattttccataacactgatttccattcagcacaattttttgttttctctcttcctcccagtctttgctaatatgcctgtatattacattataatcaacacacacagtttgaatcctatttgtttgttgtttcttctaccacttttgattgatattacactataaacatttcccactattgctacagtcttcaaatatattttctctaataatggcattatattgcgttgaggggttgtaatcattctcctgttatagaacattttggctgttttgaattttttattttcataaattaatgttttcttgcatatagcttttcctttgagggtattttttctttaggataaacttctaggagtaatattgctggggtgatagaatacaaagtcttaatggcccttaaaatgtatggccaaattgcttttcaaaaaggtcataccaatttacgatgctattggcagtgtgtgtaatagtttgatcatatcctcaccagcaatgtatatattattgtaaactttagctaatttataagtaggagatggtacctcattgtccttattagctttattcccccttgattagatttcttttgtcttctaatgctgctctggtgtgtgtgtgtgtgtgtgtgtgtgtgtgtgtgtgtgtgtgtgtgtgtttctttttcttcccagaaaggaaaactccattttatccccctcccctgctggattggaaggtaacccaggagaaagtgccctggggcatcgtgctgctactagggggcggatttgctctggctaaaggatccgaggtaacttctccagccacaggctgcccagagccctcttcttcgtcaagagggtggcgtttctccacccttccatccctgggcttgtgtgtttctgtgcctgcatccttcgtataaccgcacattccttgaggacatggactctgtcttgtcatctaggaactctacaccacacacagggcctggaagacagaaagtaacctttgagcgattgcaggaatgagtgaatgagtgaccgtggttagccaagagaggcagaggacactgtcagttaccctctggggcttgatcacaataatctctgctttgatttgtctgagggaaatctttctttccaatccttgtcaatattgtttgctactacttttggtccttctactggctayttaacatggtagctacttcaaaatttttctttagctaagtatgtagcagygtaggaggtgaggaacatgttggaaaacacacaaaaatataactttctttacctccttctttccctcctggggaagaaatgagccagagggagggatgagctagcttgctgctgctgtcctccaaccaaccatctacctacccaagtatccaggagtgtaatagacagacttggtctagttattgctgtttcttcaatatctaggacacagcctggtgcctagtgggtgctaagtttttgcggaggtgaacaaatccatccatctagtcacctctccatccatcatccatgcatctattcatgtcttcatccatccatccgtccgtccatccgtccrtccatccatccatccatccatccatccatccatccatccatctgtccatccatccacccatctatctatccacccatctatctatccatccatccatccacccatctatccatccatccatccatccatccatccatccatccatccatctatccatccatccatccaacattcctattatgtccctagtgttakgccaggcacagagattacagaggagattgagatacggtccctgttcgtggcagacttcacagactagggaggggcacatatatgaaagggcatttcaggaagtagcacacgagcaagggaaaaatgtgaggtatttagctgaggagaagtagaagatgaggctggtaaggctaccagaagccacttctctgagggccccaagatagaggggtgtggacttgatcgtgaatgcagtagacagccactgaaggactgaggccagggggtgagttggtcagatctgcacatgaggaaatcactctgatgtctggagtgggggcctgggctgggcagggcttggaggagaactagctgagactctgcagccttccatctcactcaggctcagaactttggactctgtggacattctctcctcctttggcccccagctcagcacagtctccagctttacttcggactcagactattcctgctcagccttcgttgctgacttctctgttctccctgaaacaggagtgtctgcccrggctctgtmcttggcctctcctctttttacacttcattctctccctggacaatctcttctcagcccaaagccctaaatctaaaccttcaatttctggttgaaatcattctcctgagcttccaaaactgtggagcactgaagaggaggagatggatgtgagacatttggrtgacttggtgactgactgggtataaggaaggaggggaacagagaccggcagcatgactcccagcctgctgggctggatggctggtggatggtgagtccattcaccaaactgggaggcccagagagagaagcagattctgggctatggaggatgaatgcagggtggagcatgttgagtctgttgtgctcttgggacatctggatggacatttccagaaggcatatgggtatgtaaatccacatagtaggccagctggctggaaatacagatttaggagacagcagagtgargacggggatgaaaatggtgggaatggatgaggtcacctatgaggtgtagagagagagggtcgggaggggaggatgggccaagcttgcyctggccctgaaggaactgcaagctgggagcrctgagatgactgccctcctggtgcttcccaggcctcggggctgtccgtgtggatggggaagcagatggagcccttgcacgcagtgcccccggcagccatcaccttgatcttgtccttgctcgttgccgtgttcactgagtgcacaagcaacgtggccaccaccaccttgttcctgcccatctttgcctccatggtaagtaacctgacagtggggaggagcccttccatttcacaggaacacatggccatattgtgggtccctgacgaggcagcaatrtccaggccagactcagaccaggctttggagacccaggtctgactgtgacgtggatttgtggaccctggatgcctctgcccctgaggcctccrctgctttgccactcctctttgtacccctcctgctgaccaaagcaccaaccatggaccaagtgctcaaatttattttataaatctaattggattatttttcaagctggggagacaggacttgggctaaggaggagcaggccagtgccgtggtctctgagcatgtagcacaggtgtgcaggaggactgcagactgggagcaccactggctggaaaccccaggaagaggccttggaggagtggggacttgggagtaggtaggaagggagagagaattctgggaagatggagcagcacaaggaaaggcaatggtgcacatgactgaggactcctggaagcctggcttggtgagcacagggataagggatcctggggagtkgagagaggtagctgtcggttgtgggaaaagctgctgagtgccaggctaaggcattctgttctatggactagcatgtttttgagttgggagtgagaagaaagcagagcttataggaaaatcagtggctayggttttttttttttttttttttttttttttttttttgcatttccttctgtcatccattgcaaagacgtaccagcttcagggtagtatggaaagatccctggtctcgcagtcagaagacccgagttcaagatgtgggatctctgaacatggcccttcagttctttcttccgagagctgtgctgatggccaagtaagatgagggctatgaaaagcctctgtagactgcaaaatgagcatgggagaggctgtcattattctggaattgggagacagatttacagagggcctgaacacaggattgaaggtggtgaatttccattcggctgcctgggcgtctgcatgtataaaaagcaaacctaagtggtttttttctcctccaagtgaagatgaaagtgttaaaaatagcaaggaggtgaaagtgttcaaaatagcaaagtggcctgtctcctcttctcctaagcagactgtccaaacagacgcccagtagaaggagcaccttttgatactgggcacgtggtggtgatgcctcctctctcctagcacaggccgtggctttgtcatctccagccctaactgggagcaccgagggttccaaccaggcaaatgcaggccctaacgggctctttgaaaacgggcttttctagaaccaggaacctcaagtaaaaactcccccagctacctctaaggcccatcacactcctgtctcacgcccacctatgagaaaggaaaaggtgatggtcattgagctgggctgcagaggagtgtgaggtgcagacaccatgaggtacccacagccaggaaaacgaggatggtcggggagacgcgccagcgaagagctgggcccctgcgtgggacccctcagtggttcccagggggcgtgggacttgcgcagtcctttcagagggctgtttaccaacaggaaccgtaacattaaacctgctcagaccccttgactcagcaatttcatgtctgggaatatatcttaggaaaataatcagagatgcctaccaacatatgtgatgatgatgtatgacagaattattatacaaatatatccatagtaacagggggtttgctgaaataaattatcatatattcatataatatgacattatcaggccattaaaaatcacagtttcaaagagtaataaaatgggaacatgctcatagtatagttttttaaaattgcagatggtatatggctaaaaatgtctaataatgcaaagatgtatacagaccttaatcctctagcctcctccctagagatgacctctgttaatttctcaaatatttttctggatattttacacactcacacactttttttgagacagagtttcactcttgtcacccaggctggagygcaatggtgtgatcttggctcactgcaacctccacctcccgggttcaagagattctcctgcctcagcctcccgagtagctgggattacaggtgcctgccaccttgcctggctaattttttgtatttttagtagagacggggtttcaccacattggtcaggctggtctcaaactcctgacctcaggtgatccgcctgccttggcctcccaaagtgctgggattacaggcgtgagccactgcgcccggccattcatcttaatttttaaaaaatctaaccatgaagccttggttatcttggagakctttcctgattagcacaaaaagaaaaaaaaatccaattctttacagctgcatactattccattatttgtatgtgtcatattttatttaaccatcctgctattagtgaccattgagttggcttcctgtgttttgccgttacatggttgcaacaaacatgtttgcatgtgtctgccctcatgtgcatgatacatgattgatttgatagattttaggaattacatcattcattcatacactcagcaaatatttaatgagtgcctactctctgataggtgctgttggatgtggctaaattttaaagtgtagaatttaaaaggtggctaccaaattccatgtgcaaaatgaccccacgcatgtataaaaacacacacatccacagatttatatgcgggagagaagatgtggtccctggcctctaggctctctcagtctgtggcaagacagacagacatgtgcacgcggcactgtaaggttgagcacagtctaagtactcagcatggtctctggcacatagtaggtgcccaagaaatacatgtcgaatgaattgagggggtaaggccttctagggcaggtggcctctgacctcagccttcagtgttccrtaggtggaattatctgccagagacgtggcaaaagggagaggaaccaagacwgaggcacagaggttcaaacgtacccggcacrttcagagaatccttttcagaatcacrtccccaagagcttctgtgttctgtacggtgatgttgcagtgctgtttttccgcagtctcgctccatcggcctcaatccgctgtacatcatgctgccctgtaccctgagtgcctcctttgccttcatgttgcctgtggccacccctccaaatgccatcgtgttcacctatgggcacctcaaggttgctgacatggtaacacagctgtttttatttactcccgtcggactataaygctgttgtcataagggatgccccatttatgaatgacagagtttcaaaacgatgtcatgtgacttgggaatgccacggaacatccagacctgtagccattgttgacatttataatgcagcttttcttctttttctgagatgatctcaagcctcacacactgttctttctctgaggtgggttatagactctcccacctggagaagcctgtgcaggcaccaggggagtccttggaaggggtgaaggtggggctgagggactcatatggccaaggatgaacttgacaaattagcaagaaccatgaagataggcagggcaggcttaggcagcagggggatgctaatgacagtcacagagatttgtaggggtgcctgaagaggtagaagcagggagagggagagagagagcactgcctgggagtagatgatgccttggaaacaaatgtagtcagaggaagaactcttcattagctctgtcacctttgctgggagaagggcagctttgcagctctgggctgggaaagaggcaagtgtttgagcccaagaggccagaaatgtacctgggaccaatcgggtgttcgttatctcagagcctctgctgggtatctcagggactccatgagcattttcaaaaaaaaaggtgggtcccagaaaccatggactgcaaacttgactccaatccccagtaaaatatctacaacagggtagtgaagcgatggttagtgaccatgagggaagcttgcagagcaggcatcagaaagagcctgaggaggtccacagggaagctggcacgtccttgtaggatrgttaaggcactggggtgagcaatgaacctggactcacggaacactgggctctgtgaccgtttccctgaatggcctaagctgttgcctcctgtcacttctctgaggtcattttccaaatgcgcrcgggcatagagaacccatccactctgcctacttcccagggatgccttgagcactgaggatacctgggggacatgaagtcgcactgtcctgggggtcgggacaccccagccagggacagagcatggcacagggacatcgaggcccagtgagccgaccctttgtcctcctctctgagagcactagtccccagcaggcctcagggtgctgactctgtctcttttccaggtgaaaacaggagtcataatgaacataattggagtcttctgtgtgtttttggctgtcaacacctggggacgggccatatttgacttggatcatttccctgactgggctaatgtgacacatattgagacttaggaagagccacaagaccacacacacagccctyaccctcctcaggactaccgaaccttctggcacaccttgtacagagttttggggttcacaccccaaaatgacccaacgatgtccacacaccaccaaaacccagccaatgggccacctcttcctccaagccyagatgcagagatggwcatgggcagctggagggtaggctcagaaatgaagggaacccctcagtgggctgctggacccatctttcccaagccttgccattatctctgtgagggaggccaggtagccgagggatcaggatgcaggctgctgtacccrctctgcctcaagcatcccccacacagggctctggttttcactcgcttcgtcctagatagtttaaatgggaatcrgatcccctggttgagagctaagacaaccacctaccagtgcccatgtcccttccagctcaccttgagcagcctcagatcatctctgtcactctggaagggacaccccagccagggacggaatgcctggtcttgagcaacctcccactgctggagtgcgagtgggaatcagagcctcctgaagcctctgggaactcctcctgtggccaccaccaaaggatgaggaatctgagttgccaacttcaggacgacacctggcttgccacccacagtgcaccacaggccaacctackcccttcatcacttggttctgtwttaatcgactggccccctgtcccacctctccagtgagcctccttcaactccttggtcccctgttgtctgggtcaacatttgccgagacgccttggctggcaccctctggggtcccccttttctcccaggcaggtcatcttttctgggagatgcttcccctgccatccccaaatagctaggatcacactccaagtatgggcagtgatggcgctctggggrccacagtgggctatctaggycctccctcacctgaggcccagagtggacacagctgttaatttccactggctatgccacttcagagtctttcatgccagcgtttgagctcctctgggtaaaatcttccctttgttgactggccttcacagccatggctggtgacaacagaggatcgttgagattgagcagcgcttggtgatctctcagcaaacaacccctgcccgtgggccaatctacttgaagttactcggacaaagaccccaaagtggggcaacaactccagagaggctgtgggaatcttcagaagcccccctgtaagagacagacatgagagacaagcatcttctttcccccgcaagtccattttatttccttcttgtgctgctctggaagagaggcagtagcaaagagatgagctcctggatggcattttccagggcaggagaaagtatgagagcctcaggaaaccccatcaaggaccgagtatgtgtctggttccttgggtgggacgattcctgaccacactgtccagctcttgctctcattaaatgctctgtctcccgcggaaagctccactgtgctgctgacttgtctctggttttctgcagtgtggggagcccagggaggtggatgaatgaacagttagttacgccctgcccacctgctgggtgccaggccttcctgtccctgttgaatccactagttatctcgttcgatctttgcagcaaccctgtgagataggaaggtgttattatcttgctttgtctttcaaaaaaaaagcgaggctcagggaggccaagggaagtgtccaaagtcacacatcaagttactggcagttacagttccaaccaagagcttccaactccataccccctgctccttctgctagccatgaagggctttggccttatagggcttgtagggaaaggtgagtggccaagagcaagtccatgccaagggaagatctccaaacatgagtccctgtctgttgcctcccctgagataggcacaggacaagtgatcaatgagacagggtggtccttgccctaagaagcaaagtgtttggttggggagggaagtagggaaaaggctgccacctccccccaccaaggtacaactgctgacttccttcctccccagccctctatcactgccctctgtgccgctgccgttgactggcctgccccaccagactgagggctctgactgcccaccgagtctagtgtcagcattatggctgacccagagcaggctatacagttagtatgatggataaataaatgattggtcagtgcagtcaattaggtgcaagctgttggtagtaggcaaggtcaatgaaggtcatccaaggtgggcattgaaggatgagtagaatggccaggggtaatgggggaggaactggtgggtgggtggaggactcttccagacaccatgtggttgagggctgacaaaaagctgggtggagggcttccagagtgccaagctcccacctgaagaggctgaccagaggccaatcctaaacaactctaggtgttggctggagttgcactaaagtgtatggcctccccaaccaaaccctttgcttcttagggcaaggaccaccctgtctcattgatcactgtcctgagcctatctcaggggaggcaaaagagagggacctgtattcagagatcttcccttggcatgacttgcttttggccacttacctttccctacaagctctatgaggccaaggcccttcatggttagtgtaaggagcagtgggcatggagttggaagatctgggttggaacggtaactgccactaactcgatgtgtgattctgaacacttaacttagccatacatgctctcttatttgcttttgatggcaaataagagaaggcccagcaaacagtggcttaaaccagaaggtcaattaatgtttacttttcaggaagtctgtaggtagatggttgctggcattggcccaacagctcatttcagcctccaaggacttgcgctccatagtccactctgtcatcttaaagccttcacacttttacccccatgcttgacccccaggctacatacacagctgctttccttcaaggcagaaaggtggatggggtgagggcatgatggtgtcaactgcatctttgtcttttactaggaaagtaaaagcttcctcagaagtcccatgcagacttccctttatgtcttctgggccacaagtgggtcacttgcctacccttagacccatcattcacaaagggggattggagtcccattggaatactgtgaccaattaagactcatctttcggggttggggaattagcctatgtttccccaaattaagctatttccacccactacaaaatctgggctctggcaggacaaaacggtgggaggagctgttgggtaggtgatgataagtgtctggtatgatcactccatgagtcttgagaggccctctttccgtagaattcagtaggagcatgttgctaggtaggaagtgagtacatggttttctggtcaagagcttcaacaatgcctccaattcccaacaggtagaccttctgcagggggtcccgtggattgggaggctagagtctgagccatgcacagagctcagtcctgacatcagacaccaaatcagtcatgctgcactctgggtctcagtttccttcatgaaggcgttagaccagagggtctctaagggctttccccagagtcacggatcctcttactccagctgaccctccctctgcttgggccagatggagcccccatcccaatctcccatgctgtctcatcttggagcctgttccaaggtcccactgcctgcttccctatgggggttcgctgaaggccatctcaggcctttcccctatctatatcttgcctctgacattttataaaaagggtccaccctgggcctttgagttctctcttcttagtgcttggatcagacatctgggcttgaggttagctgaacacacaatgttgaccaggattgccctcttaattttttttggcagggacttatggctccacaaagattctttgcattccaaaattaagtccctgggctccttagcctttgacctctgaatgagatgctcctgagggcaggacatatgtctcctcccctgttcatcatcagctgagagctttcttggagaaggactggggtctccccatctggcatctacctgggacaggtgaagtcttctctcctccccaccatctcttgcacataaacaaaacaactctttgatctgggttccaagcaggataccagctcactagcacaaagcccaatccttgagatgaacaaatcaggatgttcttgggtaagacctgtaatggcatgttcttgtctgtggaaacaaagtccaaatgctgtattgtctgattacaaactacagctggtggcctggtgaggtggctcatgcctgcaacaccttgggaggctgagacgggtggatcacgaggtcaggagttcaagaacagcctggctaagatgatgaaaccccgtctctactaataatacaaaaatattagccgggcacgggggtgggtgcctgtaatcccagctactcaggaggctgaggcagagaattgcttgagcctgggaggcagaggttgcagtgagccgagatcacaccactgcaccccagcctgggcgacagagtgagactctgtctgaaaacaaacaaactacagctggctgtcctattcttagcccacaatcccttcctccaggtactttctccccttagtcacacagcctctgaaaagggtttgtgtcccaacctaccagaaacctttttaaaaatctattcacacacacacacacaagttttatcaagataaatcctccataccacgggatgggcttttacatttctcaaccggaagtttgccatttcaggctgaatctctgcaatcaagattccgtttatctcacttggcttcctgagccaggactcaggtgtactctcttccctaccccaggagcatcttccagcagcttccctgacctgcttgtacaaatgcccccttccagctgcagagccacaggccacccatggccggcagtggtgtccctgcttcctgctatcaagggcagagaaatattaaagttcaatctcagaacaccctgttatctggtcaagaaatttttaaactactttttatagtaaaaaattaatatgaacacagtaaaagaaattccagtggcacaaaaggtattgagatgtttgcctctcacttcagacctttagtccccaaaccatccacaccgaaagggaaccgctgtcaacagtttcttacacattcttctagaaatattatataatctagaaacattatgtaatagatatccattaactgtattacatatgggagcatactatgcacattttctgtgcttgattctacctacccccctccaccaattaagaatttatttggagatcattctatttcaggacatactaagtttggctaattgtttttattcaacagttaatgttagttttaaacggatgtgagattaggctgagcgcggtggctcacgcctgtaatcccagcactttgggaggccaaggcgggcagatcgcgaggtcaggagatcgagaccatcctggccaacatggtgaaaccctgactctactaaaatacaaaaaattagccgggcttggtggcgggggcctgtagtcccagctactcgggaggctgcggcaggagaatagcgtgaacccgggaggcggagattgcagtgagccgagatggcgccactgcacagactccatttctcaataaataaatagaggtgagattaaatttagaaaactgcacagatcttcagtgttccatccaatgattttgacaaatgcttacatcttagaaaccacatccaaattccacaagcctcctgcccagagttctctctgccctttcaagtaacacttcctgcggcaaccacgttctgatttctgtcaccatggatgagttgtgtccgttgaacttcatagaaatggaatcatacaggagtattcttgggtctgatttattttgtttaatgaaatacttctgaaattcattcctgttgttgtatatctgttcattttactgttgctaaatagtgttcctttgtacgaatataccacagtttgtgtcgtctcccattggacacgtgggctgttccaatttggggctattataaataaagccattataaacatctctgtacaagtttcttttgtgagcatatgttttcaattctcctgaggcatacctaagagtgagccccagtctttttaaaagctgcaaggttttcttttttgagatggagtctcactctgtcacccatgctggagtgcagtggcgcgatctcggctcactgcaagctccgcctcccgggttcacgccattctcctgcctcagcctcccaagtagctgggactacaggcgcctgccaccacgcgcagctaatttttttgtattttttagtagagacggggtttcaccgtgttagccaggatggtctcgatctcttgaccttgtgatccgcctgcctcggcctcccaaagtgctgggattacaggtgtgaaaagctgcaaggttttctattgtaagtatgcatcacagaataatcaaattccctattgatgggcgttgggttgtttccagtggattgctaatgctgtaataagcatatctatacatacatctttgtgcacctatgtaagaatagtttctggccagatgcggtgcctcacgctctgtcacccaggctagagtgcagtggtgcaatctcggctcactgcaacctccacctccctggtttaagctaggtttacatgctgggtttaagtgctgggattacaggcatgagccactgcgcccagccccaagagttctttttttattaatttgtaagaagtctttatgtatttaagaaattagtcattcagctgtcatagggatttttataatatatgtgaagatctgctgaggctactttgtttattcttctttttcattatttttgcctcgctattttcacatatttttccataagaatttctaagtcagcttcttcagttccaaaaaaaaaaaaaaaaaatgggttggcatttatctccctggctatctctcctattcctcttcccctcactcactccaggatttcctgacttcagcaatattgacattttggaccgaatacttctttgttgtaagaggctgttgtgtgcactgtgggataccgagcagaatcttagcttctattaatatttagtagaggccaatagcaaccctctccccttccaggtgtgacaatgaaaaatgtctgtagacattgccaaatgtcccctggaaggcaaaattgcctgtagttgagagccactgactcactctgacctagaaccctggcccctgctgtctggagcatgcggggtctcctcctgctccctcactgctccaatctttgctcagtggtcccttctcagcctagttcagatgacaactccctcatctgctccacactctctctctgcagcctccttgacttttctctattgt

SEQ ID NO: 97988 - DNA, 17114 bp, Homo sapiens
aatagaggtcagaggcgggggctttctgccctcaagtgccttttccccctgggcaggtatgtggaggggatcgtccacctcttctaccaaagggatgacatagtgaagggggaccctgagctgcaggcctggtgtcgggagatcacggaggtggggctgtgccaggcccaggaccgaggtaagatccattctagagacagaagaagctcctgggagactctgccagggcgccttcccagccctgcccttctggggacaggaccccagcctctcatcacgcctcccttcctccctccacacgggaaagcatgtgtatcccattcccacctcctccgactcaggacaattctagagacccaaggactgtcctcctcagagaccctggccatcaacccctagtcccactacaccccagtcacagatgcccctgaactgccatatcctggggccccccaggccatatccacagctgggaggggtctgcacagtccctgctgggctcatattctctcctgatggttccgttttcctaactgaggatgtaaatgggaagattttccctccgaagcccacaaggacccaccctggctttccctccctctcttcctgcctgccactgtgcagcacgcacagagggtccaggaataccgcacgcttgctacagtgcaaggtcagctcttgatgcaagctcaatcctatacatgctttgcctcaaacccaaactcagcaccctgatccttggggctcaggtttctttggctaatccaactcttccaccctaaccaccccttggccaaaatctagccactacctttagtcaactctcactccccacatttgaacctctgaggaagaaaaagcctttgctgagctcttaggtttaatcacacaggcaccagcctggactgctgtcactcatccttcggcccctccccctcacacttcagatctaggctgtgaataccatcctctgcctctgtgagacaactacagacatttactggggagcccttatggcgaatcctgggaatgtggcaaacctccttaccctggagggagcctctccctggggaatctgcaccaccctacccttccaggaccaaactctctctagttcttctcagtacagtcccttaggctcctagcagtttgggctactacaacaaaacactagctgggcacagtggctcacgcttgtaatcccagcactttgggaggctgaggtgggtggatcacgagctcaggagttcgagaccagcctggccaacatagtgaaacccgtctctactaaaaatacaaaaattagccaggcgtcgtggcacgcacctgtaatcccagctactcgggaggctgaggcaggagaatcgcttgaacttgggaggcggaggttgcagtgagctgagatcacgccattgcactccagcctgggcaacagagcgaaactccgtctcaaaaaaataaaataaaaaaaaccacacaccatagactgggtggcttataaacaacagaaatgtattcctcacagttctggaggctgaaagttcaagatcaggttctggtgagacccctcttccaggctgcccacagccgatttctccctgtatcctcacacagcagaaagatagcaagctagcactctgtcctctgctcataaaggtatcaaacccattcaggagggctgcaccctcacaccctaattatcatgtggggctccacctccaaataccatcacaataggattagatttcaatataaaaatttttcggagccaaagacattcagttcatgacacatgttaactttaacctccactaaccaccctcccccctgttctctttcagttctcatagctcacttttgtctagttttcccagcagacattttagaggctaaaattaaaaatgccatgggattagcagtcaggaacctgagttcaagatcagcctctgccttttcccaactatgcagtcctgacagtttattctctatgggctttgattttcttacctataaaatgagagtaattatatttattccacttaactgataagattattgggtctcccagcactttaggaggccaaggtgggcagatcacctgaggccaggagttccagaccagcctagccaacacggtgaaactccatctctactaaaaatacaaaaattagctgggcatggtggtgggagcctgtaatcccagctacttgggaggctgaggcaggagaatcacttgaacctgagaggcggaggttacagtgagccgagattgtgccactgcactccagcctgggcaacagagcaagactccgtctcaaaaaaaaaaaaaagattatcgggtctctgagcccccatatccactgcaaaatgagtggactgagataacctttgtgggagcccctctcagctgtgacactggaaatccatgacttattccccacattataacgcagacacttgtaattctgtccgggaataggattacgcattcctaaattatttatttattttttaatttttaaatagagacaggctcttgctctgtcacctgactaccagcaatcctcctgccttggcctcccaaagtgctgggattacaggcatgagtcaccgaccacgcatccctcaattggtttttttttttttttgagacagactctcgttgtgtcgcccaggctggagtgcagtggcgggatctcagctcgctgcaagctctgcctcccgggttcacgccattctcctgcctcagcctcccgagtacctgggactacaggtgcccgccaccacacctggctaacttttcgtatttttagtagagagggggtttcaccgtgttagccaggatggtctcgatctcctgacctcgtgatccgcccatcttggcctccccaagtgctgggactacaggcgtgagccaccgcgcccggccgcatccctcaattcttaaccactttttgaggcaagggatatttggtcactcagaacttttcagcccccaatccttccataacaataattattacttacttattgagcatttattacagaccaggtgattttgatacatcatctcatttataatgtaggtatcgtccatattttacaggtgaaaaaaactgaggttcaaataggttaagctggcctatggtaactaagtgtaagtgactgagccaggacttaaacgcatgtctgatgcaaatacgtctaaataaaataaacaaattcatcaattctaaaatatgggcatcccaaaacaacagcctttgttcctctcctcttatgctgtagcttctaactgctattcctttcctgcccaggtttccctgtctccttccagtcccagagtcaactctgccatttcctcaccatgtgcgtcttcacgtgcactgcccagcatgccgccatcaaccagggccaggtatggacagctgaaagcccaggtccctgaaggcaaggtgacctgagggagagatgggagttcaaaccctaagtaccagggttctagggttacagtttcttcctccagctggactggtatgcctgggtccctaatgctccatgcacaatgcggatgcccccacccaccaccaaggaagatgtgacgatggccacagtgatggggtcactacctgatgtccggcaggcctgtcttcaaatggccatctcatggcatctgagtcgccgccagccagacatggtgagaggggactctcgggagagggaaatgacagttggaaaggaaacatcagagtgaggggctgggctctaggtgcgtttgtctttagaaactgactgatcctttgttctgtctcaggtgcctctggggcaccacaaagaaaaatatttctcaggccccaagcccaaagctgtgctaaaccaattccgaacagatttggaaaagctggaaaaggagattacagcccggaatgagcaacttgactggccctatgaatatctgaagcccagctgcatagagaacagtgtcaccatctgagccctagagtgactctacctgcaagatttcacatcagctttaggactgacatttctatcttgaatttcatgctttcctaaagtctctgctgctaaggctctatttcctcccccagttaaaccccctacattagtatcccactagcccaggggagcagtaaactttctctgcaaagactagatccttttttacgctttgcagaccgcatagtcactgtctcaactactcagctctcctgctgcagcatgaaggcagccacagacaacatggaaatgagtgtgactatgttccaataaaactttatggacactgagatatgaatgttacatcacaaagtagtcttcttttggtttattcaaccatttaaaatgcaaaaaaaatccacaaacaaatgtgctttgtttgagacatgcacagccaggctacagactggatttggcccttgaaccctgcactagcctgaggccctgaccctacttccaaaacatccaagatcatggagcagggggatttcttagaaaaatcagcttacctcagctaactctccattcccaggaactaaccttcatgcctggtggccaatgtacaaattcctgactcagttctttggcaaattccttccacccatatttctcctattcacccatgtaccccaaaagtccctgaataagaatcatgtttttggggcagaatacaaaccactgccccaaaatggcttctttctccaaacagtcccagatgaaaggcacataattcatgtcttaaggctacttttccagcccctttaatactctgggatctatgtgtttcccacattccaagttatctttcacaagccttttaagaacaacatgcacaaaataaatggacaagaactacaaagttattctagccaatgatagtgtttatttgttaggtcctggggtctcaaggtcaaatgatccctctcaattattctgaggtcactgtcctcactagagtgggtacaacttgctcactgcaaaactgtgttcttcaaacatccctacttcttttcttttctttttttttttttttttagaagtagtctctatcgcccaggcgggaatgcagtggcgccatctcagctcactgcaaccttcgcctcccgggttcaagggattatcccgcctcaccatcccgagtggctgggatcacaagctcatgccaccacatccagctaatttttgtaatttttagtagagacagggtttcgccatgttgacctggctggtctcgaactcccgacctcaggtgatccgcccgcctcgacattcctatttctaaataattattacagatctgtcactcaccagttaaacatacaaacggcttttttggaggggatgacctatttatatttttaaatcttatatcctaccttattcaaaagtcctatcagttttcctagtttagagaagcaaagtgacatttttgtgtacatttaacaggactgcttaccttcacaacctgctcagtcggctttccctggacttctcctaaccgcccatttttcctggatttggcaccgagagttacagtatttcacgtgcgatgataaaatgttacttaggagaaacagttccaataccaagaaacttcagcaattttaaagcattttaaagccacaaaaccatgcccgatccccaaaagggggtcctaactcctttacactgtcagaatctcaattttaaaagggaggagtagagaagagatagaaacgctctctgttggtgaaaatctgtcttacttaccatttccccaacacaggagagactaaggaatttcaggtaaaaatcagatggctccaatcctccgatactaagagcccatcgccccagttcccaggagttccgccagttagactttttcccccatggcctcgctaaggctagttcctcgtcacgtgacgtgacaggcttggtcacgtgacataccagctccttccattcccgtgtgcggggggagggggaccaacaaaccggaggccctcgctcttccaatactcacgccctagctacagaggtcaaggaaggtttccccaggagcagttttggtttcagacggcgccgtctcccgcgaaagtcctgagaggagcccagccttttccgcctgccgcccccggatgggatggttgaggccggggccacgccccctctgcccccctgcgagggcatcctgggctttctcccaccgctttccgagcccgcttgcacctcggcgatccccgactcccttctttatggcgtcgctcctgtgctgtgggccgaagctggccgcctgcggcatcgtcctcagcgcctggggagtgatcatgttggtgaggggactccccggcaaggatcggagagggcctgaggggctccgggctgggagggctgggaggcgaggaaactctgggccgcaggcaggccggaggggccggggatctacaggccccggagaaggagacagactgaaattgaaaaatgggaactgttcgagaccagcctgaccaacatggtgaaaccccgtctccaataaaaatacaaaaattagccgggcgtggtggcgcccgcctgtaatcccagctactcaggaggctgaggcaggagaatcgcttgaatccgggaggcggagggtgcagtgagccgagatcgcgccactgcactccagcctgggtgacagagcgagactccgtccccaaagaaaaagaaaaaagggaactggagcggagggccctggagtgggaggagccagggctggtaaaggtggagacccctcaaggtaggagaaacaagagcggggtkcctgagaggtgcttgagttgaatggaggacatgggaggaaaagagagtgcttgttccagaaatgtgtagctgggccttgttttcccagtaatccacccaccgccacttcaagaagaaatgatatgaagaagtgccggttctccctcccctcttccgcactgtcccgtgatgatgacgcctccagagaggacgataatctgggttcctgggagagatggcttggtcactattcccacccttgcctcgaccacttgtctcaatgtcaccacctcacgccctgttccaggtggctgagtccgaatccagtaaccaccacctcgttttggttaatctcaggctcgggtgttgtagcaacattggaaatgggaggggtttacgaagtgaacatgaggtcaggtgcctgaattcaacagtctacccattccccttttccagataatgctcggaatatttttcaatgtccattccgctgtgttgattgaggacgttcccttcacggagaaagattttgagtaagtattcgggtgggggaggcgggctgggagcaggtgggaggtggcgaggcctagggtcagaattacgtctgggaggcccggtgcttagggcccctaggttagaggacttggagaggagagcggctttcttgagaatgtggttaggagccagggagtcagacctcagcggccatcccaaacccaccaccttaggtgtgacctctttaggtattttacttttctgtgcttctcagtmcacctctgcaaaatggctatgacagatctcaccccataggatggtcaagaagattgaataaagtaatacacgtaacagcgcctaaacaggtgtcgggcacatagtgctcagaaaatgttggctcctattaawgtttgacccctttgcttcattcccacccccaggaatggcccccagaacatatacaacctttacgagcaagtcagctacaactgtttcatcgctgcaggcctttacctcctcctcggaggcttctctttctgccaagttcggctcaataagcgcaaggaatacatggtgcgctagggccccggcgcgtttccccgctccagcccctcctctatttaaagactccctgcaccgtgtcacccaggtcgcgtcccacccttgccggcgccctctgygggactgggtttcccgggcgagagactgaatcccttctcccatctctggcatccggcccccgtggagagggctgaggctggggggctgttccgtytctccacccttcgctgtgtcccgtatctcaataaagagaatctgctctcttmagccctgtgtctgtgcttgagtgggggcgagcacggggctgagactagaggtcggcctctgcctggaaagtcccgatstctgagcggaagtggagcgaagtgtggcgcggaagtgaggcgaaggctttccccatcgactgggcgcgccgagcggtctaagcgactgcgtctgatggggcggggagccgccgggttgagcctatccgctgcggggagggcgggacttcctgcgcgggggcccgagccgctcagtctccctgctctccgtggtcccggctcgcgtgtagcggcggcggcggcgtctccgtgaggaggcgcgcggggccatgacgtcagcgtccacaaaggttcgacctccctcgcggacagcgctccctggcggccacgggagggcgggccccccacttggctcgcggctcttccgccccgggcggggggcgggcgggagccgagcctggggtggggctaggggctccgggcgggacggggagggcgggcgccggccccccgtgacgctgccccgcccccaggtcggagagatcttctcggcggccggcgccgccttcacgaagctcggggagctgacgatgcagctgcatcccgtggccgactcttctcctgcggggtacgtgagcccggactgggacgtggacgctgagagcgggcgcttggactcggtcacagacacggaccctctctagcacagggacagacattagtttccctttgtgcstggcacagcacagagtcggtgttaataaatgatcgttgggtgagggaatgaatgacagataaaaatacagacaggcccatagcccagactcctgtttcacagttctccctgctgcgaacgggtcgaccacaaaccaccgccactcccaaccaccccagttcatggaattcccccagacggctgcaggctgtgttggtgggtctgttttgaaaagcccttcctggcgagttggtttcagtgtgctgtgtacagcagccgtttaacgttgatggtggaaaggggtgtctaaggtggaggtggttgtgatttcttgtgattggggtcctcccggttcccgcagggcctcaagagctttccgcctccccttacggaggacctctttatgcatccgtggaaggggtcccagaaatcggaaggaggcggctggttggctgtgggatgcatagcctgtgggcgggctccacaccccccctcccatttttgctatcccccctctccccttctgacagygcgaagtggacggagacggaaatagagatgctgagggctgctgtgaagcgatttggggacgatcttaatcacatcagctgtgtcatcaaggaacggacagtgtgagggagggtggctgccaraaaagggcgggtgggcmgccttcttcctccttacccaaggttccatcgtcctcagaactcctttccagctcagctgcttccctactttgtcactagttttttagaatccccttgaggactgaaagaatagaattgtcacagttggtcagaagttcctaaaatgytgtggtaatccttccaagaatgtgaatttaggttgcctgagatgctgttattgtatttgatgatggaagtcccctggttatttatataaatgtttgaggaccccactgcagtgtttccagggatatggtgaccctgaactagttgatcagtaaatctcaatccacctgtaaatcaccaagctctacctgatgtctctcccagaagagaattaggagatgggcctttcccactactcagttcagggactccactctcyacactccatccatcctgagtgagtgtaaaacttcgagaaagtgagaaccctaccaatgggttggggccccgacctggattcttatgaagggactcccagaaccccttcccctcccgtcccctcttctgttagtctctctgatgactcctttcctaacctcttctctcttttcttcagggcccagataaaggccactgtgaaacgcaaggtatatgaagattctggcatcccccttccagctgagtcacccaagaaagggcccaagaaggtggcatctggtgtcttgtcacctcctccagctgcccctcctcccagcagctccagtgtccctgaggccgggggtcyccccataaagaaacagaaggctggtgagggctgtggagttgctgcctaggggttaaaggtcccatctgaggtttagtgagagaattgggcctgggtcaaagaagggtcagtctctcttcctgtccctgtggaggttcccagagaggggcagaggggaggggagaggaggcacaaagctttgggaagcttggggctgggggagaggctgtcaggggaacctagaacctagcttatgcccccttcccagatgtgacactcagtgctctgaacgactcygatgccaacagtgacgtggtggatattgaagggctaggagaaactcctccagctaagaaactcaacttcgaccagggtaggagtcctcctcctcccacacagctgacggggttggggagaaagggctcacctggatggcagggcacggtctccgcaggggcccctcccttgtataggggtttcagaagagaaggtgctctcatacacagcgcagggcattggatcagtacgtagcagggtgtttcagggaggtgggagtggccttggaagcacactgggggctcgctccatctcggcccattttacttcctgttccagacagcctgaccctggattctggccttctcatgacctctgctgatcctcctctcctctcctgctgagccttccacctctgacctctcactgttcatgccggacctgtggatctcctgggactccgagcaaggcctgcacgagagagggctgaaaggctgctggggctgccacctcgctattcccgcataagcatctgcccccaacccctttgaccttcatctgatggacatttttatacagaaaacaataaagatttccctctcagcttcgtgctgtctgcttaacattattagcaggagaggcctgttccctcttctctcctcggcccatgggggctcagcccctcctcggtagttttcaccaccctgcctggagcagcacagccaatattggcagactcgcttccctgtgccaatatttctgtgctgctagagccagggaagctgggtgtgggcaacaaagactccactttgttctcttgaggcagaacttactcccagggtctctggccatcagtattcttgaaactgccctggagattttagaggggtgcttacataccccaccctctccttgcccacctggcaagaagtttgtcacaaggccccagatgttttttgtgtcacttctccaggatggcctcccagggccaagcctcggcggtgcctcccccaccctcgctctaacaccacagtgtggtttggacgtggccacagtgccgtacaaaccacagtgtgctgctggggcgggagcaggaccggggtgggttgaaaggaagagagcacatagcagtgctgggaagaccccagcaccacctccaggagcggggggatagagaagccttaaaaggcaaacatggcccccaaaaacgtttgggaggaaccagggacgggctgagcaggcaactggaaggcgacggaccatggggatgagctcacagtgtagtaagattggaccatcttccctctgtaggaactcagctcaggggatccctagggtggggtcagaggcagaagaaatagggaatgactggaggggccaacacactgcctcctgtctcagcaagggcagggacccaaggcttcctgtgtccgtccttcctctccctgggtcagaacccaagagaaaagcaaggagagacagagggccaaggccagcagggttgggagttggcagtccagaggtggtggggccggaacatggttgggagaggggggccggaagtcgccctgggccctgggcctgccacaagatggaggccaaaggcaggaaatggagaccagggggaaggggagcagcagagcccaggaagagggccatctggacctggggggccaggtattcaacccccagtgctgttcccactccccagggcccctgaggacccgagccggcccccacagcaacctccatcagcccatccaccaggccagggcaggcgggcccaccccagagagccacgtttaagctgagacaaacatgcctctccccacccccaactccaggccttccctcagcccttttctcctgtccaggacttgattttttaaaaacacccctcagaaagcaaaatccaagggccaaaactccttttgcaaatcaaaatatgaccccctaaaatccagaagttatcttcctatatcccatcgcatcttttaccaccccctcttccgacacaccccccaaaactcttagcaatctgaaagatccaaggtggtgtatgtaagcagtctttttaggcccccgaagatgccagacccctcccggacacccctatctgtcctccatcaaatcttgccaaggcctcctgctcctccaccaccctccatagcccccaaactaacagttgcccccagctcctacctcggcagagcctttgtggggggtgaaagagaaattaaacactatcctaacggctggggatgttggggggctctctggtctcagcctttggtttccgtctggggggctgcagtttaggggtataagagaaagcctctccaatcatccccccaattccaagactgacaaagccaaccccaccccagcacgcacctccaaacctcccccccaaccgccacgtctctcctgaaaacagaggacacttccctccccacttacctcagctactctcccctgagatcctggtcccctattttgaaaagagcaaaatttagggtgcatccctcacatttggggtgcaggagaaaggagccgccccagtcgcatcgctggcctccttcctctcggctggctcagggactggggagtgccctggggagggggcacccccacaagagatctcaggaggggttcctccactcccagtcagaattggggacacccccccaaaacccgtcccagcccatccgtctccaactcggcgggagaggcagctgcaatgccccagtcagattcacccaacactacattcctcaccccatctagaggggtcccggggtccccaaaaaatcccaaaaaaatctaggatgttgggaggacggtcctggactagctccccaaatttggggtcctcagatacccccgttttttcaggaaaattccgtcttttgcctgcctcccgccagccctgctctgtcccgatgccaattttggaagtcactccctccttcctcctccccgtctctccaggccccccccaccgctcgggggctagggtccaggacacctggcttccagaccggggggaatcactcctcaaagggctaggggccaggaggtcaagctcattgcccctgtcttaaggaagcaggaaagcccgttcctcccttcccctcccccctggctggtcaccgtggtggtttaggaaagcctggaggattggaatctgccattgctgttgcacaggcagttttttttcttgggttgggggggtgggcggtgggagggagagaggggaggagggccgaagagagaagggacccaggcgcgaagagctggcctggcttaccctgtagccccggctgccgtggggaacccctcccccccatctcacccacactcccagtcctctgtctgctttctgtttggggctcatcctagaaaatcagggtgcaagaatcacctccttgtaccccaccagcacccctccttgccacagttccaacagcactgccctggtcaggggtgcccacttggccaagggacaccccatttttctccaacttcccccaaactaaggggtgctcccttaagaaattgggattcagagtctgaaaccgccttttctccctctcttctccctcaagccacataataataaaaggagataccacaccctttccaagtttctcccttcaaatcctgggcttatttgggggttcactaaagaaacttctagaatctggggtgagagggcactataagcaaaagacatcccaaaccagggtccaaattaagtgaactcccaaatcagtctcaccttatgattatcccttagcttcaccaaaagcagccagagtgacaaaacacccccaaaataagaacaccccagaactttagtctcctgtcctcgcggccctcaccttgtttctcccctggggaaaaagcttcttgggtatccatggatacacaggaataccccacgtctttccactttgtggaacgtgagtgtccacaagactcaaatataaaagtttgctccccgctcccaggacccccaatcacagaaagcttcgaacttgctcccagcttcctataatgttccacctcaaactaatttttaaaactccaaattgaacttattccccaaatctaatctgagccttgaaacttagatggcaccccaaaatagactgcacccccaaatcagcatgagtactttggttctgctgatagtccaagatgacacaggtgagcacaatctccaaattgtgggtgtcagaacccccagaactaatgtaacttccaagtcagccccatacctgaaacttaccatataggcctcaaaggctgaatgcagccaccggtgctcacaatcaaatcaacaccccataataaacagacaccccacaactgatcaaataatactccatcctgatgccaaagggagagcccctagtctaattctcatctccaagctgggcagagacctaaataaccctcacatgtcaaagccacctcatcgtcctgaatttcccagttcccggtttctcagctgttctttcatgcattcaaataaagacacactccggtctgaaggggagggccccgggcctgatatccagccccgtggaccatggtcggccattcctggccaactgtacactctccccagcccaaatccggggagcttctgccttgcagctggattcagctctagcaccccttctccaaatgagctttgccttgcctgcccgcaatgtctcccgaaacaaaatatgagggtgtgatccatgcccatctctcagatcagggacttcaaattagggtggttaagccccctcctgccctctctccctcctccttgttttcccttctcgtttaccccacccaattttaatgttcaattaaaagtcacctccaaagacatctgggtagcagtgtctagcttaattcgaaaagaaaacccggagttcccaggctcaggtcccgcttcttgtcccacccattcccctggctcctaaagcccgcgatttctcacctcgggtaggaaccccagcctgaggggaaagtcccctcggtctcctaactctagctccctccgcccagccctagtcccctcctaggagacagaggtgcaaaataaacccgcgcaaaggggaggaggctaaaggtttcagccgcccagaccaaatggatcctgcgcccgggtctgagcgcaccccaggccgggtggagacgaggggcgaggcgaggccagtgctcggccgccccctcgtggaaggagccgcacattgccgagccttgcctacttgccgcgctggaccccggcgtcccgccagcctccaagcgtagccgacgggcgggtgcccgaggccctcgtgagctgggattgggggaaagcaagcgggctttgggcgggagtccatctctctggatccctacaaggacccagaagagagtcgggagcgagagaggccggacgcctaggtctcccgagcgtctctcgcccctccacccccacctcggggctttccccacctcctcgaggggaagcagctggcggagccgtccggtcgcaggacaatggaaggaaaccaactagaaatcatatccgccctctccgtaccccgcccggccagagcccccctttttgtaggcccgggtagagtagcctgtcattcacaccacaccctccccgtctgagaccctacgggagcccactgtcgtctgcccaaacctgctgtctcgttgggctcccccttttctcccttaacacagtacaagagagggagagggggttgccgtatgcactttgtcctgcagcaaaggttggctcctggcaaaccctcccaaaagccaacacaccaattttcactggcccaggccttccgacgactcagactcccgtattgccaacctcgatatccctcacctcctccccaattccaatatccccgtcctcgtgtccacttgcagtgacccaagaccccctacgttacgaccaccccttgtttctgaggtcccgccctcgagacggagaccccgccctggactcgccatctggagagcgagggaggaaggaaggatacagacccaggcgttcaccccacctccacccccgcccccgacatcccggccagataaaggagccgaggccaagaggggagagagaccccgccccccttaagaagagaagccgcggcccctgcaggacgggggtaagaacaagagactgagggagccagactcctgggtcccccaagagggtaggagcttgtgtggagcttgccatcagcgagcctgagtcccagaaattgggctaaactagggattggggactagataggagtcgcagaattccgtagttcggggaagggagcctcggctgggatttggaggtgtgtggacggcaggccgtgagatctcgaggcagggttggacacctgagacacaggcgcgcagaggggagtggcggtgctggaggggcactgggggtcgaacccagggcgatgggcgcgggattccccacgctcgccaacgacgccgcggtgtggaaccttcaactggctccaagcgctgtgggatctggaagaggcaagggagcgagggtgtcgtagagggcagaatgaacaagaagaattaggagggaggctgcgtgtgcc

SEQ ID NO: 97989 - DNA, 405639 bp, Homo sapiens
gtgttcctcacgcctcggcctcccaaattgttgggattacaggcatgagccactgtacccgaagagaaccatcttaaagagaaaaaagagctgtttttattttttgtttttagaaggccacgttcattttttcagaggcacttggtctttttagtgctaaggaaataatactcaaggatttttaaaaactgttacacaacagcttcttcttaaaggctgaatcacaggcactttagaaaacttcttagtggaggaggctccactgatatgtactcaatacttacactcaacaggagggatatatttcgattttgagtttgacaggcacacactgatctcatttaagtccttacccagctggagctcaggaattccagtgcgctttccacaagaacttcctcatgtcttgtcgtgccgaacagtggggcatgacccaggccctgtttctgcaaggaaagagaagtggctcccaagaactgtagtggcctcttggtataaattgttttcctaaaggcccacagtacagggcaagagttttcttggcaacccaaattagaaataaaaaaaaaaaaaagctgatttgttcacatcatcaaataatggcccagaggctgtggagtagatgtccaatttcaaaggccttgcccttcctctgggccagaggcctttcatcacagctaggaaattacctccctaacatgcatgctgcgcctgcctccataacccagaggtcagaaaggcagagcacttctataagatggaggcaaaaatacaaatggaaaactgggtgtctctgcaaaaacaagactaaggagaaccaaggcactgccatccaaacccaacaccgccttcagtgagtgctctcaggaggcctgacagcagaatatatgcccaaggcaagaatgtcacccaaggttcccatatctcctgccctcacgttgtgtcccaggtctgggttctctgcttgagtaatgctccaagctgcaaatgcccccagccaattctatctcctcaacccatcacaggccctctgtctaaggaccttcctaccagtgggggttaggaggaaagcatgggaatgaaagaatttggaccaaggggtgcatgatggtagcctgtcagggcaacttgtagttgaaaagagaagccccttttgcagggaaacaccactgtacagatagacttcagatgctgcggggcacggcgccaggccagctgtgtggagctgcattccagccaagtgactgaatatctgctttcatgcggttttgtggagctgctacaatcttccacctctgcagagtatacccgtttcttccagtcaccacgaaaggtcatgcaaaaagagattcttcagttctggcactacatatttaatatcaaatctttgtacttgagcctgcaatggatggacatgcatattctatcagccttgaaaatagctgttccaacactggagccctgaaggaaacttttcagttaaatattctctctttgccaactgccaaatagacaattttattattcaacccatggatccattaactcaaccctggccttccccagtagcccctgtcatctgctcttcttttgtgtgtaacacccttgatctgagcatccgcttgttgcagaggcccttggattccccagcagcctcaggctctgtaggagccacccctaggaggcaagtcaatcaggctgcttccccagctttgctatttgatttctgttggggctgcaagtgttcctttctaggccatttttaggcctgaatttcatatgggccataaaatcttttgtaaaaggaaatggatcagctagctttgtcgagactcactctatttctggagtcctgatgatgaaagacttaattagtgctggagtaaacaaacggtcagtctcgttaaattagcagcagtatttattaatataaacacattgcacttgaaaaatccaactttaatgtcccctctgagtaaatatacttatttttcttcaagtttcaatcagtaaggcttcatgtacagccatgatgtcatgagaccaattacacagagtactcttgacaggctcatgattttcttgccgtattctggcctgcgtaaggagcaaacttgctttaggatgttcagagagacactgttctcttccatttccaggtcaaaccccagctaccatgacttaatgcttcagagctgcatttcatattaatacattcttatattctgaaactcctctgtggtcacactcaccatctttggagtctgaatttattcacacactctggttgttccttcagggaaggagctagcagccccaaagtacttccactgaagcctttggaaaagagggaagactccaagtctctggcacctgcagaagaggggaatcttgagaagtagctgacgctccgagtttacatgtccccttggtgagatttcttacagcagaacatgacgttcttcccacccccaggatgcaaaccactttaaaagaatgttatactttgctctgcgtggccaaataccacaaacaccacttgattttaaaattatgtagtcttggtattccaaagccaacgtgcaccaccatgcaagaacagatgcggtctctgaaggcaaaagccccaggcagtgcttaagtctcaaaaaagagttgtcatgtcatcctcaacttgagatgtttgcttggcaagcattttttactctctggaggaaattttgtttacaggatttaacagttacacacacacacacacacacaattactcattgttcagctgcagaacaaaggtcagctcttggcacgcagtagttttccaattcctgatcctttttgattttcaatgtgcccatcagcagacatgtaattttatcttaagacagccaagtgcaaagcatgagacaataggcagaaatcttgtaaataactatcaaacagaaataatcctttcagctgacgagggaaagcctcctttgttccattttaatgatgtttatataaattttagtatgcatattcagtcagtaacattattttaaggcagttgatataggtgccaaaatcctctgtgtactgaggagataggttatcttttgcatgtgtggggttttggagacaaaagttgcactgaagtgtgtggctcttgtaaattatctcaatttcctgtttgagataatggagcagtggattttcacatccaatccctttaaatcgtaggtttaattcagttgagacccagaagtgattagcccaagtttacacaggcacttaatagctgagcagggtcacagacaaattctacctaaagtttgcaattactccccatgataagctggagaattggaattcctttccattacctgtagtacttttgccatagtaagtcttagaacaagagtaaagaaaaggcaataggttttcatggctgggtgcaggggctcatacttgtaatcccagcactttgggaggtcaaggtaggaggattgcttgaggctaggagtttgagaccagcctcagcaacatggtgaaaccccgtccctaccaaaaaaaaaaaaaaaaaaattagctgggcatggtggcatgaaccagtagttccacctactcaggaggttaaggcaggaagatctcttgaccccacgaggttgaggcttcagtgagctatgattgtgccactgcattccagcctgagtgacagagcaaggccctatctcaaaaaaaaaaaaaaaaaaagaaaaaggaaaaagaaccttatgatataatcctgaccagaaattggacttaagtatttttcaaagccatttatgttactggttggaaaaaaatgataaaagtggacattttgtttcttaataagattaaaaagctatgtacgatgtattaaatataagtcgacatttgattattccttagatgcaattccagaaacaagttgtccaggcaggagaggctggcttagaatttgtggagtatcttacaattgtggtcattggaaacaaatcgaaatgcagcaaataagccactattcctgttgttccccttgtctgtttctcccagctttattcacttagaaacttaattttgcctgatctgacaggcacaagaaggagccaggtggagggaggctggaagcctccaaggttggtctttcaggaacaatgacaatgctgtctactgaaaaccacttccaaacggctttcaaagcccaggagtttgtttagagaaaatcttgctggcattgatggatttcttctcctctgacagttcacaggaaagagtgtagtataaagaattaagtgattcattccaaacatctgatgggttcccttcaagtactccccctctgatccacttcttatggctgtgctgagcctccccatctgtgatgaggtcattttgtcgggcacacagaggattctagggggaatatgcatcatatactgcagctattcacggcattcattcctcctggctgctcatgggtaacaatgaaccttctcagcattacatgtgcttactaaggagacaggggttagatgcctttcagtggaaccccccgaggcacacaatgcatttattataatgtcttggccctaagaagggcctgggaacagcttggagtggtctataattaagtacatttaataataaatgcacatacttcttaggtattgcaagaagtgaaaataagctcttcgtcttctcagtctcaattccctttccccatcatccttccccttcacaaatcagaaaagccaggagtactgtgcttttttaaaaatagcaattgcagaggatgtctggctggtcgagaaaggtaaattaaattacttgagaacattctttccatgtcaaaaaaaatggcttctgcctcctcaggtagttacgcatggggaggatttgctaaaggttggctgttcctttaatctcccttggattccacttccaaaggctttcaggggcagtgacccgctagctaaggggcatcccttggggttaagctgccacttggaagggcacttcctcagattgctgctgtgcctagcaaggaagcagcagttagaagtgttcccccgacagtgtcccatgtcctcggtccccacacctctgagtgctcgaatatgggcagatagatagactttctgaggaaagggagaggaagagagccctgtgaatgtggacagggtacaagaagagaagtcacactggaaggaagagaaaaaggcagcaggagtgtgacatgtacatttgtgagatgcagcaaggggcgtgggactgcgagggacgcaaaggcattaaggggcctggaggctggaggcccagctttgcccctgcctggctgtgagtgtggcctattttcttgaacttctctaagcctcagtttctttacttgtaaaatgaggatgttaatggtaccatgaatagttagtgaaaggtctagtaacaggaatcttgggaaagtgacttaaattctctgagcctcactttctttatcatctgcaaaataaggtaaaaaatacccgttacatgcattgttgtaaggatgaatgaaataatgtatgcaatcacttagcatatacctggttcacagtaaatcatcagtaaatgctagctgctgttgtggcgaccgttggaatgcaattacatttttaaagatacatgttggattgaaattgtttgcatcattgaatggttcaatacatggagcaggtgtctcactagaggaacaagaaagccatgcaaactcaccgggtagtaccacgttggaaatcagattgcttttatttatttatttgatagttaatgatagggagaggggtgatagaacaaatgggtattatcttttcttctttcctataattaattaaaatgaaattatggacctgtacaatttcaatagatatggatggataggataatattattaataatagtttttccaacttaagaccagttttttcaactcactggtgccctaacgtttctgattttgctatcaatcgtgaagaggagtttttaaattatatggttaaagagagaatgacttttgctgaagcatcttattttaaacaaagtaatattgagcttattgataaaataaaggtcagcccaagagtgtgtgggaataaggtacattttgaaagaaaagagaatgaggctttaaaaaaagttgttttctttctttttgttacagctaaaaatttccaatcaccattcacttcaaatataccaccttgattttactttttttactttgctttaggtaatttttatatgaatattctcaataaataattttcgtgtaagcatttattattttgagcattacagtttggaccccaaaatggagtactgtgaattttttgagagatgctagaagaacagaagaaacagtaaacttttaaggcaagacatctttctcctcccactctagcagcaaggagaagaggacatttgctctttaagagccttttaaaagtcacgtggaaaggcaagcrctccaaggattttttgattccttttggctttggccaagaaaatgaaattattgagaacagccagmctttcataagatattgctgttggagggactttttggtgggttaaatattataaaatcattgttttctggtcaatacagagcagggagaaaataaaaataattgttggataggagcattttggtgggttttgcacagacttgcatcttgtgtcagaatgtgacatcaaaggctcagtttgatggggtcacttttctaacgtgaccagatgatgtgttaaggcaaaagcaaagtattttctccccctcaggtttttggaaatagaccaaacacatagttctcaaaaccaccttcctttaaccccaacctttgataaagtgcaggtcaactagcttgccctaatcacttctaaactcatcagtggagtatctttccatgtttaagtctccttctggctgcttctctgaattctcattacggagcaagtgtaggaagacccaggaatgccggaatcatccagtcactgcatgggttcacttcatccatatcttctttttttcagaatactctttattcctgtcttatttcaaatcctggtgtcatcagggtgatgaagggcacttcttagacactcgacaacatggtggaggtgaagatctgttgtaaaatctgagggatatccttggtatccatggcaacgaaagaccgaccagctggtaaagttctctgaagcctgccaggatggaaagggaaaggaagttaccactgtaaatggggctcccttccacctcctgccctggcaaaccacagccccctaatggtttcttaggaaaggaagtttttactttctaataccttgctctctgcctaccattgaattagtcgtcattaaacaatgaaaggcttggaagagcaacaaggaaagacacagcaaaagcagggaactgaaagaaaggtcttttcagtgagaaagtcagtgaatttgaaaagaaaaaattttcttcctttctttactgccatttcttggtatttcatattcttttggtataacagagccatagggattcatatggaatcagctcacctcccgggtctagcaaatatgttgaccttacactgtatttcgaagtgcttttccttccttagaaaacaggcctctaaaaacgctgcgcagccaaaccctgagtggttctttctctctttctttgcctctctctcttttttttggtccacatcacacaatgtgaaatgcgatctggattgtccaattactgcttcaatgacactgaggttatacaggcttatgaaattttttccaactcatttttaagtgaattttaaaaaacttataatgggttttgatttgaattatccttaaaaataacatgtcattgaagttacgatacttttttaaatactaatttataatttggaacaaaaggccattttgaaggcaacaaaactgtaagacacagttctcttcaaaagaacgcctcctttcactgtgccagtgaagtctggctttggaatgacatttaataaaattcaaccatcctgtgtagtatcgtatatttggcatgcctggtaagccagctaattctgcaacatatcttttgccagtggatgttggaccatttccctaggaaaccacaagggtattattgtgctttcttaagtattcaaacaggatctgttcactagaaagacaaaatagccatttcatctcaactagtatttgttgagcttgttgtctgcctaatactgggctgatgctgaggaaaacctgggtggaaaaggcatagtttgtgtttgaggatgtggaggttctaaaagatgcaaagtgctaacttgtaaaaactaagaagaatgaaaagtcatgtcataaaatgactgtaactacatgatattaagtctgttctcaacctcgctctgcaaccttacagcaaggcaaagggaatagaaagagaaaaagctgctagcattttggatattaaaacatttccagtcacagagtatgaaaagtaaaaggggtggaataacaaaaacgtaggccctttgtgctttaggcagggatttttttttttttttttaagattactttcactggtgttttrtgtttcttacaggtattttaaacacagaaaaaccatgagctctttctgtttgtaattcaaaaagataaatgttattgtgttcaagttatgaaagtgtttccagatctctcctttcagatcatacccactggtatttattgtctgatcataagattctctattgaatatttagtatattcagtgtagtatctaactatatgtatattatcttatgttgtcgccaagtgtttcacctgccttgtctctccagcaataagaagggatacatgtgagtgtgtctatatatatatacaggcatgcatatatgtaggtgatgtctctatggggatataatacatatgtgtgtatatatatgtctaatatgtacagacattcatacacacacactatctcctatgctaggaaaatagtagatgttcacgatttttaatatgatttgaacacaaaatgattagcctgagcttaggagcttgacataaagtgccaaatgtataaaatactacccggtttattagtgacaaatcaatttgtcaatgatttattagtggcttaaatataaactaaaaaataattaatttaaaattattattgttcatctaaacaaaagctagaacatatcccctcaactagattataaaccccttgaggctagtaactytagtttctgtttttcctccatctgcctcactgtccctcatggtgctaagcctataaaacagcatgtgttagctactcagtatctctgtacctgcccttttctgtatgctcagatgacacttacctggttgcttgatcacctaaagagccaataaaaatggcaaaagcatttacttgagggtctcttgtgaggatttgagcaaacttagcaggatgtattccatatcgtgacagatttgcatcactcaagactatgacaaagtactcatcagcttcttctttgacaatttccttgatggcatgttctgtcccttctaacgtgtggtccccactcatgcagaactgagagtgggcatgcattgtctggaggtaaragaagttgcacaaaagccatggctgagaaacttcttttttaacaaatacgattatttttctattgaccatgagcatgcatacataccaattattacccatgagtagtacattctaagttagttctatttaatttgcatatttgagtgacaacagtatacagtgatatttgttatctggcatagaatttcattagatataggatatcattccaaaattatcacagtgggcacttagttttaagtggaagcttgcacttccacttaaagtgagaaaatataagaaaatataaaacttggtatcacattggaggatgcagatgacacaggaggaaaataaggaatgagttgagtttccaataaacaaaggtataatactaaaaacattgtactcacgtcaataacgatggaggaaagtgacttaaaattgtgatgtgcatttttctgttgcaggcttaagtgtgtgaaatgaattacacataaaattggggacagggagcactctaaaagcggtcattctgcttaccaatgatatgattgtatatctagaaaaccctgtccctctcccgtctccctctcccgtctccctctccctcctccctctccctctcccgtctccctctccctctcccgtctccctctccctctccccggtctccctctgatgccaccaaagttgtcaaagccgaggctggactgtactgccgccatctcggctcactgcaacctccctgcctgattctcctgcctcagcctgcagagtgcctgggattgcaggtgcccgccgccacacctgactggtttttgcattttttggtggagacggggtttcgccgtgttggccgggctggtctccagctcctgactgcgagtgatctacctgcctccgcctcccgaggtgccgggattgcagacggagtctcgctcactcagtgctcaacattgcccaggctggagtgcagtggcgtgatctcggctcgctgcaacctccacctcccagccgcctgccttggcctcccaaagtgccgagattgcagyctctacccggccgccaccccgtctgggaagtgaggagcgtctctgcctggccgcccatcgtctgggatgtgaggagcccctccgactggccgcccagtctgggaagtgaggggcgcctcttcccggccgccatcctgtctaggaagtgaggagtgtctctgcccggccgcccatcgtctgagatgtgaggagcccctctgaccggccgcccagtctgggatgtgaggaatgcctctgcccggtggcgaccccgtctgggaattgaggagtgtctctgcccgaccaccaccccatctgggaggtgaggagygtctctgatcggctgcccygtctgagcagtgaggagcccctccgcccggcagctgcccgtctgcgaagtgaggagcccctccgcctggcagccgccccgtccgggagggaggtggggggtcagcccccgscccgccagccgccccgtctgggagggaggtggggggcgcctctgcccggctgccccgtctgggaagtgaggagcccctctgccaggctgccaccccgtctgggaggtgtacccaacagctcattgagaaygggccatgatgacgatggcggytttgtcgaatagaaaagggggaaatgtggggaaaagagatcagattgttactgtgttggtgtagaaagaagtagacatgggagactccattttgttctgtattaagaaaaattcttctgccttgggatgctgttaatctataaccttacccccaaccccatgatctctgaaacatgtgctgtgtccacccagggttaaatggattaagggcggtgcaagatgtgctttgttaaacagatgcttgaaggcagcatgctcsttaagagtcatcaccactccckaatctcaagtacccagggacacaaacactgaggaaggccgcagggtcctctgtctaggaaaaccagagacccttgttcacatgtttatctgctgaccttccctccactattgtcctatgaccctgccaaatccccctctccgagaaacacccaagaatgatcaataaatactaaaaaaaaaaaaaaaaaaaraaaagaaacaggccgggcgcggtggctcacgtctgtggtcccagcactttgggaggccgaggctggcagatcacaaggtcgggagttcragaccggcctggccggcatggtggaaccctgtctctactaaaaatacaaaaaattagctgggtatggtgacatgcgcctgtgatctcagctgctcggagggctgggacaggagagtcgcttgggtgtgggaggcgcaggttgtagtgagctgagaatgtaccactgcactccagcctgggcgacagagcaagacaccgtttcaaaaaaaaaaaaaaaaaaagaaacaagccaggcacggtggctgacgcctgtagacccagcactttgaggtgggcagatcacctgagattgggagctcragaccagcctggccaacataatgaagccccatctctactaaagatacaaaacaaaacaaaaattggccgggcatggtggtgcgyrcctgtggtaccagctacttgggaggctgaggcaggagactggcttgaacccgggaggaggaggtcgtagcgggccgagattgtgccactgcactctagcctgagcaacggagcaagactccatctcaaaacaaacaaagaataagacctagtgttagctagcacaacagggtggctatagtttaaaaaaaaaaatawatatatatatatatatatacctctctctatatatacgtgtatatatatatacgtatatataaaatatatacacgtatatatatgtatatatataaaatatatatacacctctatatatacgcatatatatggtgtgtgtgtgtgtgagacagagtgttgctctgtcgcccaggctggagacctcagtggcgtgatcttggttcgctgcagcctctgcctcccgggttcgggcggttctcctgcctcagcctcccgggtggctgggattgcgggtgcccgccaccatgcccagctaatttttttttgtatttttggtagagatgggatttcgccaggttggccgggctggtatcgagctcctggcctcaggtggtctgcccgcctcggcctcccggggtgctgggattgcaggcgtgcgccaccgtgcctggccgtaaaaaataatttaattgtacatttaaaataactaaaagagttcaaatggattgtttgtaacacaaaagataaatgcttgaggtgatggatttccctttaaccctgctgtgaatattatgcattgcatgcccgtatcaaacatcttatgtgccccacaagcatataaacttactatgcacctgcaaaaattaaaaataaacttgaaaacataaaaacaaaacaaaaatcaacattaaagaaaagttttctgtaaaaaaaaaaaaaaagaaaaccctaaagtctgataaatgaattcagtaaagtctcaggttacaaaatcaatatactcaaatcagtaacactgctatatgccaacaatgaccaagctgagaatcaaatcaagaactcaatctcttttacaatagctgcacacacacaaaaccctaggaatatacttaaccaaggaggtgaaagagctctacaaggaaaactacaaaacactgatgaaagaaatcatagatgacacaaacawatggaaacacatccaatgctcatagatgaggagaatcaatattgtgaaaatgaccatactgcccaaagcaatcaacaggttcagtgtaattcccatcaaaataccatcattatttttcaaagaactagaaaaaacaatcctaaaattcacgtggaaccaaaaaagagcccagatagccaaagcaatactaagcaaaagcagcaaatctgaaggcatcacattacagggctttaaattatactaaggcwatagttaccaaaacagcatggtactggtataaaaataggcacgtagaccaatgagacagaatagagaacccagaaataaagccaaatatgtggatgtggtgaaaagggaacatttacactgctggtgggaatgtaaattagtacaaccactatggaaaacagtatggaaagtccttaaagaactaaagtaggtctaccattcagtccagtaatcccattaataggtatctacccaaaggaaaagaagtcattatattaatatgaaaaagacaacatgcacacacgtttatagaagcacaattagcaattgcaatgatatggaaccaacctaagtgtccatcatcaaccaatgagtgataaagaaaatgtatatatacaccatggaatactactcagccataaaactgaataaaataatggcatttgctgcaacttggatggagctggaggccattattctaagggaagaaactcaggaatcgaaaaccaaatactgtatgttctcacttataggtgggagctaagctatgaggacacaaagacataagagtgatataatggactttggggactaaggtggggaaggttctcaggggggtgagggataaaagactacatactgggtacagcgtayactgctcgggtgatgggtacactatctcaaaattcaccactaaagaactcatccatataaccaaaaaccactcgtaccccaaaaactattgaaataaaaaaattttaaaaggggtcattcttttccttctattgcacatgtaggggctgagaagagccatataggacatacaagggggcccaggttgtagaatcccaatctaaatccaagtgtcctaaaaatatgtaggggacaaatttwaaattttatatggtggagaaaaggattttaggcatgatgggtgttttctcagttcaatacttgaatgtgtgtgaaacagtctttttctttcctgtgtatctgctgctgcttcaatgaatycttttagtctttacctaacctgatagaagctttcataatacagaggtaataaaatatatttaccttcagaatttctagtctttgcttattgtccttggggattttgttcattggaaccagaccaatgttgtagccatctccagagtgtccaacratgtcatactacatgcaagagaaccagaaagttataaacttttctccacaaaagaacagtcattagatctttaatgttcaactctttggaccattattgtccaaagttgctcaacatatggccataaagaaatgcagtgagacagaagtgtgtttaattctctaatctcactatgtacatgagaaactcttgtctactgagaaaggctagagctgggagtcaagtgcaaccttttcacagagtctggaaaaaaagtctggggtctgaggtaaactataattggggtgaggtagttccctccaactttgagttacacatactcttgtgttgtagagcaatgcagttatttcttttcatgtatgttccttttaaaatggtgagttatttgaaggtgaggccacagcttatttctctttgaatttctagaatctaagagagtgcctagcatgtttattgcacaaatgctgtaagagagtttgcaatcaagttggggcaataagaagcttttcccttgcatgtgggctacattctcctacaaataagctgtttgaagctggaatgcatttttccccctcaacaatcatgggataaatggtggttagtccatgctagctgacaaacaacaatccataacataactgaaactgctgtgttttaaatggaaagaaacagaaaaaatttggttgaaattgttatgcaaaaataggaagtgagaagaagggtttcctagggaagatgagtcccattatagatatgctgaacttgtgtcctgggggagagatgtggctaggggtgaagacctaacagttatccccaggagggaataaatggaggcccatatattatgtctaaatatgtaaaagatatacatcaggctaccaactgttaaataaaacatgttctgtcctcccactttgataaaatatacgttataataacctggaaagccagggccaaatttcaaatacttgggttcctggaagttctgtgctagaacatggtcacatggacagtaatggcccctggcccatagcccatacccttctcttttcatagttggctctggcccaccccatgaggtacctcaaatgcatgtgtgtggacacccagtgctgacatccacactccatcgctccatcataaacaacagttaccctctgcccaccctctgagcaccttggggtgctcacacaattggccagtctgtcctaggaagatggacttaggaaagaggcccacgcaggatttggaagcaggcttggggtcatttgatgagaatagttggggatcccaggtaccaggagcatgatctaaaaacaggctttaaaggccctttggccccatagacacctcacctcatgggagggtcatggtcagaggagggccagagtggggccatgggtgggggtgagatggtgggagattattctgtgcctggtttaaatataaaagaatagcgaaggaaatttatcaatgcattaaaaaggttgacagtaaatgatttccaatgatgtaacacattccatataagaaaaaaaaattattcttagtatagtttgctatcaatagagtgaaaaggtaccaaataaaaactgaaactaaaagcagctgagctcagctgttagaaattgctcaggataggaaatttctggcttcrgcataggcttgactaaagtcatccatgggttcagtggtaggattggcacagatgtggagagagcttgcataatccttccatggaagcacactccagggaggccccgactgatttgacaacggtcatggcaggaactgtttgtagtcaagaggggaaagttctcctgagaaagtgccaggcaggttgctttcattatgggctggtgaagtaatctgctaaacaggatcttacacatgagggaataagatcagttccctgacacggaactaggtttcttatattgggctgaggtaagagggctatgaatgtgtttgacttttccctcccttttaactgatggctagagttctttctaattagatgatagtgaatgaaactatagaaatctttgatcatatggtctgtcacagggtcaatgtaactggtcaaagagcagtcaacaaatacagtttttagctggtctttagtaaaacaagatactggctgattaaaaccttcagaaatactttagcaaccatccatctatcatttgattgtgtgactgatatatctatctaccatttaaatatatgcctaggagaaaaaaaacatactatacttttctaggcaaatgagacaaagaaaggtggaytgtatgcttctttttcttccttcttccctcttccctttctttcttctttttttcccttcctttttctttctcatctcttatttgggtaaggaaagaccagcctttgtctgtgcctggtgagtactgcaaaggcttgcaaagacacctaagygacaggatggagcttatwaaatagtttgcaggccctggtttctcatcttccagatgggtttgaggattattctgtgaccaaagccaataaaacgcttgggaggaatctaaagtacatccaaatgtggaccattccctggmgttactgcagattatattaagcttccattaccagcaatactcctccatcaaaattatctagtatctgctatccaaggattccaacatggtttaccaacagtgatttgctaatcctgaaaattgtgtgggttaatggaaaagatgcatactctcattcatttccatttgctaactcctaaatctgccattcacctgatctggtttctacgatgatcgtgaaatccaacttgacagggcctcgagcatgcttccatggaggagctacaggagtcaataaacaagatcctcactgtcattatcaaaccgcctaacatttagatcagaattttttctgagctcaaaatttttatgatcatgatttctgcacttttcagagcattcctgaaaaccctgtgcagtctcacatttagcatttaacataaatattaagccacagtagtaaagaaaagcctcaactgcagaggaccaatttaaatacttttttgctttagaaatctgtttaaatgcccttttgctatattttcttttggaagtgttgttcatttagagaaaagtataacaaacaaaaacaaatgctgaaattttggtcaaagatgtggtttatcatcaaataagaatgatttataatgtttagaatgcataggacaaagtgctattagcaattttatgaataagatttatgtgtaaatttctattaggacggacaaccatttgctggctttaggagatgctatgctttattatgcggccacattgtaagtaggtacgagacaatcatctaaggctatttattaaaactactaggtgtaaaattctcatgtccttctagaaatataaatacaccattctcattctcctgtgtgccactaactacgggctacacaggatcagaagataaatatgtgatttaaaaagtcaagagaaatgccagcrgaaccctagtgttagttacgtaataacctatagcattagctggctaacctttcttcagatcatgtaagtcaacgtgaaaagaataatgtactgaaaggtcaaggattctaggctctgacgttaacaagctttttgacttagagaaaaatcacttaacctctctaaaccttgtttctaccttgtaaacaatgatggcttagaaagtctctaacactgtatgcttgttaatcacttaacctctctgacaacatggggtaatatctgtcttaccacctcccagggtcattgaaaggataggacaatacacttactgactttatagtttgttacagtttacaaagggcttccatatatctcatctcattttgattttctctacaagttttggggtgttatccttatgtcacaaatgcagaaattgattcttagagagactaacagacttccttaagggtgttggttaaaccccaggttttctgacactaaatccattttggttgtttttattttttgattttcttttgagacagggtcttgctcattggccagactggaatgcactggtacgatcacagctcactgcagcctcaacctcctgggctcaagtaatcctctcatttcagcctcctgagtagctgggaccacaggcatgcgccgccacacctggctaatttttgtattttttttttttttgtagagacagggtcttgctacattgcacatgctggttttgaactcctgggctcaagcaataaaccygccctggcctcccaaagtgctggaattataggcatgaaccactgtgcccggcccagtgtttttactacagagaaataactacttccccagctacgctcccctcccatctctacttgtttttgaatggttgggttggccaatatttctacatccacaattgaatcaattctgaattcttgtttgaagggactcagaaaagtatgtacgacctcctttggtccaatctccatgtagcaataagaatttattcacagcctaaactgataggatgactgatctccatttctaaacctgtgaaacattcttgaggtactggaaagagattaattgcagatactgaattaacttcttgatagaagaaatttccctggcaggtgctgatttgtgagtcatatgtttccactttctcctgggagttaactcagcctttctgatcaaggtatctttgagaaaagtttgtctattatacctcccttggatggtgaggtgccaagggtaggagaagacagagtaccttacataaatgatacacttgctcctgaattacagtttaaaaaaaycaaattgaacagagataaaacagctataagaaacagggatgaaacatcaactaagagccctgaagtggaagtcagaagtgctggctttgcactgtaacggtgtgaccttgggcaaagcattgaacctctttgaatctttgttttctcttctgtaaaacaaaaaggttggtgaaaataatttccaaggccattcctaccccccaaattctatataaacttaatggtatgtttaagaattgtaatgagaargcctgcttctcttagttttaggaacacctaatgccttgttttcttctgtcaagggagagtgagtcatctaaatcagagggtcaatggcaccttttccagaaagaaagccctcagagcctgtgagaaataataatccagtacattacataatccctaacacaatggctttctaattcttcctttcctttaaaaatttgttagcagtggaacccttccttcaaatgaaatactgcacaaaagcccagcttatgaaacatcctgcattatctatacatgtgaaattgttgtagttgaattggggatggagggcaatggggcacaaagtgctgcctactcactgcccccctccactgccaaacatccttcaaaggttcttgttacactgttagaaaaccactgccctaggatatggtttatatgccttcacagaaacaatamgtttaagtttcttttttttttccaagtgcaacttctgaataatgaaataaatctcttttctggtcccactatttgagtgcttagtggagaaatagttacctaactttggtattattgagtactttgaaaaaaaattaagccattaagagcctttgaaaaggaggtgtatttcaagattacagtgaaaacattcccaggagcttggagaaagcatgaggaacaaattggaatgaaggttaaggaaaaaaatgcttcttgatgaaaagacaacggttcacaaaaacagtactattctacttttcactttaatttgaagcactacatgaacactaagaatgatgctgactacaagagtagaggagcttatgctgattataagcaaatgatgttgcgctagtcttcagtgacctactgtgaatgctattcccgggaatagctgaattcagttggtggagcaattatgagaaactttaaacactccaaatggcttagagatgtgtcttgccactgaattacctttccttctcagtaattcttgctctagggtccctgtggtttagcacaggtcatgataatgtggaataaaaaatagaggctgactccaaatgagcctccgggacctagactgtaatgacccacggctcaggagctgcactcaagccaagcaaaacacaaagcagacgccaagagagatggggagagtccagagcacagaccaggccagcggcttctgaaggtttcaaagcaaatacagaccagacacctttacaactgagggataactgcaggaagacaacattaagaactgtctggaactggggctggggagtctcagatcacactgttgaattcctaatgaccccatgtgtgatgccattctgggctatggaatatatatttttctctaggagctcctcaaactgtcttctgttcatgcataatttttttttctgagtaaattaaatccttttgttagttattcctattccctttatgcctttcacaaatgagaaaatgaaagtattcagttgaatatgatcatataacataatgatacagaacagaatgcatggtacacagccactgaatgtatgtgcatcaaatatctctgagaagagactgataattccactaatagtggttgtactggagagaggagctgggagctgagagggggcgggcagtggcttactcttcactcttcctccttttatacctgttacactttctgctgcgtgcaccaatcacctatatacccccaaacatttatagtcagccctttgcatatgcagatgtggaacccatggagaggaaggccagctggaagatttcagcatccacaggttttagtatctgagagggatcctggatccaatccctcatagataccaagggacaactgtaattataagtagaaataactcttacagaatgtaaggagctccatcttacctccttcctgccctgcgcattggcctggggagccctagcagagactgggtggcttgtgggtacttaaatctcagacacattgccaggggcggtaggaagatgatacaaagtcccatatggagagaaggcctgttaggagttttggaaatacaggggatattgggacaagttaaatggcaccatgagaaagcaaccagaaaatccagtataacaaacagcctagggccaggtgcggtggctcacgcctgtaatcccagcactttggggggccaaagcgggcagaacatgaggtcaggagtttgagaccagcctggccaatatggtgaaaccactgtctctactaaaaatacaaaaattagccgggcgtggtggcacatgcctgtagtcctaggtactcgggaggctgagacagaagaatcgcttgaacctgggaggcggaggctgcagtgagccgagatcacgccactgcactccagcctgggtgaccgagcaagactccatctcaaaaaaaaaaaaaaaaaaaacaaacaaaaaaagaatctataagacaactggcctggaccctcatgagagggtcataagagtgactgtcatgaaaagcaaaaaaatgcagtggtaggggaggtggctgttccagactaaaagaggcaaagtaaggtgtgaactttggatcctaggtggacagcagggagaggggacaattataaaagatatttttgggacaactgataaaattgaatttgagttggatattataagacagtatgggattactgataattttcttaggcatgataatggtattgaagttttttagagaatgtccttactcttaggagacatataatgaagtatttagaggtaaagcattatgctgcttataatttactttcaaatgatttgggggcgggggtagagagagtactgtaaatatttggagagaaacaaagcaagtgaggcaaaacggtaacaattagtgaacctaagtgagggcacatgggttttacttttctttcaactttttttgtaggtttaaaatttttcaaattaaaaagttgggaaataaaggagaaagtttaaaaatgaaaccaaacaaaaaaaagggaaaacaaataagagtcctgggctctatgctactatctcctactagtcttccaactttggggaaaatccacctgtgtctgggcctgggctttctgtctgtggaatgaggatggtggagtaaatggcctccgaggtgaccccagttctaaagtctgtggacacgatgaggagtttgcaggaacaggactcatatgccttgctgggtccaccttgtccctccagacactcacccaggtatcaatttttctgaaagaggctcaaagagcttgttttgtgatgttttaaggtctcttcctttggttggaaagattttaatacactggggtcttaagactttctatggtcttaaataaagctctaatgtaactgtagtgaatatgatgggactaaaaccattaacgtgcttcttgttaagaatttaatggcataaaaaatgtcttcaaggcctgaaaaatttattttatcttggtgtcttgctacaatttcacttggatttttcagtcagatgttaactatggttgtcttctcaatatatctgtggttgtgctgataaagactgaggaaattctttatactactgtggcaactgaagagagtattagcaaaatactgttttagggatgatacccacagaggcacgtgtgaagaagcagctctgctcacacattgctcaccgaaccttctatcagaatgagtagttttcatcatctccctcactgggctacccagcagagtgctctactcttaggaagtgctcaggtaatgtttgtaatttcgcggaatttaactgacatccagcaagcaggtcatatggtaacagtttggtttgtaactgtcaataaaaaaaaaaaaatgaaacatcttgtgaaatgctcatttccttgatattgttccttttttgtgtgtgacaggtctagtttcattaatagttcttccatattatagacttttataagtgagaactgaataaatggagatctttctatacactcggctgcgtgagatgcaatgaaatactcagcctgctgcgtgacaatcataccayctccctggaggcatcggaatggcaccctgaacactagtaactttgccaccttcttccctgtctcatcctttacccagtcctggggagggagctgtgtcaaccaatttgttggttaattcctaatgaattttctttctaaaaacttgggagtatttcacatgtcagagcagctctgccctcaaaaacgtagaaatcctatttctaacaggagattttattcaagctaactatgaatctgccaattttaatggtagtacatttgctatggtctacattgggttaaaatctccctatagggccaggtgcggtggcttgcgcctgtaatcccagcactttgggaggctgagatgggcagatcacgaggtcaggagttcgagaccagcctgaccaacatggtgaaaccccatctctactaaaaatacaaaaattagccaggcgtggtggcgggcacctgtaatcccagctactcaggaggctgaagcaggagaatcgcttgaacccaggaggcagaggttgcagtgagccgagatcacaccactgcactccagcctgggcgacagagtgagacaccgtcttaaaaaaaaaaaaaaaagaaaaagaaaaagaaaaaaaaaacctccatatagctcaaagagagccgaggaacactgaaattcaagatccataaaacaggagaagggactgatccaaatattggcaactctcaaaggttttaatacattaggtaggatatgggtatttatgctgatacaatagatgtctaaaaattctttagtcatcaatggtccaagtgatttaagaactataatctatctcatactagaaaggacctaaaatattttaaaataaacattttctataaacccataaagcataaaaaaaaaaaaatcaaggaaaacttatacctgaagggagcaagggtgaagaaaaggaaaaagtcgaacactggtctgcaagccatgagacataacaaagttgtcatagctggtctttgattttagctctgagcttcctggcaactaaaaccaagagggaatcttaagcagctccatggctttcactaatcacaaggggaaacacatttcagttcttcaagggaaacaaagctactccccacggtgaaagtccatgtcttatttgtatttgtatcctgtacttggacagagcccggcaacccatagcattcattagctgaagctgcccttcttcttccacttaattctaaaaggaattcctcacgtagagcttcacacaaggggctctgggaaattcagggggggcagtatccttaataataggcctaaagtacctgaagtgatgggtttcatcaatctgtttcttgttgcctacctcataacacagagacacaactcagggaagcaatcctggggtgcatgtgggatgtcaagcctaatagcaatctaagatcactgatttctgtaggacatgtttgatccgtaataaaatctagtctgtctatggactgtgtgtccttcatgcatatctgyacgtgcatacagcatttctcatgattgaacttttgataataattacatggcatgtgactgaattcaaggttgtttgctctggtaagggccagaagtgcaggtgctctctgtggctgattaagagaggattaataggctcatatcaagcagtaacacagcagcattgggggtcccttcaccatgctagacttctaaaatggagggtgtgcagcaaactaagaataccaaaatggaaacagytgaaatggaaacctgcttttctcctgggataatcatcatcattgttagctggggagacaccaatgactgtataacccctgcccatgtggaaatggaacgtgatactgaagctttcagggtggactcaaactttggaaggctgcttggctagtgatggggcaagagtgggtgggtatggggaactgggataaggmcaggaggctctgaggagtctgggaacagacttttgcttctaagcagctcatttttttctaacatcatggctgcagcatttcttctgtagtaatcagacttttaaattatggagttattttacaattactacttcagataaaacaaaagcttcactttctctgcactgatgaatgagctggtgagaggatgaagattttcattcactctggatggagtttgaatccacctatccatcatcatggtcaatgatgcctctcattattcttagttcatgtcattacctggaacttctcctcatagttctcgaaggcttccatgaccatacacacagcctccattgtgcgctcaagccggccatccatcctgttgaaacggtacatgctaccagacacatctaccaccaggcgcagacgcttgggtttctgttgtgggctgccaagctgagggaaggaataacagaaaagccgtttgtgaactggcaaacttcccctggtggytgtcttggggatctcacagaagctccagcgtgccagccccgagatgggcagaccagccataggctcagccctgcacaaggctgtcctagcaggtagcaaggcatctatgggttgtactgcagtaaacagaatttcagacttgtgctaatggttggggccacatggaaaatattttcctttggaatatagtccttttaaagctcactctagtaaagttgacttaccgaggttgatgccttaaaaataataygatgacttaaaaataataatctggaatgacatgtcattttcacttcatgcctcagagtcagtaactctagcaagagtttgtgttattttggagggaagcccatgtcaattttacttgtacgyattgggtagtgacctgaaaattattctccacacaggccacaggtaatgtcagattcctaaaacaaagttatgtgatgggggtctggcaaagaaattaaagaaaagattttaaaaacgacttttgtgtttactaagctgcacatcttctcttccttccacattactgaattagtgcttttcttttcttggcagtttgaaagcataaaagtgacatcaaattgttctagaaacaactgtcaattaagattacaagattaagtttgattttagacccacgactgccaatttgcagattttaagaaaaagtttgttagttttgctgacgataaaaaagaagaaggctgcgtgcaggggctcatgcctgtaatcccagtgctttgggaggccaaggtgggagaactgcttgaggccaagggttcaataccagcctgggcaacacagcaagaactcatctctacaaaaaaatacacaaatcagctagggtggtgctatgtgcctatattcccagctactcagctgggtaagctgaaagggtcacttgagcccaatagtttgaggctgtagtgagctatgattgtgccactgcactaaagcctgggcaacaagcaagaccctgtctctagaaaaaaaaaaaaaaaggaagaagaaaaattccagattattctgttattaaatatttgctgttattaaatataaaaaataatgagcagagttagtaatttcaagaaaacacggtgggtattgagagtgtaatggtttgaggcaaattcaacatatttcttaaaaacttgttgagtctgcccaaattaagaacacttatacatatgcttccatgactactcacaatttcagatgtatccaaacacatttgttgaccacaatgattcagtaaagaaagcagttgttgactcataccaatgacacagaaataagaactccccaaatcaccagatcctctctaaataaatatttaaaaggagtgactctcccttccccctaccagtcactgcacccccagctctcagtggcgactcagcaattctggttacccaggaatacaggagatcacagarctcaccaagagactcaatatttcatcctgtcatcattttgttttgctattacattgcaaatattttaaatttatggctgtctaaaactttacatactacaattatagttacttaagggagacgttcttattttctatattttttttcagttatatgatggacactgatctttaaagtaagagaacagtagaaaatcactaaggttgttttattgttttcacttgaaggtttctctaggcttaatagacacaccaggtgtcttcagtttcccctccagggcacctgctctgtgtcctgggagttgatctgtgtggacaatccgtgttggagctcagaaatcgataccctctaaatatggtgcttggacatgctgaactgaagaagcagcatcaaggtctcactgaccttcctccctctccccacaaagcactggataatttgttctctgaagtttcttcaactgtctaaagttcagagctccaaagaagaaaaccattactctgggcccttccctgagttttcatcaactgaactcatatcacaggaagaaaggctgaagtctgtcaacacacctggacagacttcggtcacaaaccattgctttgtgggcccaacagactctgtcccaggccactgtgtgctcttcaagtccactgaattgccctaaaaccatttactacccccgtaaaatcatctacacttctccatctccttttcccttaagaagaagggtacataagcatctgtacttcactgtgtggagggggactcacccttggtttcaccccggtgcacattaatacatttgtatgcctcttctcctattaatgtgccttttgtgaggtgattttcagagaaccttcagagggcgaaggggaagttttcccttggcccctacaatcacatcagctggcctcttggctgctggctcccagtgggttctgctcatgggaggcactggtggaggtcagggggtgagggtggagtatttattcccttggccccctctctgctgttgcccatgggttggctccccttctgctgaaggccaccactccatcaaccaccttctccaggttccaggaactgctgtctcattctgcccttttaggcctcagagtgagttagatccctgctgttgctatccctgggttactgcactgtttatttttgattttcctaaaccccacccttatttttgtaaatagtctttgtactgactgtttcttaaattacctaatttgagcatgccttatgtttcttgctgggaccttgagttgaataataaatagtataatatttatggagtttttcttcttcttcttctttttttttttttttaacataatgctttccttggttaccatattcaggatttgtgatattttgacacaactcacgaaagcaagtttctrtaaagagggctagactatgcagagctgaggctagcagttcaccatgacttacttgtggctccagctcaccccgacgtttgtagatggctttttctccagtcagcccatcaatgatcttggcatcatctaattctccagtagcttgatgtcttagccattgtctttctttacctttagcctacaaaagacacacatacacacacaaagccttaattagttatgcagagtctctgacatactttgtgcatgaataacaggaaacacacctgggatcttttcagtaagtgatggttctgcatgaacacagtcatataaatgaagtggtttctgctctgctgacaaataaatgccctttgtccgttttaattctttcaacatatggaacaataaaatgaatgaaagatggtatgcaaatgagtccctggagagatgtccagtatctggaaatataataatgggggcgcatttcttacagattttctgtcacggtgcttctcaaaagtttattagttaaaataatcagcttgaatttgttaacattgtctgtaagcccagagaaaatgtgacctttagaattctaccttttggtaaagagtttgttactcaagttctctgggacttagagtgcaartggaaatagctgaaaacaatagtatgtgaacattttgtaccccacaagtctttctggttatctattttcagaaatcttctggattacttttctaaaagttttttcacataatactttgctacaataacttacaattatgccagatagactaattttacggcagtaaaatgataaagaattatagtatcccaatcaaggcatatgcttattacagccaactactatatttacattaatgagtgggaagaatagctaagatgtttttatgcatgcaaactaaagtagtagttaagattatgtgttccaggcaacctacaaaatgggagaaaattttcgcaacctactcatctgacaaagggctaatatccagaatctacaatgaacttaaacaaatttacaagaaaaaaacaaacaaccccatcaaaaagtgggcaaaggacatgaacagacacttctcaaaagaagacatttatgcagccaaaaaacacatgaaaaaatgctcatcatcactggccatcagagaaatgcaaatcaaaaccacaatgagataccatctcacaccagttagaatggcaatcattaaaaagtcaggaaacaacaggtgctggagaggatgcggagaaataggaacacttttacactgttggtgggactgtaaactagttcaaccattgtcgaagtcagtgtggcgattcctcagggatctagaactagaaataccatttgacccagccatcccattactgggtatatacccaaaggattataaatcatgctgctataaagacacatgcacacgtatgtttattgcggcattattcacaatagcaaagtcttggaaccaacccaaatgtccagcaacgatagactggattaagaaaatgtggcacatatacaccatggaatactatgcagccataaaaaatgatgagttcatgtcctttgtagggacatggatgaaattggaaatcatcattctcagtaaactatcgcaagaacaaaaaaccaaacaccgcatattctcactcataggtgggaattgaacaatgagatcacatggacacaggaaggggaacatcacactctggggactgttgtggggtggggggaggggggaggggatagctttgggagatatacctaatgctagatgacgagttagtgggtgcagcgcaccagcatggcacatgtatacatatgtaactaacctgcacaatgtgcacatgtaccctaaaacttaaagtataataataaaaaaaataaaataaaataaaataaaaagaaaaattcaggaagcattgacaccaaggaatgaataaatttagtaaagatctttactcttatttgttttgaaaaaaaaaaaaagacgttatagctttcagctctggaagttctatttgtttttcttttcaatagtttccatttctcttttcattatgttcatattttccctaaaatccttgaaaatatttataatagtgttattaaaagcccttctctgttaattccaaaaaaaaaaaaaaaargattatgtgttccagcatcagcctggttctaactgttctttcaccactgttcaatatctgatctgaagcaaattacttaacctgtcgkcatctttgtttcttcatctctaaaatgaagataacactagtctctactttagtaagctattgtaaaattaataaaatcttacttggcatcagctaagaaagagcctggtgagccgtgttagctggtactattatttattgcagtggataaaacacatatggacaacttagtccactttaagttaagcatgcttccatcagtgtttcatgggaggtggctatgtgatagcactgtcgttggaaatacaaagccactaagcctcaggcagctggtgtctgttytagggccaggtcagccattacacaaagaagcaccacacaatataattctgggtattacagtatgtattgttttcttgttcctgatacccttgctggaaacaggggcaaaattaccattttggaataccaatagattaatgcaaacatcaccagcatatagattattaattttggtgggcagttaattctaagaactaccatgtatgtgacccttgggagaatgttctttccagattatgttcttggcaagaatcccatgatctctcaggaaaatgggtcactctggagcatagctatcatgtaaaacttgatcagatacccagctacvggtggcaagaggaaggaatgtgcacagtctactagaatctcttcctactgatctatctgtgaatcagacagacaaccttgaccacacagcacagtccttttcaggccccctccctgcaccagtgattgggacttagctcttatctcttctttcctaacatttctgttctctagtgtggataatcctcaggcttcctggataatttatcctgggaaatgctattgtrgatgaccatttatgtaccttcagtcttcacattgtacaactcttggaggtaccaagctgcagagcactggattctaatggctttcatagatgaggacagactctcacagactagtctagactgggaaaaccagcactgaagaaagtaaaagagaacagggtggcagtggttagcagccattaaagtggcatggaacttggattcttgggccgggtttaagagaaatgtgggattagaactggaatgaaattgtatataacatgttacttattggccatggcactgtcatcatgaagcattgattttccaagttttcataaatacattgagaaggcaatgaccccaaggactccctacccaatcccattagctgctacatggttttattaaccagtgatgcttttaccatgtaaagagccactgtaatggctatagattgtcatttttgtaatttttgttttttttttttttgacacaaggtctctgacacccaggctggagtgcagtggtacgatcatagctcactgcacccttgaactttgaactcctgggctctagtgatcttaccacctcagcctcctaagtagctgagactacaggcatgtaccactacacctggttaattttttatttttaaatttttgtggagttggggatcttgctatattgcccaggttggtctcaaactcctggcctcaggtgatcctcccacctcagcctcccaaagtgctgggactatgggtgtgagctaatttttgtgatttctaatgcaggtcacaactgtagtaaaaataaatttaaaccccaccatcttaccacagagaaaataaaaaatgttaaaattctaactaataattctactgtcctctttattttggtgtttctaaaaccagaatatatcttatagttgatggcaaaaaaaagttgtcaagatgacgggtagagggactaattgtgacctggttgctgtagctggaggacacacagctgatgttggcggagcatagcaggcatcagctcacggaattatttccattgataactgaggtttgtttttaactttggttaaaattcctaactattatcttaaacaattcaaaaacattacactatatagaaaattagaataatgagcaaagaaatggagcattaggatgcaaatacactataagcraagcaagattctttgctgcagaaatgactacacttccaataagatttacaaaggcaagattcccccaaggggaagaatttgggtttaaatttgttgggaagacaaattcctagaggactgcatgtcccaggccatgcaattaaagagggagaaaccgctacatttcatgaaatagatcacagaatgcttaaaactagacgaagttgagaagactgattcaagtaccatgaaggactattaggccctgtcaaaaaattcaaggaaagctgttacattttctgtgatatgtaatgcaattaagcaaaacatgtaactctcagttttgttcaccatcatgcaagaatccagggattttaggtcttaattttcttgtgctgatattgcttcttttcccataatgattatctgcccttaaggtactctctagcttgaagactgtttccattacatatgccaataaaagaaaaggacttggtaaaatttgcagtgagagtaagggagagggaaacactttttccaataaatctgctgcctttttctttctttttgggggttaacttttcaagtttaagtacttgtaataaagtatacaaatcttaagaatgtacttttacaaagtaaacacacaatcttaatcatccacaccgcctaagcctcccagtgccctgttctggacattaccttctccctgccaaaggtaactcctatactgacctctgttactataaattaagtttgcctgtttctgaactttataaatatgaaatcatacaatatatactcttttgtttctggcttgtgtggctcaacattatctctgtgagttacccatgttgtgtgtggcagaactttattctcttttgtgctgcaacggtattccattgtatgactttgtcacaatttacccattctacaattctgctgatttcagtttggggctattaaaaataatgccaccataactgaacatgtcttttggagcaggtatgtgcatatttcgttgtgtggaaatgctgggtcacagagtatggatatgttcagctttagcgtatactgatgaacagttttccaaagtggttttcccaatttacattcctgtgagcrgagtataagggtttcatttgtttctgtcctcaccaacacttgatattgacagcttaaaataatttttttagccattcttttggtgtacagtatactccttcatttttatttttatttgcagataaattaattacttttggtactgcttgtcattgatatttttaggaacatgaaccagtagtttttgttcttgagaactaaacatatgtatcagccttttgagtcaaaactattaggcacaaagacatttttataatagtagcactgttcattagttttcaagtatgtaacttgcagataaatatgggtagaaatctgattttctatcctctagccagcccacaaatacttggaaacttaaaacaggaagaggtgtcagaatgaatgctcttgggggcaatgggctggagggggagctctttagaaagttactgaaggctgaataaaaatatttactgttttggactgtgtatataaagccttctgtattttatgagacttagtgaaatacttcttgaaacagctcctactgcatttaaatatatgcttttgtttataataaaaggccaaacatgttctttgttatatattcctattgcatgaagtaaagtatccctgtaaatatgtccatctgttttgtattatacataaattcacactaatgagagttcattatatataaagtgaggttgcattagtaaaaagtctatgttacagactttctgaaaaagaaatataattttattactttcacacaaagaatacttagactcactgaaatactcagagaatgatgtattctggttaattcattttccaggaaatacttgcttaaccagaaagtacacacacacacacacacacacacacacacacacacacacacatctgtagcactaaagacagaataaataaacttgacaaaaaccaatcatcttgtggtttgtgacactttgtcttatgatttcagcactgaaatcattctgattaatcttatatctttgcttatttgggttatgattaatcaagactttttttttacctacaaactctataatcaagccaattttatattagtccttcagaatttgtttaatgaagagaataaaaagacttaagtagcaattgttatagagagtttatacattctacagaataaagcctacaggatcatcaagaaatatttgttgggtgaatgaataactgtaaatgatgttagagggtacctgtgaacagcgattctcttattaaacattagctcccattattttaacatctyttcatgctcaaccaacatatatttttatgctacaaatgtgtatgactcaaacaaataattattggattaaggaaaackttcatattgaatttataagataaactattaatcagtggaaacacaaaattttattttgtggttctcaacatattggtacagccattaaaaatattttactaaatatctgcttaggttcctaggtgctctcaatagtgaaagaaaagaggagatatgtaccttattcyaagggattcatgtttcttgaagtaatatctcattgcaaaggaaaacggtgaatcatctatggtgattctcattagaagagtttatattcttggatggtgatgtggaactaaatcattatgttgagtaacactatactatctatagtcactttttatgaactaaaattatttcaggtctttccttcaagaattaaatattttgtaattaaaaggagctgggaacatctcggtgtgcaaacataacaggcatcttatacttcacaagtttaaaactcaaccctggattccaccctagaaaacctgttctctctaagtcctcccccatctcagtgaagggcaagaggcaaccccactcttccagttgttcaggccccacactgaggagtcatctttgactcccttacatccacacccaatccaagggcaaatcctctcaactcccagcagtatttgaccatctcttaccatctccatgcctagccttagtcctgtcctcattttctctcccctagagcactgcagcagcctcctaaatggtctccttccttcagttttaaacagttttccaaagaggtttttcctgtacagttccttcttcacatagcaatcagaggaatttttataaaatatattgtcatttgtaagaactatattagaaagaacgagcacggttaactttaagtctttaaaaagcatgattgaacttatatttcccttatgattttcaggaatgaggctatttgcctctcccatatgtaacataaattgttacacttttactttcttctattccttctctataccaatttaactaaccaaaaaccaacagaatcaaaaatcttgatttttgtttaattttaaaactaatatgagaatttaggccctgtttattaaattcataatttttaatattgtatacctttaaaaagaatgattcttgatatttgagtttttaaaaaatatatttaccacaattatttagacctgattttgtgttgaactgcttctaatgctcattgctggtccttttatatcacaaggttcccattcttaaggaattttgattcctctcttaattgactagagtatttatacaaatatatatatttatttcaaagttatcttttaaaagggtgcttaagagacattttaagcctctgaatatctgcaaatatctgtcacctttgtactttggctgtgcacagaattcttgggtcacaagaattgtctcttcaaaatcctgcagaccttgttccactatcctgtggcattcaaggtttcagggacaactaatgtaaaattaatttttctttctctgacaatagcttgtttttcaaytgcttctctgcttttaggatttttttttttttaatttttgaaatgttaaaattccaygaagctgtgttgagtgcttctctctttgttaattttgcatggtacttagtaaagtccttttgatccatagacttaggcctttcttcagctgggtacggttttgttactactttggttattgtttatgaatatttttcagtggcctcctctacagggatatgatttgttcattcagcatatgtttactaagcacttaccatgtttcatgtactgttctatttgttgggacgactcagggctctgtatgtcagctctctactttgtttttactaattagctttcttatggtttttacccctttatttcctctggaataacttcaacttttttgttcacattactacttagacttaagactggatggagtctgttctttctacttttcatgtagatttgagttttggyagtgcagttttagttttcttatctttccttattgcattcaattcccttattatttctgcttgcttcttagccagatacttttcaatttatgtcttatttcacatacttcaaatttctttgaattgtgagaacacaaagcagatgttttctaaaaattttgttttctgaagaatattctatcccagcagcatcttctatatcttaaatgcttgttattccacctcagtacacaaccttttcatatatcccatgttattttatgttttctgtgtccttattctcgaatgatgagatacaaaactgttgaggaacagattggacagatgctccttggttgcattcactttccacttagtttctactagaattcttcttgagagrttttaaactggttgaactaaatctacaatgccagcagggaaggaattgaaactgcggacagtcccagcatgagaacttcatcaccacatcatttcttattttgtttggaaaagccattgcaatggggccaactttgggcatttggctcctttgtgatttagtcttcaagccaagtataagttggggctggtctggcctttttccagggctattcccctttcagcttcctgcttgtagccactgcatgaaacctagacctcccccacaaccatgcctccctagcgctgctgctttcaaacgcttttgcatggcagtaacaaaatggaggtcaagtgatctgcttctcaccagttctagggctctttcttcttttcctgcctttctaatcaagggatgttagtgacattctgttagctctcatgcagttactcatgaataatgctatttctcaggaaggttttcaagttgtctttgagaggcgtcccaacaaagtatatttagcaaaaattcttcaaagctgtttgcgtgtcactagcgctcttcattaatttctcctgacgtggggttttcaatatgtaaaggttttgactacttaaataattttaatggtcacctggcaaagactgagttagagatgcccatagtcatgcagcccagaagtcaggactatatttctaggctgcacctggatgaagttgtcctctcttggacactgacaccatgtcttgagtgatgagccattcatgatgtgctaagaaagagtaactggcactttgctgctctcctgtgacatgtagacgttccttgactcggctgttctcacccttcccctctctttgctctgcactcttgccttagttgacacatcttcctttggcttgggctgtccctctattcagatgaccacaaaaatacatatacagatagccatataaacatgaaaccctatctagtcctcaccttgctcctgaactccaaattcaggttttgaaaactttaaacatcgtgcttgatatttttacataggtgtcccaatagtgagaaaacatactataacatccaaagcaaacatctgctttcttcacaagtctgtcctcttcctgtgtctctttctgtcctccagggcttgaaaacctcccatttcccttccctcgcattcagtgtcacttgtctttttgtcctacctccaaattgcttcttgaatttgtctcattctttccattttcatttcaattacgctggctcaggtgcctatcacttctcacccgaataactgatactgtttcatgatttaatctcctggcttccacctctcttgtctctgaaactttctcctccatggctacaaaacttcctaaagaagatagaaccagctctcagctcatgcctgagaccacacagtgtcatgcatctgtctgtgctgtgccctcttctggggcgttgtttccacccttctctgtctggttaatacttgtgtgtccctcaagactcagctcatgtacccttaccttcaaaatctatccttgaatccttttcttctgagctccaccacattctaagcttccctctacctaggtacttaccatattaaatggaatgagatctttaggtgtctgccttctctgcccctcaagcccagaattttcttagtacagggacactatcttatcaatctctgtgccctcagtgccaaacacagtgtgtgctacacaatcagtgttcaaagcactatttatctgaacaaaagcttattttgaaacaccacaggggaaaaaaggaacataattgtttgttcatggagataccatgctagccaaagcaatcagagaaaggttaatttagtttagcctgagaatgaaattatgattatagatcagaaaaacattggagagaagatatgattaaaatcaagtggttttttgtaagaatggatgttttcttttgttagagcatgcatggtgcaataagagattgagattctgaaccaagtataattgaagtatttatggactgatgagaagattcatgcaatcgattcacaaaagggaaaaggttcaataactcaaagaagccaaggaaagtcaccggtgatagctatcttaatcgagaggaaagacatgtactgcaacataggcacatgttaaagcagacattaacatgggtggcaacagcatttcctgctcctcaaatcccacctggaatcaatgagtgggcctgaggctgtgctttggaaagtcatctcaagtgatgatttgctagttcctggccaaactttgtgccgttcaccaaggaaacacccatggttacttggattacatagcaacctcaaaacagctggaagatattagtcaactggagccacacaggactggcagaagatggcaaaatgggaccaaatcaaaggttccttgctttgttttcaatctaaagttccatattctacacaaggccgtgtccatgcttggtgagtagctaggttttaaactagccctatcttcctaaatggaggactagaaggcccacctgagaataactcccctatggattaaaaatagattcaataaggaaaacacttgaaaaatgctgtgttggcatttggataatgatgcaaaatgttttatgagtatatgtaagcatatgctttttatggaattgttgagttggaaaaagagaaaagagaccctaacaaacaataatgaactgagctttgggccgcacctgcctcgctagccatacagcccaggacaggttacaccatctttctaatcttctggtctctcatttataaagcgggggcaaaagatggcaaaaatggaaccaatatttcacaggattatgagaattgacacaatgtatgtttcctcatctatcaaatgtagaaaattatacatactggtttctgtagaggttaaatagcacaatgaatgtaaagtacctgactgggtacctggcctgtaatccaggctgataaatcttagcaagtacaatgaaggtaacaatgaagtgaatccttctatagagaatgctgcatgctaggcattgtttaagcatatcatctgagttcttcactaacatactggtatctgtcattcccattttacagaacccaggctgtctggctgcagagaatgacaataatgatggaggtgatcttggtgacaatgacgatgtaaagcacctagtagaatgcctggtgcatggtaaattctcagtaaatgcttgctattattataatgctggtattgtttgtaaagatttctaaagacggaagttctacatctattttagctacttattcaaggattaaattgcttttatcttctttcctatatcttaaaactctttcttggtattagttaagcctattttctctttttagatctccacagaggaagataataaaaactcccctgaaataattactctcattgaggatatttagtaagttattgactccaacccccttaaggatttttaaaaaatgggtgctactttgttttccatgcatttaatcttacttgttgcttttacctgagaccttcagagttttcattcattcctctttgaaagctgaaagcaaaactggacactgttttccgatactggtctcactgttgtggtgattagtggaagagccattccttgatgctaactctaattctaaccmaggcttcatttgtgtgtgattgtgagaagtcagagcagtggacctgacttttcatcttttggctgattgtataaacatgataccatttatctaaagcactgatctgaggattaaatgtgatagtgcttgtaaaagcaactatagcatagtccycaacaaataccaattaagacatcaactaataccagatgaggaatctgataccttcaattaaaaatgtattcttatatccctttgtagcactgtgaatcctctaagggtctctttctgcccacagggtaggactcaatgttgtctacctgttcttgtggcatccagggctattcaggatctggtgcctacgactctggcagcctcttctcttgccactgtctcccaccagggtgtgcttttctcagccataccaaatactctgtccttctctgaactcactgtgctctcctatacctctgtgcacttgtgcatactgcttcctctgttggacatgccctgactccttaagcacatgggaaattccttagcatctttcaagagtaaattcaaacatyacattctccatgaagcctttcctcatttcgtctcatagcattgtgtgcaaaattctctacagaactcaggaaatttagttgactttgagtcccttctttgaaggcagaagatgtatcttagttttctatctctaatgcctggtgtgcatcgagaacttaagaagtgagtgaatcactgaaccatactcattctcaagtcttaggataggcaccatctcccattactctcacctcctctgaatcatccattttggcccttagccaactattgccttaccctgaagctcagagccaacctggcagtgtcctggtgctctcaatgtccagggcaaggaacacttgtcaaatgagtgactatgtaagaagatccaatcattcaatatcatgttgttcacatatagtttatataaaatcttatgctgttttatcctaaataactgcatatagattttttttaaagtacatggtttaatttttacatttcttggattttgaaattagacatctgtttaattattataaagatctttcctcctggaaatgacagaacttttattaatctctggatacggattagatcttttgaaaaaataaggcttttccagagttttgggttaaaatggtggattaaaaacggcatcacagaagttctaatccccaatacttagcaaaaataataaaacttcccccagaaggacaattacaaataagaaccaaaaagggaaaggcaatcaccttgaaatacttcatggaaaagaaacacaagattccagagtagaatggagaarcagggcacagcttggctcccaaccttcttcctttgtcctgaaatgaggctttgctttctctttagacaaaaaatctgattttgtttctgattttaaggaacactcagcccctcctaaattatttgtgcaaactgaccacagagcacaatttctaatttgaaatctccaaacaatagtcatgcttaggaaatactgaagtgtcttaatattttcaggagsagtagcagtaccaacttgttcctcagcattgagagctttgtgaaactgcaaaagggcaggcaatgtgaaagcaaggggagggcagaaagaggaggagacaggggacatacagaatacatacactggatgatcaaaaagaaagccatgggatagtccagttttatgcagacattttcacactgagacattttttcggactggctaattagggttcagataattttctccaagactttaggaatgtgtccaggtttgggcccaggttattttcttggtccataagtagaagattacctgtaaattatccaggatgattcggagggagtgcacctgtcgccgaacagcacctgaaaacctttcataggttgcagcatcgtattcactcatttggatctcctttagcctgaaatcagaagagtataaaaagttaacagcttaaatcacgtatatgtgggtttttacttccattcgcctcctgctggaactttagcaaactccttggaaactcagattcatgttgaggagaaaaggcaagaagtgatgtctccagctgtgcttccagattcaaaggaggtaacatccagtagtgtgctagtaaatggttaacaaactaggacaagaaaaaagtcctagatttgtagtgtttgctgatttccatgatgtaaacattgccaccatgatcagttacaagctatgaacagtgagttggaaaaaaatgtgcacaattgactctcatgagccagtatgaattggctttgtggtacacaccattgctatatcccaaagccatattgtgatgtttgcagccgatcagttcatgtggcagattcctaagagggttcccatgggttgctttttaagatcgagatcatgtatttggttgaccaagataacagttcaagcctaaagaatgtaagttaatgtgctgctatgtatccctatgtgagagttttctaaaattgctgacagtgtaatttaaacaggacaattgtattttaatattattgtggctttgaaattctatcttcccagtatgctgctcctttttatcagtttttatcatttgcttcactgaagccccaccagcacactagaagctccccgtacacatcacatgccctgcaagtgcttctctcccacttggagtgtccctcccctgactttgcctaataactcccacttactcttcaagactcaagtcaatgattgcctcctccaggaagtctgctctgatccccgggtctttcttctgtgctcttatctcacttcattcctccctcagagaatttgctctccatgctgtaactatctgcctcctgtctccccaactaggctctatactcctttaggtaagggctgagtctttctcatctttatctttacagtgcctagcatggaacctaacatataatgggtgctcaaaataagtagaaatgaatgactgaaataaaaatacaactcagcattacttaaaatgcagcatcttaaaccgtcagtagaaagttcagagtgaactcccttgggttttacagtgttgtatccataatacattaacttaataatacatttctataaattactataaatataaaaggtactgatattaggacaaggaataataagtgcatatctcaaaagcccaagcatagcataatcttctaaactagtgtgttatgtatatgcatgcaatgttggagatatgaatcctaggtgtattgctgaaactcttatctaatgtgtattttttatcaccttgagctaaaacagaaacctcaaatactgaatgagaataaatgttctgtattcctccctgtcaggttgagcactgggaaaaatccattcaccatgggggagagcgccagaggcttattacaattatgtaatgctaggcctagactaccatggggcagactgacattcctgccctatcaccccactggataatacccacttaggtttcaagatctagctcaaagtccacatcctttgaagtcttgcttgagcccttgcataaagctggccattcccttttcatgtgccctatacagacatctaccatgaaactcgcatactttattgctttaatagataggcctgttgccctctgttatggtgttttcaaatttttctttccatagtaggaaatgttttacattgagatcttgtatacacaaatgcatgtatgtatataggataactgaaccaaaaatttaatgaaaaatacttttattacatgggatgtactctgatgttttctattctattcctcagggagaaggaccatgttctatttttccactgaacttccagtacctaccacaatacctgcctggcacacagtggcactcaataagtgctgctggatggcactttgaaaacagtgactattaaaaggtaaatacagacaaggccactataatatctgaatggttgtatcttgaggtgacatgccaaggtgcctttctaaatctaattaactctcagtcctgaagaataaaaagaaatatgtgtatagaacttgacctcctgacaatacctcttgtatttagtttctggcagtctctgaaatctctctatgactttttattagattaagttatgtctcaagtatcaaggctgacagaagctgggcacaatgaacaatgcaggacatgccacctaccccttcatacctaaaccggtgtgtgtttatatgtcaatatgcttcttctcaaataagtgagattagcactgattagaaacaaatgtagacacagctgtctgtggggtggggaggggatggaggagagaatatatagaaatatgtgattaaattagcgcattatggatacgactctgtaaaacccaagagaggtcacccagcaaatgaactttctacttacagttagtttaagatgctgcattttaaataatcctgagttgtatttttatttcagccattcaattcattttcagcatccattatatgttaggtaatatgccatatacttctataaatataaaaggtactgatattaggacagggaataatgaacatacgtctcaaaagcctaaccacaacacaatcttctaaactactgtgtgtgtgtgtgtgtgcacgcacacacacatgcaatgttggaggtatgggttgtaggtgtatacacaaatacaaacctatatacacacataaaaacacatatgtacatacatacacacaaacatatcaaggaaggagctagccatttggtaagccacctcgagcagactgatctttgcagagtgatcagaattagcttcagttataggcctaccactggtgcgatcatgttgcacccaaaacacaccacatgctgttttaattatgaagaaatctggaaaccatattccagattgtgtcggttttcagaaagatcacctacaaggcaatcaaagctgataaattttgaaagatgatgactgaagcaagggatgtagaaagaaaagaaattttagcctctggatcaaatgaggtacccattgctaatactctcaggcccacaaaactagctggaaacatatctttctgcttctttaaccctgatcaaaactgcagggcacagctgcttcacatcctagtaatctttgtggactaactgcattttgttggcacagtatatttttaaaggttatatttattgttacgtaagagtctgggaattttagttctcattttactttttcttataggtcacacttaaatactataattttgaatcaattataaggaaaacaaacataagcttagatccactgtgtgaggctgattagttttgcaaatggtagtggatgcaatctccacagctggtgcctaccctagacgcttttctaagtgtgtacatgtacctcattgtctatttcatttgcttttcactggtataatgtttctgttctattttattcatgttttatgcttgtctctctctgttagtctgcctgagttaatacattcttgatatgtaagggctggtatctagcttaaaaccagatacaaacagatgctatcaaaatgctgtgttgatgatgtcaggaacccacttagcagcattaggctctccaaggcactacacaaactttctggctcacagctaggactgcctagtttcagccagtctctgaattaagtactaaaggatgattccattacttgtatgcacgtgtgtgtcattcattccacaaatacatatgaaggtttgctacataccaggttcttggtgtaggtcctggggttatactagagcacaaaacagatggatgcctgccccccaggaacttacagtcagaggagagacaaccaattattcacacaaatcacataacgggaaagagtgataagagttgtggagaaaaggtacaggatgccataaaagcatcaatggtgggaaccgacctcattctgcatatgcctaagtggcaaaaccgttttaaaacctattatttgatgatagcgaggaattattactttttaaagacttaataatagtattgtgagtttgtatttttttgtttttatattatgcagatacacttggaaatattgacaatgaaatgatagaagtcttggattagcttcaaaacaagccagcagagaagactaggagtagagccagagttttcctcttgaagttggggggtcgggtccatcgcattcattatatgttcctctcaacttttatgtttgaaaagttcctagtaaaaggttgaaaaattttcagcagcattaaatgaaatattcaccaaatgggatgaaagtcccatttctacatgaaagtagaaagcaacatctttctcttggtgttttgctgtgccccatctttctcaggatctccatgtgtttctatttctttctctcctttctcacacgcttggccaactcctctgtctttcaaccaccttacggtattctcttttacttcaactgagactcttctctgcagcatttactagaggtgtayattttcctcatcccttccccatgtcctctctttcctctcttacatccgctaaattcatttgcgttaagggcacagatgccccttacttcttcccctgtagggcaattgtcctgaagagaaccacactccttactcctattatggcaacaggagaagggcgtacatacttgtggccaggcactgttacctttctgcctccctgtgaactatgtgtgtgccagaacactcttatctacctgtccacttgggcaaaaaattagactgaacaattacttggcaggttttaagggtggcaacaacagaactcattaattgcggaggggagaatgacacatttccaattgtttagttctttttctaaatgggtactttataattcataagaaatgcagagaactttcattctaacaagactgttcactacactattctctacccttttttgagaggcataaacactttcattcctaacatagttacctgttctcataacctccctgggagaaagggagagtgaattttatttccagaagagcaaattcaggcacaaagaggacagataaactgtcaacagtcaccagggaagccagcagaagggctgagagcaacactcttgcctctagcatcaagtgtgttatttacctgctgaaccctcgagggtctgagctggcaggctttcctgagggtgtggcggcagggcctgcattcttgtctctattgtcctgtactgtttacttgcaggatgtggaagcacagcatgtaatgtaataccagatgttctacgtgggaggaatttcataactcatacaytttagcatgcttttttctaactgcgcccakcwcctttcatgcagcacaaaaatgtaaatctgtttcccaaactactaccaggtcctggaatctaaaaggaaatactggtggttctttggtatttttcacttttagytgaagcacacatgtggatgtctagggtaacatcatgtggattcttcttattttttaaatggctcctattgtagtggcccagaacagctggggaatgtccgagggccacaggctcactggcctagattaaggcctctactcactgatgaggcctccctatccaaactcactgtccctcctcccgagctggtacccattatcctgagtgggctagctgcctctctcttccatagacactatgctcatcctgccctggtgcctctgctcatttagttttccctttctgaaatatcctagctcttctcttcccatctctaaatcctagctgagctctggccccacctcacatcagcccactaaacttgcctttctctgcactgctggaggggacagcctccgcaccctatgactttagcacttaactctgtgcatgtgtgtatgtatgttcccttgtcctgtctccgcactaatctgcaagatttctgagggcaggaagggaccattgtgtagacttacctgaattccctatgttgcctaggaacagatagacatggatggggcgatttgagctttagattttaaggagcctgagtagaaagaacaggtgattttgtttatttggctgtttccgttagggacggggatggctgtggatttcagtttgaggtccgagttgctgcatgaggtggaggtggaaacacacacaaatctaggtttcyccacagtccatcatgacatttcaccatagcagtagtgctggtctaaatgygatgggagcactgacctctgctggaatgctctctggcccatctctctagcagctctcttgacctcttcgggaactgcatctttctcagcctgagagacctggtacaccgtatggcctgcatccagccggtaagggcctcctttgccacccaggcctgccgtgtctcttccccctggaaggaaaacgtggaaattcagatgataaatctgaacttgaccacagaacaaaagttgggtcatggttttaggacagccttgtggaggatattaattgtacttaactagtaattaaacagtcaaattaccttctggaaaaagatgtattctcttgtttaggatgcttttcctttttcccatccattaaaatactacctatatatcaaggcttactccagcttctatgacaccttagctaatgctgctacctcataaggatccatactcttgtgtactatttgttatcctttcatatttatttttctcaccaactatatgatggatgagatattttatttacttttgcactaccgcacctataagagtggtttgaatatcatagatacttagtatatatttgctaattaaatgaacaactgtttccctccctcacatattaccttagttttccttaaaaaacctagacagttaagctataaatactgtttttttctgttctgcaaattataaaaataatgcacagagaggctaaatgacatattcaggacctcgtatcactggcttagccaagattagaagccaattattacaccaactttgacttctggtttgaacaatatataacataaacaccatcagctttagaacagtctttcaatagaaactcaagtttacataatacatattacatatacatattacgttttataacataacattgtatgaactgttcatattgtaaatgcctgtaaggccaggtaggtcatatgataaaaagtggtggggacattggctaacttaggatttaccttgtctaaatacatgaaaattgaaattattttaaaacactacatggaccagagaaaaaaacacatctgttggctagatttggcctttgggctataagattgttacccctatttaggggtagattagaatactagtaacctgtttcttttgttcattcacgtataacttgagaacttagaagggaatccaatattggaggggcagtatagtataatacactgctattgtagagtatattatgatatagttaaaccagactgcctgggtttgaatcctggctccaacccaccagccatttatctttggggaactacttaacttctctgtgtctcaggctcctctttataaagtggggatactaatattatttacttcatgggattgtcatgaagctaaaatgcttagagcagtatctggcacataataaaagccatataatggactgcttttactattattattaaacaaagcctagttacacagaattaggcaatttctagttttataaagtggaaaatttgaaggcttttagactttgggtaaattatgttacatttttctttcaccatcaccacccccacctccaccttaccactgagctttaactggtctaacaaaactaaaaccaagaactcaatatgaactgctttccttatgaaagtccaggtaggtcatttccttttgggaaataccatgagaactgcctattaattacactactttaatcttttgattggaacatatttcacttttatttagaaatgggtggtggaaaattccttctgggatgtgtgtgactcccatttcttactcatggccagccaataggcagaggggtacagtaactggacagtgacaatgagctataggaggaaaaggtgtttctgggatctaactcctttcctacaggagggtatcctgagtatgggtggatcatgaatttgagctgaaagcttcctaggtgctgagatgttatcattctggtgaaagggagaaagtggtggaaccatcagaagctggtgtgagtgactggccacctgagtcgcagggccccaggcaaagtcacactggggtggagcaggaggtgctcttcatgatctccacttcccagagcctttaatttgtactatttaaatgaaagtgcttaccagaggttctaagactgcagggcataagcctggacattccaaaccacttcagaagataatggggagggtgggcaagggaggagcattgatgaagaaaggggaatcaaatgacttgttgggccagagctcagttcaaagtaaagaattctgagggaaaagaatggcagagagaaaaagagaaattgaagccaaggagccttgatcaattgaaaactaaaagccaggtgaaacaaatgtagcctcaatctggacagatacgtgagctagtaaattcaagtttggtaacaaataggaatttctcccccagagtagtccactgctgggaaaccacatctggccagctcgtcccacaatgcattccatatggattaaatcttgttggcttgacgctaacttccagatcaaaggacatttctaaaaatagccttactttaaagctgatgcttgatgaataaacagagtaggcaagaagtccacaggcctatttgatagcacattgtctaagcagagaaacccatttcctcccgaggctgtcaaggccaagaggcacagaccatcctaaggaaggtgaagtacagagctcctgccagcactcctcatggtgagataagctcagacagtgcgcacacagtctggccctattcctgtggactcgcagatgtgtctgctccagctgccgcagaggaaaaaggaagacggcagtcctgggaacaatgccctagttgggcagccaagaggaaggagtcggccatcggtttagactgcaaccagccttatctcgaaatcttgcatcctcaacgtacttcgaagatgtggaagacaaggaccatttcttttcagtcagttgctgaagaaagaatttactgtggatttctggcatgatcccaaggtcatggaatttaaaagaagggattaacactttagtgaaaatattcttcatgccaggcactgtgctcagtgcttaacaatcgtaatctcatttaatcctcaccacaatttaaggtagttcacactatccccctttgactgatgaagcaactccaggagggtcagcatgttcttaggtcacagggtggcagagcctgtgggactccaaatgccaggctcttcacatgccttgatgtcacgctggggcagagggcaagacaacaatccaactgagtaatgagggaggctgagaaggaaagcccgtctctgagtcttctcaggggcgatgtgctggcctaatgggcttgggaaacctggggaaggctgactcaggagaatgcctgtgctaccaacctgttccgccagcccaagtgttgccgcccacgtgaggcatgttgtctgggtcctccttcccgtgtttgggggagcttacatcttcaccactgtctctgttgattgttatctaaaaatgaasaattgagacatttttactatcctgtgacaaacaccagggactgcatgacagaaaaaaaaattattttctcctaagtccttaaggtatcacataacctcaggccactggacttgataaatgctgtgagtatttggcaaaaattccatcagatggattccaacatccatctagttgggaagaagaactaattttttaaaaaactcttaaagaaaagtaaaggagctggactgcattatagctacagaatttttctggtgcaaaccaagctgtgagcatttacacatggcatgagacttaccagatgcagggaaaatggatctcactggagaggggtattttgccagtggtttaaaaggatcaccacctagctgatccagctgagtcattatatacacacttacccattctgttttcaaagaaatcccattactctgagagatgccattttacatataatatatggaaaagaaaaacaaaaagttatgtatgtatgccttagtgatagatttatgttatatactaaaaactgcttatttatttttttgacccacttcaatttttattatggtattttgtagctttcctaattcatctttattgtaaaactagatttatgattcctgcaattcaaatagaataagaagtactttagccttcctctgtgagagcctgaagttcattgcttcctatttcattcagtacagtgtcaccaaaaggagtgacaaccacacagaaatttcaatcctagtagtcagttcagtagatactactccacaataaatcaaagcattcacattttatgcacaccatgagcctgctctcagatgcaatgatttcccagaagacaagatcaaattctcattcatttgttcaaataagacttaaagaaaatgtactgatggaacattctgtgaggtaccatggggcctacaaagccattgacgattggttcctgccctcaaactgcttacagtggaacaagagagcttacaaataaatgggcctgaagtcagtctttagagttaaccattccatgttggtatatgggattttcattcttgatgttgggattaatgcagttaggtaggtaatttgaggtctttgcaaataaaatggccattcagaataaaatcaagacaacttctactgtcttacgtccaagttggttcatttcaagtgttatgacatcgtagggattttaattagctggacttttctgcaaatagcttcggcaggatcaacaaagtttttgccaaaacttcagcatactccaagaaaatttagcagccagacatgacaattgatataaattccacacacataatcatgctctaaaaatgggtgaaaataatttttcctcctgttttcttaaacaagcaagatagctaggaacatttagagaaaaaaaaaacatttaaaatactttcccaaaaacttgccaccatttttcaactcgtttataaataatgtaagagataagcagtaaattaaaatacatatactggctacaagaattccagaagagcactaatcaataaaattttctgtgttgatgaaaatgtttatatttgaggtgaccaatatggtagtcactagccattagctcaatatggctgtgagcatgtgaaatatggcttgtgcgactgaggacctgaattttaaattttatttagctaactaaaatttaaatttaaatagccatgtgtgccactggccatctcatcagacagcgcagctcaggcacaagcttgcctcagacctggagatcctgtttagagatctttgcagcaccctctagatgtactccatgagaaatgagaaggacaaagaacatttcaaaactggtacagttttattctgttgctaatttaataaatctatatgagkctgggcgcagtggctcacacctgcaatcccagcactgcgaaaaacaaaacaaaacaaaaaaactatatgaaaggtatgattacagtctaaatttttttwaaacaaacagaatggaacttacatatggagatactattttttttttttctttttgagatgaagtcttgctctgtcacacaggctggagtgcagtggtgcaatcttggctcaccgcaacctccaccttccaggttcaaacaattctccsgcctcagcctcccaagtagctgggattacaggcacctgccaccacgcccagctaatttttttatttttagtagaaacagggtttcaccatgttggccaggctggtcttgaactcctgacctcaagtgatccacccgccttggcctcccaaagtgctgggattacaggcatgagccactgtgccaagatacatttttttttaaataataagaagatactttattttttaatcataaagacacaatttatttttactttttattttatttttaattatactttaagttttagggtacatgtgcacaacgtgcaggtttgttacatatagtatacacrtgccatgttggtttgctgcagtcattaattcgtcatttacattaggtatttctcctaatactatccctcccccagccccccgccctgtgacaggccctggtgtgtgatgttcctcgccctgtgtccaagtgttctcattgttcaattcctacctatgagtgagaacatgcagtgtttggttttctgtctttatgacagtttgctcagaatgatggtttccagcttcatccatgtccctacaaaggacatgaactcatcattttttatggctgcatagtattccatggtgtatatgtgccacattttctttatcccgtctattatgggttggttccaagtctttgctattgtgaatagtgcygcaataaacatacgtgtgcatgtgtctttatagtagcatgatttataatcctttgggtatatacccagtaatgggatggctgggtcaaatggtatttctagttctagatccttgaggaactgccacactgtcttccacaatggttgaactagtttacagtcccaccaacagtgtaaaagcgttcctatttctccacatcctctccagcacctgttgtttcctgactttttaatgattgccattctaactggtgtgagatggtataccattgtggttttgatttgcatttctctgatgatcagtgatgataagcattttttcatgtgtcttttggctgcataaatgtcttcttttgaaaagtgtctgttcatatcctttgcccactttttgatggggttgtttgactttttcttgtaaatttaagttcattgtagattctggatattagccctttgtcagatgggtagattgtaaaaattttctcccattctgtaggttgcctgttcactctgatggtagtttcttttgctgtgcagaagctctttagtttatttagatcccatttgtctattttggcttttgttgccattgctttcggtgttttcgtcatggagtccttgctcatgcctatgtcctgaatggtattgcctaggttttcttctagggtttttatggttttaggtctaacatttaagtctttaatccatcttgaattaatttttgtataaggtgtaagaaagggatccagtttcagctttctacatatggctagccagttttcccagcaccattattaaatagggaatcctttccccatttcttgtttttgtcaggtttgtcaaagatcagatggttgtagatgtgtggtgttatttctgaggcctctgttctgttccattggtctatatctctgttttggtaccagtaccatgctgttttgattactgtagccttgtagtatagtttgaagtaaggtagcgtgatgcctccagctttgttctttttgcttagcattgtcttggcaatgygggctcttttttgtttccatatgaactttaaagtagttttttccaattctgtgaagaaagtcattggtcgcttgatggggatggcattgaatctgtaaattgccttgggcagtatggccattttcacaatattgattcttcctatccatgagcatggaatgttcttccatttgtttgtgtcctatttcattgaacagtggtttgtagttctccttgaagaggtccttcacatcccttgtaagctggattcccaggtattttattctctttgtagtaattgtgaatgggagttcactcgtgatttggctctctgtttgtctgctattggtgtataggaatgcttgtgatttttgcacattgattttgtaacctgagactttgctgaagttgtttatcagcttaaggagattttgggctgagacaatggggttttctaaatgtacaatcatgtcatctgcaaacagggacaatttgacttcctcttttcctgattgaataccctttatttccttctcttgtctgactgcactggccagaacttccaacactatgttgaataggagtggtgagagagggcatccctgtcttgtgccagttttcaaagggaatgcttccagtttttgcccattcagtatgatattggctgtgggtttgtcatacatagctcttattattttgagatacgttccatcaatatctagtttattgagagtttttagcatgaaggagtgttgaattttgtcgaaggccttttctgcatctattgagataatcatgtgatttttgtctttggttctgtttatgtgatggattatgtttattgatttgcgtatgttgaaccagccttgcatcccagggatgaagccaacttgatcttggtggataagctttttgacmtgctgctggattcagtttgccagtattttattgaggatttttgcatcgatgttcatcagggatattggtctaaaattctctgtttttgttgtgtctctgccaggctttggtatcaggatgatgctggcctcataaaatgagttagggaggattccctctttttctattgattggaataatttcagaaggaatggtaccaggtcctctttgtacctctagtagaatttgctgtgaatccgtctggtcctggactttttttggttggtaggctattaattatttcctcaatttcagggcctgttattggtctattcagggattcaacgtcttcctggtttagtcttgggagggtgtatatatctaggaatttatccatttcttttagattttctagtttatttgcacagaggtgtttacagtatgctctgatggtagtttgtatttctgtgggatcggtggtgatatmccctttatcattttttattgcatttatttgattcttctctcttttcttctttatcagtcttgccagcggtctatctattctgttgatcttttcaaaaaaccagctcctggattcattgattttttgaaggattttttgtgtctctatctccttcagttctcctctaatcttagttatttgttgccttctgctagcttttgaatttgtttgctcttgcttctctagttcttttaattgtgtttttagggtgttgattttagatctttcctgctttctcttgtgggcatttagtgctataaatttccctctacacactgctttaaatgaaagacacaatttttacaatagtcctgccacagccccaaggacttctgggctgctttcagaagcatcttcagaatctatggctggtttttaatatctttcatggtgacatttatgtattctttaaaaacagatttgatttttaataaatagtcaaatgacacttagagttgaattctggtggaagctatttgctaacttgctggtaaactttggcaagtcaagtaagttctccggaccttcattttcacatcagaaactaaggaggttaaactgaattatttctaccattacacccagctttgatgtgctgtgactgattcaatgatttcaaatctggtaaataaggtgatcaaagtagggttttcattaaaaccaggtacaattatataataatgagacaactgacagcttctcatttacaatggtttgacataacttttcaactttacaatgggatgaaagcaatacacacattcaatagaaatcatacttcaattacccatacaactattttgcttttcacttttagtataatatttaataagttatatgagatattcaacactttattataaaataggcttcatgttatatgattttgttcaactgtgggctaatgtaagtgctctgagcatgtttaagataggctaggctaagcaatgaagtttggtagatctggtgtattaaacacattttcagctkaccatatttctaacttacgatgggtttattgggatgtaagcccgttgtaagtcaaggagcatttgtagtttgcttatatgcgttaagactcttctgtaggccaattctaaaagagaagttccaaaaatagtctaaacaattggaagaaccattctgaacaccattcctcactttgtggggcatgtgtgtgtattctggtacactatttaaaaataaattttaaaaaaccagaagaggtatgaaaggcaaattcctatgtgtctactaactttactttcatcaaatattatctccctaagacatttcacacaatccagttattctgctgtaagagaacagtcttttaagaataagtactacaaatgaaggcacaaagtaaaagaaaaggcccctcaaatagcctccctcagttaccttcaaaattacgctgttgaagttgcaaagaaacctataatggccatcagggaggcagaagacaggtgacaaaatttctgggcagaaaggaattggcatgttctttgccacctgtgtgtcttgccaggccgtctgctgggaaatcgggctgttcacattgccaacacaaggcagtttcacaccaaccccaaataggagcccagagatgtttcaaaatcgacaaattcttgacaaaaacatcagccaaaacctgttatgttccagggacaattccagggatgtttaattagaaggaaggcacttagcttatctaattttgtgtcattttatgaatgccactcactcactcacaggaatatagttctttaggtggatgggaggagtacatatgtcaagaagttttcaaagccattttaggacacctcttacatcaattgacaatgattcataaaagatgcaagtcaggaattctaggacagtccaacccaggacagaaagaaactggaacatactcagggaggcttatcatttgaggaattttgtttcctgggacagccatgtggtagacagccastagccattcagaaagttgataagctgctgtttgctttcatgtgcgtgttgaaaagcatttggaatgtacttcctttgagagctggtttcatctagaaaaagctcaagtaagtaattccaattactgamataaacactactgaattcacttaaagggatcaaaaatttccccaaaaaagaaaatattatggccccttataacttttgatgcaacccgatgctgagccccttgatgtatttctcacagctgacacaatctgctttcttttaggtaagtgtgctataatcgtaagaatcattatccccttacatgtgaattaaaatggaaaaaacatggatcttgtaaattacaactcataaaaatgttccagagtaaagccagcacagggaagggacatgactcactgaagccctgtaattctgggcaaggcccatatattttaggctcctccttgagttcatgacttttaaaarccatcaataaaatgatataaatagccagattataatcctggaagaaaagtgagcttttggaggtatgactggacaacacagctggagactagtgtggcaaagcagacatttctcatgtgagcctacctcacgttcatttcctcttttttccttttaaacagaagtcggatatatcatgcttggctggaattaagcacaataatcccattctcctttgtcagtgactggtctaggggaagccacgtggtctgagacgtgagggaaagtctgtcaggatgcttctaggaagccttcccaggtaaaagaagagatggttgtgagaagagcttctcactgtcctggatgcactgctctcttgtcccctccaacacacacacatacacatacacccacttcctgccttgggacacagttgagtgagaatatgatgcatagagctgtagcatccacatggtgaccatgtgttaacaagaggatggcagattagaaggctggaagagtctatgccccaatgacattgttgagctgctgaaccagccctgaagtcacttgtctctaatctcctatgtaagtaaataatacatgtccttatagttaagccattgttatttgggttttctgctacttggagtcaactgcatgcaaactaactgattcatgtattaagggatgaatgagaggcagyagggcagaagctactgtcttgatcttcctgaggatgtcctacttctaacgagacatgctttgaattttctgacattaaaaattaccataacagcatcagcacagaaatcctaattattacagttgcccactatcttcttgattgattaacaggcaactgaatgtattcattcactcatactcttgtgcaaacattcctatgtatgtgtgtggtgcatctagtactcacgtgggatacagagatttctcacacaggatctttacttctaggaggatattgtgtaaaagggaacaaagtcacagcacaagatgatacaggctatgataaggttctgaatatacctgcctaaaacaaaatattgtctgaggttattgtacccataggttagaaatttctttcataggmataaaataagattgatagatggctagctagattaataaagaaataagagagaagatccaaataaacacaattagaaatgacaaaggtgacattaccaccaactccagagaaatacaaaaaaacccctcagagactattatgaacacctctctgcacacaaactagaaaatctagaagaaatggataaattcttagaaacayacaacctcacaagattgaaccaggaagaaattgaatacctgaacagaccaataacatgttcagaaattgaatcagtaataaaaaaacctaccaaccagaaaaattcctggaccagatggattcacagctgaattctgccaaatgtgtaaagaagagctggaactaatcctactgaaatgattctcaaaaaatctaggaggaggaacttctccctaactcaatctatgcagctagcatcattctgatatcaaaacctggtagagacacaatgaaaaaagaaaactccaggccaatatccctgatgaacatagctgcaaaaatcctcaacaaaatactagcaaatcaaatcaagcagcacatcaaaaagcaaatctatcacaatcaagtaggctttaatattgggatgcaaggctggttcaacatatacaaatcaataaagatgattaatcacataaacagaactaaaaacgaaaaccacatgatcatctcaatagatgcaggaaaggccttcaataaaattcaacatccctttatgttaaaacccttaacaaactaggcattaaagaaacacacttcaaaataataagagccatctatgacaaacccacagccaacatcatactgaatgggcaaaggctgaaagcattctctttgagaatcgaaacaagacaaggatgccctctcattactcccattccacgcggcactggaagtcctagccagagcaatcagacaagatgaagaagtaaaaggcatccaaatagaaagacagaaagcaaacatctctcttctccaatgatatgattctatacctataaaaccctgtagtctctgcccaaaggctcctagaactgataaacaacttcagtaaagtttcaggatacaaaatcgatgtacaaacatcagtaacatttctatacatcaataacgtccaagctgacggccaaatcaaraatgcaatcccattcacaatagccacaaaaagagtaaaatacctaggaatatcattaaccagggaggtgaaagatctctacaatgagaattacaaacactgctgaaagatgacacaaacacacacaaatcaaacactcataaatyaaagtaatggcaacaaaagccaaaattgacatatgggatctaactaaactaaagagcttctgcacagcaagagaaactaccatcagagtgaacaggcaacctacaaaatgggagaaaattttcgcaacctactcatctgacaaagggctaatatccagaatctacaatgaactcaaacaaatttacaagaaaaaaacaaacaaccccatcaaaaagtgggcaaaggatatgaacagacacttctcagaagaagacatttatgcagcgaaaaaacatatgaaaaaatgctcatcatcactggccgtcagagaaacgcaaatcaaaaccacaatgagataccatctcacaccagttagaatggcaatcattaaaaagtcaggaaacaacaggtgcgggagaggatgtggagaaataggaacacttttacactgttggtgggactgtaaactagttcaaccattgtggaagacagtgtggcrattcctcagggatctagaactagaaataccatttgacccagccatcccattactgggtatatgcccaaaggattataaatcatgctgctataaagacacatgmacacgtatgtttattgcggcactattcacaatagcaaagatttggaaccaacccaaatgtccaacaatgatagactggattaagaaaatgtggcacatatacaccatggaatactatgcagccataaaaaatgatgatttcatgtcctttgtagggacgtggatgaagctggaaaccatcattctcagcaaactatcgcaaggacaaaaaaccaaacaccgcatgttctcactcataggtgggaattgaacaatgagaacacatggacacaggaaggggaacatcacactctggggactgttgtggggtggggggaggggggagggatagcattaggagatatacctaatgctaaatgacgagttaatgggtgcagcacaccaacatggcacatgtatacatatgtaacaaacctgcacattgtgcgcatgtaccctaaaacttaaagtataataataaaattaaaaagaaaacactcataaatcagagatgacacaaacaaatggaaaaacattccatgctaatggataggaagactcaacattgttaaaatggctatgctgcccaaagtaatttgcagattcaatgctattcctatcaaactaccaatatcattttttcacagaattagaaaaggctcttttaaaattcataaggaaccaaaaaagagccaaacagccaaaacaatcctaagcaaaaagaacaaacccataggcatcacactacctgactccaaactatagtacaaggttatagtaaccaaaacagcatggtgttggtataaaaacagacacatacattaatggagcaggttaacgaaccccaaagtaaagctgcacacctacaaccatctgatatttgacaaagccaactataacaagaaatggggaaaggattccctattgaataaatggtgctggaataactggctagccatatgtggaagattgaaactggatccctacctttcaccacatacaaaaatcaattcaagatagattaaaggcttaaacataaaacctaaaactaaaaaaaccctagacaaaaacctaggaaataccactctggacataggccttggcaaagatttcatgacaaggactccaaaagcaattgcagcaaaaacaaaaattggtaagtggaacctacttaaactaaagagtttctgcacagcaaaagaaactatcaacagggtaaagagacaacctatggagtgggagaaaatatttgcaaactatgcatccaacaaagatctaatattcagaatctataaggaacttaaatgaatcaacaagcaaaaaaaacaaacaacccattaaaaaatgggcaaagagacacttctcaaaagaagatgtacacgtggccaaaaagcatatgaaaaaatgttctatgtcactaattattagagaaaygcaaatcacaaccacaatgagataacatctcacaccagtcagaatggccattattaaaaagtcaaaaagtggcctttgagaccctatgctcaggcccgctcccagactgtaatgtgtactttcattttcaataaaaccccaattctttccttgctttgtttgtgtgttttgtccaattctttgttcaagacaccaataacttggacaccctccaccgttaacatattttggtgaaccagccaggaggaagagtcaagcaggttcrctagggccgctcagggagagagaacctagaagcctggcatgctggcaaaagggtaaaaaaagctttktatggtttgaatcttctggaaacatcagagaaagactgtccttgccatccacactacaacaaaacttcgggagcttgaactttgggttcatggtgttgcaactgagaagggcccctccacactggaacagtgcacccactggaaccatgagagaccatcaagcttcagatgatcatgcaacaaaggctccagtcagttccaggtgaagacaccaccactggccatcaagaaactaccctgcctccactagatagagcagagtgagagttccgtgatccccaataggtaaagactacgccccaggtcagcatgaagcagttacagaaaaaaagaccatcggtccctctccttcccataaagatttatgaggatcacatctctaagtggggagatgaygcaggaaaatagagtctggaagcagggaacataggccgattcacactttagctataacaggaaatatcctctccatagggcatacaccgagtaaatgactttgtaacttttcttcatccacttgatttacatagggtgtaccccaagtagaggtatttaaactcacaaaatctctgtaacagggcctttgagctcctatgctcaggcccatgctgtggagtgtcctttcattttcaataaaacccttcattccctccaaaaaacaaaacaaaacaaaaaaagtaaaaaaataacagatgccagagaggtagcagagaaaagggaacactaatacactgctgatgggaaggtaaattagttcagccaccatggaaagcagtttggagatttctcaaagatcttaagacagaactacctaccattcaatccagcaaccccattattgggtatatacccaaaagaatataaattgttcatttatgtgaacaatgtatatatattcacatttataaagtgcatataaattatgcacataaattcatacacatttaaaatgtgcatgtatgcttattgtagcacttcccacaatggcaaagacattaaattaacctaggctcccatcaacagtggactggataaagaaaatgtggtacctgtacaccctggaatactatgcagccataaaaaaaataaaatcatgttttttgcagcaacatgaatgcagctagaggccattatcctaagcaaattaatgcaggaacagaaagtcaaatagtgcatgttctcacttataagtgggatctaaacattaaatacacatgggcataaaaaaggggacaacaggccaggcacagtggctcacgcctgtaatcccagcactttgggaggccaaggtgggcagatcatgaggtcaagagatcgagaccatcctcgccaacatggtgaaatcccatttctactaaaaatacaaaaattagctgggtgtggtggtgtgcgcctgtagtcccagctactcgggaggctgagggaggagaatcacttgaacccaggaggtggaggttgcaatgagccatgatcgcaccactgcactccagtctggcgacagagcgagactccatctcaaaacaaaaaacaaaaacaagcaaacaaacaaacaaaaaaacggggggacaacaaacaccagggccwacctgagggtggaggttaggagatgaagactgaaaaactacctactatgcaatcccattcacaatagccacaaaaagagtaaaatacctaggaatatcattaaccagggaggtgaaagatctctactatgctcactaccttggtgacaaaatcatttgtacaccaaatcccagtgacatacaacttacccatgtaacaaacctgcacatgtaccctctgaacctaaaataaaatatggaaggaaaaaaaagtaaagagctataacattgtattgtgctctaaaaattagagggaacagagcagcttaattacaagtggccagtttttcagctytatattcttatgcttgttatgagatcaataaaaattatttcctgattttctagttctaaacatgccaagaaaacaactgccctaacctggtatgctaacattaataaatcataattatgttctcaatactgtaataaaagtgtacagcagcctgaaaaaagaaatttctttcatagatatatacaatgaaagtcacataatatttccctaggaatgatgttttttcacatgaagtcagctggctaaataacaacaacaaaaagggctgaccaccacccagttttcattaataaccagtatgttctacaatgataacacatgacaaaaatacctttattgcacaggtagcttctatgtgtttcaacttcaacctctggcaaagccattaagtatgcaatttatcttcagttcttccttggcttggtggtaatatttgccttcaaatactcaatgaccctctgccctctttaatccctcaacacccttaaaaagcagaaaagcatctgacttttggtcactcatagctacaaattatactgtagctgatattcattcatactaaataattaacctcagtgggcatttctattttaagtgcctttataagtaactgaaaaataaagccttgttttctttgttagaaagtttgagaatcagtaaggaggcagaggtagtgggttgggagcatatgaggcctattccctggtcctaaagacaaatgcctattagggcgacttgtgataatacaggtgagaaggagaatgaatggtccatggtttgtcttgcagaagtcctgtcttctggcatagaaagggtttctttccttttcaaatcaaccatcagcccctccttgttgactgtgagctggacccttttgccaacctccctataccaacccaactcagtctcaccctccacctctccacaccaacccaactcagtctcaccctccatctctctataccaacccaaatcagtctcaccctccttcttctttctgcttgaacactcgtagaggcttaagaatattttgatttctagcacaagtgatatgcttgataaacatttaaaaacatttgaaactataaccaaagccactccccctccccttctatctagatgttctgaaacacatccctataggcatctttattatttttctgagtttacaaaatctctgacaaagaactttctcactggaatgaccttcttccgtaagtgctattatcgtgcaacaaaaacacccagtctagtgaaaatgagcaaaactttatatattttacagacttgggataaaaggagaaaaaaaagtttattaatattttactttaccttttattaactgatgtagtagttgttaacagtggcatatacatatagccttgtacataagaggtgctaaataaatatgtattgaatgcaagcatgggagtctgctcagtaacaggaaactaagaatttaatctgcatacaatcttttccacagtaaagtgtcatctgagtgcctgatgggactctttccagctctgcctgccagcccataattggcacacagtggggccactggtcagcagagagccatcttcttctttattttttgagacagagtctcactctgtcactcaggctggagtgcagtggtgcgatcatggctcactgcagcgtcaacttcccaggctcaggtgatcctcccacctcagtttcccaagtagctgggattacaggcacacgctaccacacctagctaatttttgtattttttgtagagctggggtttcaccrtgttggccaggctggtcttgaacctttgggctcaagcgatcctcccacctaagcctcccagagtgctgtgcttacaggcatgagtcactgtgcctggcttagagagccatcttctaacaggggcaggaaaccctgttagctccgggttattcttaaatcctgatcctgcttcaccctcagcttgactttgacccctaccaaggtctcagctcagttagtttcaggccgagctcctcactgggccttacatggactccctgtcatagcctctgagtctataggtgatgacctctcttcttacttcctggtccaaacagagttgtttgaaaggctgtccaaaataaaattataggctcgtagaactcatccaaagcaactgctcattttacttagagtaccttatttattcattctcttctatttaaattcaagtaggaatgaaagatgaagaagatttttggaaaatctgggaatatggaatgcagaatgatgaagtcaagaggatgattcacggattaagatgctatacttataaacaaacctttaagggaaaccaaatgttatcattgtgtgtaggtgagtgtcaaaaacaaatgttgaaaaattgcaaacaatwggcacagcactggtttactgcatggaaatgcacccttcctgctgcctcctcacagactcacactcagtattaacactcacacaagaacaaccgctaattagattgagagacagcatgggtagggcaagctgtcaggtcttcacagagtctaccctttctatttttgcctcttttaagagccttcaaaaggttaacattcaatactatggtaaattaaagcccagccatcagacctccatagccaaggaagaagttagcaaagcataacaaccttgactacagcaaatagtatgcagatgctttggttttggtatataaaaggtggtcctggcaaaagacatttaatgccacgtacttcattattaaagctcaatgatctctcatggcatttcttggcctggtgacttcaatctcatactgaagcactgtgcttttctcaaaatatcaaatctgtttggcatttttaaaagctattctgttttccatcccaacagaattctctgaggtgttaagggtaccgggaaaagggagggtaggtagacaagccattattatcatgactgtaggtagaagcaaaagggggatttaatatgacccagatcctaaagattcttggaagcacctacatgcaaaagaatttagcatgaggaattcttttctgaagacagggatgctagctgaattagtgatggacaggttacaatgctatagtccctctggagaggtatttctagcatcaaatcttggctgctgctttttccattttctttgttactacaagtcacattatactgttacctatcatttcttccaggatgcttcctacaactgttggtttaccatcttaggccacaataatgcttatgaatccactgcctactgatgtttaccctgagtttttccaaccatttcctcaaggcacctggagttcctgtgaaacatatgttggaacacccaataataacaatcttcctttgcttccagcaggccgggcactatcacttacatactttttgacagtcactatggttcaaaactatttgtaagaatacaaaataataacataaggaaaggccacagagaaataagcaatctgcactgcacacacacaactcaggagcgggtaacacatcactccgtagctaagggcatttgtggttttgggctttgaggcttactgtgtgagggaaccttccaggttgctgcgctggctccaatacagagtatgaaacagcacttggagcatgggaaaacttgacacatgaagtaatcgtaatgtactcttttatgatagtacatttatgtatgtgcatatgtatatatacatccacacatatacattttttgaagaaatatttcagggataaatagcattgcaatgaatcagtggtatggggtatgtaggaagatgtggctagatatataagctggtatggattctaggtgtaaacatctggagggaagggactgaatcttattcttcctaacatcttcagcaccaggcacagtcttggtacatcacagaagctcaggaaatatctagtgactaaatgaatgactgcatggccattgccactgcggctgtgtcaaagccacagaatgaccgcagtggtatataagccaccaataacatagggaagcctgataactgctctcctggaacttatgggggcaagttagaaagaaagcaggaactttggggtaggagaaaagaataccattggaattcactttttgaaacattcttttaattttaggttgtgaaggctcttacgatgtgagcgacaaattaagaatactaaatatcggttggtaaagctttctaattaaatttagggcacagctgatctgatatatatttacattatatatcactgataytgagctgcatggtaatcagaaacacacaaacaattcacataatgactgtaattaatcaggggtttctacaatcgaacataggygggttggtcatttcctcctttgtgttagttctccattttctttaaccatgtaaatctgtttgtttcccacttakaccttgaaattcttactcctaaaaagactagagtcctggatgccattccaacaagttcccctgcctctgcttcctgtggctccctctttctccctatacccctcccacttatctccctttgtgccccatctgagaattcccttagcagtgcctgtcttgggaggttgagggctttaggcagcacaaactttgagacatgaagttgtgtatgtttggccatgggtgccgtggcttggtcagcaggcaatgctgagaatcatacagaggggagaggagagaacactacgtgaagagactgtagattaacccagggtcttgggctgagctagggtgagtagggtggcaccagactttccttggtgtcctccagagcctgtactatcctctattgcattattataattcttcatgacacttaggaattttttcatgtctgtctccctctactttatgattgcaccccaagacctaacacagtgcaatgttctagttgtgtagtcatgtgaggtagcttaacagaaccctggttttcagaaacacactttatacccaatttttgacgtattctgacatgtcttagcattattttttgggatgaagaagtttaatatagatagagtttgaggttaggaatctgtaagagaaacgttttaaatgaaggaaagagcctgagaggaatcagcagtgtttgagtgtgtgggagtttacagcagagacagcactgggatgaaagttgaagcctgcttttcagcctagcatggcctataactctctgtgtgatgccagacaagtcatttcagctttctgcacattcgtttcttcatcttcaaagtgaaaaaaaaaacagactaaattatttctagctctaatttttttcctttggctcttatataatttacttcagttttagtttacaagttgccagggatcaatttgaataaaatggaaagttaggtttaaataatatttttatacgattttattaaagtttagcttttcttcaaattggttcactaagattttgaagttaagaaaatttttttgaaaggcagcttgatgtcatggaagaaacattttatcaggaattagaagactgacttttgatcctcattctggcactaactggtgaagtggttttggccaaaatgacttatcttctcttagttttcttcacctaaaaaaatgagggggacagttggcagaaatgcaattcaagtacactgtgtggttctgctgattgataatattttatttagttattataatgtgaaatctgaacactattctaactaaaattctactatgaatttactggggtaagtgcatatctgacattgggatagggaataggaatagggagatattaagtgtgtatcatatgtagggatgggaaagtgaaagagtgctcaatcctgaatgtctatggttgaagtaaaaaataatgcctaaaatggatagaagaaacatgagtatgctatttagagatatgggggcaaaaaataaatcagcaaaaagagttgaaagtgtttgcatctgagctatttttcataagaagtcttatacatttaattttaaaaactatgtccatacgtaattaagataaagctttaagtgactccctttcttccttgccagttagtctgcacacctgcctgtagtttatttaacaagccctggctatgaatcaggcactctgctagatgctgaggatacaaagcccaatgagacctggttctgcacttcatggagttttcagccagaactgggaggggatctgtactcaataattagtgcagagagcaggtgggatcctcagccaggggtcagcacaatatggtagtggagcaaaccagaagagctcctamcccagaggctaggggtcaggagaagagtcagagaaattttcctggaagaagtaatgttcaagaggaatcttgaagaacgagtaagaattagacagcgcaggagggtggagatttcaggcagaaggaacagcaggggggtgctgagttagaagtgattaagtgatagcttattaatccacaaagagccccttgtctgtgatcttacagttcttgttacagcacccagaataaccttcgtgcctgatacatattcattgaggtttatgatcataaaatacctcatcttaaatcaaagccgaataaaccaatcagagcacacaaagatttatgtgaaaaattccaataaccagagaagttagaacttatcactgctaaatgtattcttccttattaagaacatcagggagaacaaagctggaggcatcatgctacctgacttcaaactacactacaaggctacagtaaccaaaaactgctaccaaaacagagatatagaccaatggaacagaacagaggcctcagaaataatgctgcatatctacaactatctgatctttgacaaacctgacaaaaacaagaaatggggaaaggattccctatttaataaatggtggtgggaaaactggctagccatatgtagaaagctgaaactggatcccttccttacaccttgtacaaaaattaattcaagatggattaaagacttaaatgttagacctaaaaccataaaaaccctagaagaaaacctaggcaataccattcaggacataggcatgcgcaaggacttcatgtctaaaacaccaaaagcaatggcaacaaaagccaaaattgacatatgggatctaactaaactaaaaagcttctgtacagcaaaagaaactacctataggcaacctatagaatgggagaaaatttttgcaatctactcatctgacaaagggctaatatccagaatctacaatgaactcaaacaaatttacaagaaaaaaacaaccccatcaacaagtgggtgaaggatatgaacagacacttttcagaagaagacatttatgcagccaaaagacacatgaaaaaatgttcatcatcactggccatcagagaaatgcaaatcaaaaccacaatgagataccatctcacaccagttagaatggcaatcattaaaaagtcaggaaacaacaggtgctggagaggatgtggagaaataggaacacttttacactgttggtgggactgtaaactagttcaaccattgtggaagtcagtgtggtgattcctcagggatctagaactagaaataccatttgacccagccatcccattactgggtatatacccaaaggactataaatcatgctgctataaagacacatgcacaggtatgtttattgcggcactattcacaatagcagacttggaaccaacccaaatgtccaacaacgatagactggattaagaaaatgtggcacatatataccatggaatactatgcagccataaaaaatgatgagttcatgtcctttgtagggacatggatgaagctggaaaccatcattctcagcaaaccatcgcaaggacaaaaaaccaaacaccgcatgttctcactcataggtgggaactgaacaatgagaacacgtggacacaggaaggggaacatcacactctggggcctgttgtggggtggggggaggggggagggatagcattaggagatatacctaatgctaaatgaygagttaatgggtgcagcacaccaacgtggcacatgtatacatacgtaacaaacctgcacgttgtgcacatgtaccctagaacttaaagtataataaaaaaaagaaataaaaaaaaataaataataaaaaagaacatcaggaagaaatgtgtttaaaatgtgtttagcattgtgttaccgattcaccagtaattggtatgtacatttataaaaaacaaattaacaatccaactcaatctttaagtatgactagaatttttattatgtaaawctcttcctccctgtcttcttcccccacaatcatgccatgttgtaayagtacatgatgcagctgttgttattgttgtgtttgtctctctctttttaaagacaatctcagttttaaaaataatttaactgcaacaatcctaaaattgcaaagaagcagtatcatgcatggcagcaggctggaaaccaggtgacttgagttttagttctagttctaccacttatgakctatgaaacctcayacaagattcaaacmctcaaaatcttggtgttctattctcttaaatggtaataggtacattcgcccccatggagtggtgaggttcaaagaagaaacaaaccagtgtgtgactctaaaaaaatccttaatctctttggatttcagtttctgcatctacagaatgaagggagttgcatgcagacataaccccttatgacatttccagcttgaaacctgtttatatctacgtaaagayggtttgaaaaaatgtaaactagcattcaaacatatgatgcattaaagaattactttaaataaaacagaagaaatggagaactcattctatttttctactataaatttttgtaaactcctaccatatctatgactgttttatttgttaatgtactttacaactaccaaccacctgaaaccacggaagtgaatgaagttgcctgaaatgagaatttaaagtgaagagggctcasgggagaaatgaatcagtgaaggagactgagaagaagcagacaagagggaagctgggaggagatcgggattatcatggaagccatgagaagactgggtttcaatgaagagggaacatgctgagttaatgcaactcagggctaaataagatgatgagtgaaagggccctctgaatttagaacatggaagttacttgtgacttcagcaggaacaattttgcagatggaggaggcagggccctgttggaataagaggtgagtgaatggaggtccgaaagtagtcagtgcatgtagataatccctttatgaggctttattataaaagattagaattacatgaattagaatgataggaggtgagatctgtggggttcagaaaaatattagagcatgtttaaatgctgatgggaggaatccataagtgagagagagagaatgtgatcccagagaaaaaggtgtcaaaggatggagccagtgcctgagcaggagggaggaaagacaggcctttgacaagagacaggagaggctggtacagctgcagatgggcttgcagaactgagcttgggaagtcaaaggagctcccttctggtatcttccattttctttgagaagcacaagactggaatattgtctgagaatgtaggtgacagtagtttgaggtttgaagaaaatgaagactgcacaaaaaaagtcattatggagattgggcttaaaagactttttttttttttggctcagaagaatttttaaatttctaaacacattcctttaaatgaaagttttgaggagcataaccatctatttggaaattattaagtgctagatagatgtgaaaaaaaagtaaggaggctaaatcagtgaaacctaaagccacattttggacaaactgcaaatatttgaacacaaggaaagccattctgcacataccacctcccagaagttgttcctgaatttcccaaacaaaagatgcgttcatttgtctgggtgctcagagctctctgtcctttccatattgtcctttgtgctgcatcagtcctaacaatccacatatgctttctccacctgctaacctgtaggcaccttaaaggctaaaggccacagtccatagctgaattacatagtgtgtctttcaagaaatgctacctttgaaatggttacataaatcttatgtcaaagaagaaatgttatctgatttatacaaattggctttatacacactgaggaagactctcacrgcataaagtgaggcatgtttgtaagaacaaagggtttcattgagtacccatggacacaaagaagggaacgatagacgatggagcctacttgagagtcggyggtgggaggagggtraggatcaaaaaactacctattgggtactatgctcactgcctgggtgagaaaataatgagaaaataatatgtacaccaaaccccagtgacatgcaatttacccatgtaactcacctgcacatgtactcctggaacctaaaataaaagttggagggggraaaaaaagaacaaagtgtttccagaaacatcakcatagcaaatgggtgggccacgcttggaagcaaagtgctctttatgtgggtcacatcactactctacgatttcaagagagccctatgtagccaagtatattcaaggaaatgaaacaactccctcccccgctcctattcttcttagatacaaaagacagataattatctagagtgtttctcaatatgaacaaaatggaaaagtgacctttgagtctgtgacagtctattcacgtcagtgtttttagcaggagcaaagcaatgtccaggcttagggaatgcccacaggagccaacttctgctctccctcacattacatagaccataaataaaaagaaacagtttaacaggcagccagacccaaatagctcataggcacctcctgggagtgataaaattctcctgctggtagacttacataaaccaagatgcaatgaaatttttaaggatattctccttgcttaataaacctgaatgttttaagcctgaaagatggctagactaagagaggaaataaatcagtctagcaagaaaaagcaatcattcagagtgttggtagattagctgaaacatacaagagatcaaattcagtgatttaaaaatcatgtacttgctagttaaaatgcccatttctagctttttacccattttaaaacacactaaaaagttttacctagtgatttagttgcttaatgctaaaactggggcttctatccaatctctgacttgtttatgttcaaaacagaacatacaatacatttcaaagtctgaaattttttacagattcatctgttgtttgatggcaattaacaagaaaaaaagcactttatcagataataagtcaatccagttgttcatcctgatcgtaataaaatcttagaggcttttttggaaagtggtatttccaatttattaaagcaaagtacccagaccattgttttgtttgattttaaaagaataacacaaaaacgaagaggatgagataaaaaaaaaactggtagaagattgtggaatcagtctgagaagtcctcctattctgtcctgatttctgataaccactgggcttatgagaacttgctaagactgtgaagcacacattctattctaaattacccttgttttgcttctccttttaaaatcttcaagcacgcaccctgaatgaagacaaagaatgaggaggactggcaggatagttatgttgtctgkgggcaagatatggctagcagggctggagtgttagatatggatagcatggctggragtgttttctgggagaaaggatgtcctggggtaaacaactagagcgagaattgcggtgcttagagcaaaaaggaaatcttaaaaataaaacaaaagcaattaaaactaaaatattaattttatgacaactaattagtttccaaaatatttagagagttgatggtttttcagaaaattgcaatgctagtcccagtcaggtagattatttcactttgaaatctcttcagaaatttaatgcatgggtaacttgcctagggtcatacatagtatgtctggarttctttggaattctgactctccatatgtgtactggctcagctttttggcaaagagttattataatgtctactactggtgaggggccagtactgctgaggtgytcattattagttttaagacggctgttctgctcttatctattaagagacaccatgggaatgatgtctcccctgacaaccagaggatcttaggtagggaggcagctgtgctcatttgtattcatactgcatggtgttcttgaatgcattataagtttataatgcaaagaagatttttatgggaaaaaaaaaacagtatgtgggagaagtggaaaacctttccttggtatgcacgtgttttatatgacaaaatattctgcatttatatttctaaaacaccagagagattctacaaatctatcttctaaataaaataagacaaacggaaatcaaatgaataaccagtcggtcatatgtcttgctgtgcctacaatagttctggttaatgcctgttgtctcagcataattattaaaatgactcttttcagtctcatcagcagaattatatgatcaccctataataactggacatgtagacataacccagcctcttggaggagttaattataccatttaggtattgaattaaactgtttcttggcagcaatcaccaagggcaacagtgggttacacacatctcaccatttgatagaaagaagcatacatgcttgcctataaaatgtttaagaccatggtaacagcacttttgaaaatgcaggccaggtgcggtggctcatgcctgtagtcccagcactttggaatgctgaggcaggcagatcacgaggtcaggagttcsagaccagcctggccaacatagtgaaaccctgtctctactaaaaacacaaaaaattagccaggcatggtggcaggcccctataatcccagctactcgggaggctgaggcaagagaatcgcttgaacctgggaggcggaractacagtgagccgagatggcgccattgcactccagcctgggtgacagtgygggattccgtctcaaacaaaaaaaaaaagaaaaagaaaaaaagaaaaattaaaaagaaaatgcagaatcttttgaattttgaaacaaaaagtccaaacttttgaccaggcgtggtggctcacacccgtaatcccagcactttgggaggctgaggtgggtggatcacctgaggtcaagagtttgagaccagcctgaccaacaaggtgaaaccccatctctactaaaaatamgaagattagccaggcgtggtgacaggcacctgtggtcccagctactcgggaggctgagataggagaaatgcttgaacccaggaggcggaggttgcagtgagctgagatcacaccactgcactccagcctgggcaatggagcaacactctgactcaaaaaaaaaagtccaaacttttgaattttgtcttgaaaagtaacagataaattttctggatctgctttcacagtgattctttattaaaagttagcacatgacacacaattttcagctttttaaggtccttctatagactctaggcaaaggtgatcctgacagctaggaccacttagccccaaatgctgctcagcctcaagttaattctgctgttggtccactgtcttctcatacacttattgtctaaactgcattttctcttgggaataagccctccaccttgcatttcccttctagtaactgggtcccaatttggttccctactgcatgaacctatattttggttccttgccttttcctttctctatttaggggcctgtttgtgtgatcctgaacttttccgatctggactcccagccattgccagtcatcacactcctcactctccattttgctatcaaggacttttcatctctgaatagctgtcacttagtacaatgcctggtgcatagtagatcctcaataaatagttgtcaaaggaatcaataatgaatgagaactgaagcttccttctcattgactggagctggtttgcttccaagtgccacttctaccccggcactttccactattaacagggcttagggagctaacgttgtttgcatatgttagtcttgggtgagttaatacagccacagagcttaatgaacgccagtgtagttgcttggtatgtcccttatggggcagctgcctagggctgtacagggtaggtctcagctgaggcagtgtgagtggagctgaaagtcacacaatgctcacatcaccaacaccaggctctaaagaaggtagccaaaagaaagcagctctttctgttttctaaccggtttgcccagagaggtcccactttgcaatccatcctctcggtgggagagcctttttctaatttcatacagtagctcatttgtgttggaagaggccctagcagggctaacattaccacaaggaaacatagtaagtgagtttttggcaagtgtatctcttaaggagcaagcatctgtgaaggagtgaatctattatctccttttttcttattataggtaaaacccagtatctttctcctgttaagttcatacagacagacttcattgaaatttaagggcaacaattttagcatggtagctgactacccagatttttttttaattgtgccattatattaaagcaatttttcccagggaagcaaggtgaaccctcttagcttggaagaacccttggctctttcagaggctttcctcttacgagcctctaatctacctgtgagacctaggcatcttgtaccacccccgccaaaaaaaaaaccagagtgtagagaggtagtttgccttgcccatatgcacttctctaggataattaaatatatattttgtctagtcttagcagatayatgtagagcaggtccttgaataacattttgttcaaggacatttcattataaagtcaatgagaaaaaacacagattcccggccagggccactgtctgtgtggggtctgcacgttttccccatgcctgtgtgtgttttctctagctactctggtttcctcccacatccyaaagctgtgcactttaggttaactggtgtgtctacatggtcccagtgtgagtgagtgcaggtgtgttagtgtgccccacgaggcgggggatggcctcctgtgcaaggtgggttcccctgagccaccaggataggctctggctaactgcagccctgaactggagtaatttggtaaacagttatcttacttgttttcattaatctttcttaaatgtatatatagcttacactgatttcagtgtttactataaggagtgttttgggtctctatttagaagttaggtgatgtttttgtaaccagaaatatgctgtaggaacttaactcttgtttatcccaattagcctatggtaaaactggtttcattatttattgtttcatttaaagtttccaagaatagtatagtttccaagaacctgttgactatgttaagtgaggactcactgtattactgctactcaaaaatttcctctaaacatggttaaaagcacagacattggaaccagtttccttgaattcaaactctgtctttgacacttattaaccgtgtaaggcacttcatctgtaaaacaaggatagtaatggcacctacctcatagggtcattgtgggggttaaaaatgttaaattcacattattacttaagatagtgcctggccatactaaatgcaatatgcattatctatcattactattattttaggagagtgaaaaaggtactgcttagtacaaaacattcatttttcagtagagatatgccaggtatgtatcatgttaatattagcattgggaaaaaataactccggattttcatcaaggatattttctgaagtttgggttgtatgagaattctacactctgtccaattcttataataacactcatgatctgctgttcattcatgacctcactcaggaagttcagttttgctacaaatattacaaataccaaactgatgtttcctaactcactcagtgttctgcccagattgcrgcaggcccctttttatggctctggcagctgatattaggacttgattacttctgaactcctgaaaacatgtttgctgtcagttgcaaaagaggtggcatgagagcgactcaaaacatttccagtatcatgactgttccatgaaagacttgagagaaatggataccttaaaaaaacgagaataaatgtgctgaagtgccaaggaaaaggcagttctctctctactagctccaatttaggatttgcacttcaatctatacttgctcacttgtgaaattaaaaatctttttttttaaatcacataatatcagatgtgacttcttcacttacttttatttttctaagtgcatctgaaagaagaaaggtatttccaggagggcaaagaagagaatgtatatgatttttcttctcacttaagattcttatcaaattttcctgattttttttttttttttttgagacggagttttgctcttgttgcccaggctggagtgcaatggcacaatctaggcttaccacaacctccacctcctgggttcaagcgattcttctgcctcggcctcccgagtagctgggattgcaggcatgtgccaccacgcccagctaattttgtatttttagtagagaaggggtttccccatgttggtcaggctggtctagaactcctgacctcaagtgaactgcccacttttgcctaccaaagtgctgggattacaggtgtgagccaccacgcccggccaaattttcctgatttttatgtgtagggttgaacaatggaacctaatctgaatcattaattcattcatggattcattcagtgagtaatgatgatgagtgacgaccacgtgccggtgccctgatgtttacagtctaggcattttaaatatactacttctgatattcataattctccatattaggtattatttctactttgcaggacaggaaactaaggcttagagatgtatagcaacatactcattatcacatagttactaattggaggagccaggattgaaatctcagtccatctccttctaaaacccaggtttatcagattttttttttactacattacactggctataaacaatgaatgtattcttgatagtacaaaattcaatgttttataaagcatatcatggtttaggaaagcaagaaatatgcctgaaaggcaagcatttttcctttttaatatatatcagatttatagaaagcactgtatacatcagtaaataagacattagattaaagggctagcatatctttcagaaggttagtaaaatactgtatttatgtatggtctgaactgcatcataccagacaatcctgaacatgatctgcagactcaatgcttgccctagtggctcacgtctgaaaatgtcacttactggccacaggacattgggtgtactatgtaatctgtttgaaaatctgtttcttcatctataaaatgggactatcatcattctatcacataggaagctacaaagagaaaatggagagatacatgtagaatacttaacagtgatgggcaggcttcagtaccttaccttttcctcacatattacacacacagctttactaacagtagcagtaaagtacatctctgtttatcatttacacagaaaaaaagagctccaatggaaatgccccagaacatgaagatcactgactttgatggcctgcctgtggtaaaacttaggatataaatgaggatcagaagcttttgggagacattttctggatgtgtcaggtttagcgtgactaaagaagggtttgaatataatccctaaactacaagtaatcttccacttatgcatattaggtaaggataaatgaacagttacattaacacacagagcatatctacaaacaaataagattttcttaaatacattagaatgtgttcatttaaaagacttatttgaaaaaaataaaaagaattttaaaaggttgttatttgacattgtcactctgaatgcatatatatttatttcattcatttgacaaatgcttactgagtgtccagtaagttcagggcactgtgctagcattgggcatatgctgatacacaaaacagcaatggttttttcccttcaaaatcagctttgaaaccatgagtagaatcagtcacattatttactgataaatatacatcgctaaaagaattcaagtctgggccaggtgcagtggctcatgccygtaatcctagcactttgggaggccgaggtgggtggatcacttgaggtcaggagtttgagaccagattggccaatatggtgaaaccctttctctactaaaaatacaaaaattagctggtatcatgacgcatgcctgtaatcccagctactcaggaggctgaagcaggagaatcgcctaaacccgggaggcagaggttgcagtgagccaagatcgcaccactgcactctagcctgggcgaaggagcgagactttgtctcaggaaaaaaaaaaagaattcaagtctgactgactaaagcctaagctcatcataaaacccaccacctaggagaaaatattaaatgatgcatgtcttggagaatcaacgtagttagcagaggagagctttcctaacacaatagaaaaatgcctttggacggtgtcggtagtcccctcagtaaagtgtctcacacttcctgaatctgatcactggtaataatgatgataaaaaaagatttcctttttttagcattggaaaaaaccctacccaaataatttttggaagcttgagattacattatttatctggttcaggttttaaaaatatttctgatttttttctgccaaaatccaagccctctttcctcatacagaacaacttagatttctgaaatagttcttcccttgacattacttgggaggtgggcattatttccccagaaaagtaaacaagggaataaaaacaaggtgactcaaaggatgaggaagtatgtttttgtagagaacaaaagatcctttcacagtatgtcaaagacttaactgtgaactttcccgaatgtaaacactgttcaaatggcaaaaggaatttcatctatgtctataaaaggtcctgaacaatagctcttgcttgaagctacttttgacggggccgtaaaataatcttttcttcaaatactttacatacagacctacaaaaactttttcatcttctcaggagacatacaattataattaccttcataatagcaacaataacacatagaagcacggtactgctaaaggcaattaatgtcataaattataagcagcatcatttatgcttagagtcttcaggaataaagaaatgctttaagagatagtttaaaatattaggctaatggtttccatttagcctaagaatttaaaacttataggggctgagtacggtggctcatgcctgtaatcccagcattttgggaggccaaggcgggtggatcacatgaggccaggagttcgataccagcttggccaacatggtgaaacytcgtctctactaaaaatccaaaamgtagctgggcgtggtgggggggtgcctgtaatcccagctacttgggaggctgaggcacgagaatcacttgaacccgggaggcggagttgcagtgagctgagattgcgccactgcagtccagcctgggtgatgggggagactctgtctcaacaacaataacaacaacaaaaacatagggcagtagatttctttaaacagatttcattatgattacaaaaaaggaatattaatattttaaaccaaaaggaattatgagatatcagttagctaaaataaatatttaacttttcctactttaaagttttactctttacaaacctcctagttttaataattgtaaaatgaacactagtaattatttaatgacaagaatatgtcctatagtaaaatgcaaaggaataaataggtttatttgctgtattagatgaataatatatgaattatagtcaggcagataataatattatctgtatttctggtgaggtagttttacttcgtgtttctttgtgaatcattttgattagagtagatttttccattagtattttgagtattgatcatttttgtttagtactgttagtattcatcacaagttgattgttttttcatttccaaaggtttattgctggggggtgaggggagaatgttatttttttctactgaaatgcacctctaactttataatatctggtaatggtgaaacagaattcacttctagtaacaagacctaagccacagaatttcagagttggaagaaaatatgctggatactttaggcccacattcagcctcactctgagaagggcagcattccaccaccaggggtagcttgcacaagttaggtacaaatttaagtgatcactgcaacacgtgttgtgcctttacaaagctggctgggacgggaaataatctaattccttggattgttcattgtaatttacgttaagttatgaacctagtattagcccctccccttcaaagggtcattatacatactcaacaagttttctaaattttaaagttaattcggtagctctttataaattttaaaattagttcaccatataatctttaatctataatagataataggagaaatctataatctttctattattgtacagatttattatcataaataataatattgtatacttatatactactttacagttcacaaaatgcttgaacatgttatctcatttgggttttacaacaatcctgtgaggtagctgctatagtyagttctattttacagatggggaaatggagcttcagagaggttaaaygatagcctaagatcactggatagaacttggaatcaaacttggttttggctacctggctcagaggtgtttattccatagccacaaactaacaagcgtagaaacatgaaccagggtgggattgatccctatttgattctttgccaacctaggcaatagtcactagtgaagagtgagctcatttacagatacaaaaggctcagcctggaaaactccaaaggattctccagttttatcatccctctgagggacctcgtaaaagctttaaatagccaaattaattgtacatccatttactgatttactgattcatcaagaatttattgaaatctgaccaggtgtcaggctcctaggtgggtgctgggggtgccagcctaagtgggacatacactctgctctgggggaacttgcccttctgacacatgtcaaagtcagagatcacagcatgatcaaggcatagggatgccgaggagggagggatgtgttttgctgagggtagacaggctgcakccaaggagggcttagggagacattggcatgcagccttaaaggaagagacacaggagtgtgtatgggcattccaggcaggggccaaygtgagtgaaggtgtggggtctgataaggcatatttaaggggtgtgtggacactgctttagcttcattcttctcattcttacaaccagaggattttgctttgtcactcataaaatgcgtaataaatataaacagaaaccaaaacaacatggtactggtacaaaaacagatacatagaccaatggaacatgtgagagaagccagaaacaaagccacacacctacagccatctgatctttgacaaagccaacaaaaaaaaaagcaatggggaaaggattgaggattgctttgactattgaggctctcttttggttccatacaaattgtaaaatagcttttcctaattttgtgaaaaatgacattggtagtttgacaggaatagcattgtatctgtaaattgctttggacagtatctcctttattttccccctttccttccctctgatttcaggagattccatttaaaaaaattatcttagagtgagaatataatagtgtagaaagcagaggtagactgcccatctttttggcttttgtattccaaaccaggagttggcaaacttttctataaaaagccacgtagtaaatattttaggctttacaggccatatggtctttgttgcaactactcaactgtgcctttgtagtgcaaaagcagacacagacaatacataaatgaatgagtgtagctgtgtttcaataaaactttatggacaccaaaatttgaatttcataaaattttcatatgccatgaaatataattatttttatcaactgattttttccaactgttaaagttttttttccaaaaaaatcttagtttgtgggcctacagaaaaaggtggtgcaatttgccagtccctgttttaattgcttagggaacctaagggactcttctagagcttgtaagcaaatttagcaacacaggaaagcctggaagagaatggggcttcatttctcaatcctgctccaccctggtgtgagaaaagagatatcagcaggtcctgccatcccacaaatgtgtgtactgtcattactcccagtgtgaaacattctgaatttgctgytaaaatttcaaattaatgagatttcacttaaaaatctagattttggtcttctcttgaaaatgggaggataaggccaaattggggccagattctcacatggcaacagctaggtagtgactgccttcctatatggggcacaacttcctgttcacctgagaccctcctggcctgtgtccccatccacattgcctgtctggcacctataagcatttagtctaaattctactaagcagagacatctgttttcttctctaagggtacaacttccattaaaactaatcttttggtcctagggaagccacatggggaagaggcatacaaacacgggcttctgagttagataaacctaggctgaaatctcagctttgttctttgttagcagagtgagcctgggcaaattacttactcccaacctcagaatgggagcaataatatatacacctgaaatggtggttgtaatgatcatgtgagagaatgtatcagaagcagctagcacatactcagcagttaattaaaagaagaatcactacaatggagaagttctttgatgtgtatcttttagttttagaccctgtattcattgttgccttttgtggaaggacctgaaggatgagcttacaatctaccttattttataaaaaaaaagaaattaaggcccagagaggtgaaatgactacttaaaaccaactagtgatggaaccagaaagaggatttgggtttcttaatttttagtcagaggaartttctctgtgctacaatacctcactaaaatttctgaattctttcataaaagcctttcatttgatagccaaaagatcttctgatagaaaggacattgactcaagatttctggctagcctagtgacgatgcttttatattacaacttccaaatatagtgaaatgacaagaatttgtcattagttgttgaagttccagtatttatttgaaatactcctgttctaagctcaccgacaccctcctgtggtcagtggaaataataattccagtcaaacaaacaagaaaaatctggagctatttaaagttaatggttaaatgtaacaagatagatagatatcaaataacataatacaaattcactataattacattattttaggtcctagccattgcacagagcaaagattacttgtctatctctgaccaaatctttaatgagattgatagattataatggatgttttccttagggcttgttcacaataaaactgcctgttataaattaatgtaaaaaaatcagtagtatttctatataccagtaacgtccaagctgaaggccaaatcaagaacacaatcccattcacaatagccacaaacagaataaaatacctaagaatacagctaatcagcgagataaaagatttctacaaattacagaactacaaaatactgctgaaagaaatcagagataacgcagacaaatagaaaaacattctatgctcatggataggaagaatcagtattgttaaaatggccacactgcccaaagcaatttatagattcaatactattcctatcaaactaccattggcattcttcatagaattagaaaaaactattttacaattcatatggaaccaaaaaaagagcctgaatagccaaagcaatcctaagtaaaaagaacaaagctggaggcatcaaattatccaacttcaaactatactacaaggctacagtaaccaaaacagcaccatactggtacaaaaacagacacatagaccaatggaacagaatagakaacccagaaacaaagttgcccacctatagccatatgattctcgacaaagtcaacaaaaacaagcaatggggaaagaactctactcaataagtggtgctgggataagtagctggccgtatgcagaagattgaaactggacctcttccttttactacatacagaaataaactcaaaatggattaaagacttaaatctaagacctaaaactataacaacctagaagaaaactaggaaataccattctggacatcagccttggcaaagaatttatgactaggtccccaaaagcaattgcaacaaaaacaaaaattgactyataaaaacaaacacacacacaaagggagaagagaacacactctgttaccttagaatgccaactaataaatgtcaaaggaatactggaatcagaaaaatcaccactttgcaactatagtgataataactgattcaagcaagaatcatgaacagatgataaaattaatggatgaaagtttgatgaaacaagattcacatcatcttcaaatatatgcccacaaaacacattataaaggaaaaaatagtaatgtcacagtggagacatcaccctaaccaaatgttcaaagttaacatcaccagcaatgggacaaattgacatcatgtgtcacctagtagagcagtccccaacatttttggccccaggacctggtttcgtggaacaatttttccagggacagggtagagggaatggtttcaggataaaactgttccacgtcagatcatcaggcattagattctcataaggaggacacaatttacattcctcgcatgcacagttcacacaagagggttcacgctcctgtgagaatctactgctgctggcgagctgctggtctgacaggagacagcactctggtgatgatgatcacctgccagctcctcacttcttgctgtgtgggcctggggcactggggactcctgatctaacaggacacattgagaacacagcattattgtgatgttcctgccaatgatgcgtaagctggatctaaaaacagaaaacatcagatgaacccagactgagggatgttctacaaaatcactggcctataagtcttcaaaaatgtcaaggtcatgaaagtcaaggaaagatgaggaactgttcagattgaaagacaccaaagagacatgtaaagtaaatgtaatacatgatctgcaattgcttcctttttctataaaggatgttattgagacatctgaaatttgaataaggtctgtgggttacacattaatgctatatcaatgttaacttcctgattttgaggtctgtgttgttggttacrttaggagaatgctcttgtgaggaaaaactgaaatttttttttttttttttgagacagagtctcgctcgtggcccaagatggagtgcagcggcatgctcttggctcactgcaacctccgccccctgggttcaagcaattctcctgcctcagcctctctagtagctgggattacaggcatgtgctaccatgctcagctaatttttrtattttaggagagatggggtttcgccatgttggccaggctggtctcaaactcctgacgtcagttgatccgcccacttcagcctcccaaagtgctggaattacaggcgtgagccaccacgcccagccagtatttagaggtaatggggcatcatgtctacaactcacatttaagtggttcacgaaaaataatgtagatatataatatatatccacacatacagagagacagagagagagagagagagaaagtaaaaggttttaacaatgtaattatattttatgaaaaaatggttacattatatctggggacagaaattatagagtttggatttaagactctggtgatggaatgagttttttttcctattatttttatcagcaagtgcccttggtgaacatatgctccttttaaactcgccaaagattagaagatattagtgatatcttcctcagaggttgaagaatcaagacctgtcctgtaaaggaaatgctattgcaattttagagaagccatattatataaataagtattgaaaatacatttgtatagtctatctatctatctaaatatttcttgagctgggcttaggtgagaaggagctatattcagaatcttaaagtatgttcctgttttatcttgaaagcagtcagaggccttccctaccatcaaaccagaggcacaaaagagatgtacatctgatttttaaacttcgaaataattatgggctacaaaagaagaaacattgttattttaagactaagggagtcataattacaataatggcgactatttactgctgtgaaatagtccttacagattgttgagagtaacccgaagcagactggaacacatgaacttgtttccgatattgtgtcagatttttctctttctgagtaatgacttatatgtaaatatgaaggcagagcagttgagggaatgatgacttacaatcaaatgcagcactttcctctttggcttgtgcaaaacctatttaagtttcagattttcctacgagggttctacagatgttctttatggaaaggattattcagccctcaccagcaacgtgaaatgtaggcccttcaacagctttgtattcccctcttaaaacaaacatcccraagaaaaaaataataaaaattatccaatatgagtgagctctttttcttggggggtaaggggattcccamtgttatgctaccagaacactgtcaaggaagacttgacgaatttcattcagaaccccagcaactggaaagtctcatatgaattagactggactagagagtatttatttctgctctctgtataattagaaaaccaagtatatatttctgagctattcatccaaggaattaaatggaagataaaattaatggatactatatcaccattggcctaattaccatatattaggtaaggatcatgcttcatgattgtcttgttgagtgcaaaacaataaatctgacaattcaagtaaatctgaagtcccggactccaagaagtcctaacttagaggaaagatcattagctatcacttggaaggagctggctcttgctgtcaaaaccactaaaaaataaaaataaaaawaaaaatcacatggtcatgcgtgttgttcatccagcatttcttctggggtgctcccctcccatccttatttcctaacttcatgtttcagrtgtgactgattcagtcccttctcattccaaactctaggggtggagacatggcccaggtctgaccaatcaaagtatgccatccctttggccacagtgatgggttcagggcatgtgacctcaccagcctatttaagcactcctgaggacttctgctgaaattacacggagagacatgcccctttggctgaggttgccagctggaagaaccatatgtattacccagtgctaccaggaccatctttgccacctgatggagaacgactgtgtgagaatgaagccacccccgagaaaagcagagccaagaggagagaggctgggtcctgtgccatgtgttgagcgccaggccctgagacttctaggtttctgagccaataaatttccttttgtagtttaagttactgtgagctgaatttttgtcatattctatgttcctaataaacatcattttacatactttttgattccataataaatctggaatcacataaataataagtcctctctttaaaggtacagagaaaagttattcttttttttttttttttttgaaacggagtctcactctgtcgcccaggccggactgcggactgcagtggcacaatctcggctcactgcaagctccgcttcccgggttcacgccattctcccgcctcagcctcccgagtagctgggactacaggcgcccgccaccgcgcccggctaattttttgtatttttagtagagacggggtttcaccttgttagccaggatggtctcgatctcctgacctcatgatctacccgcctcggcctcccaaagtgctgggattacaggcgtgagccaccgcgcccggccaagttattcttttaagtggcagcttaaccctagcacagcagatttattttctgaggtcataaatgacatgcaacctggcaatgtcatgagtcaggattagaatgagcataaaggtcttgtcctaagacgtctactggagtaaagaaaaccaggaacacagacactggtaacttgctaacgcatcttttaaaggttaaaatagatttggggtctattgggttaaacaaagttaaagaggtttctttacagagagacttctcaaagccagatatttaccaattgtaatttcatctctaagaggctactaagctatacagtgtttcctaacagctagaacatggtattttcatgaaaaaagggttcagagaacaaactttcagaaacgtttagctgggcacagtcacttgcacctgtagttccatctacttggaaggctgacgtgagaggatagatggcgctcaggagtttgaggccagcctaggcaaaatggtgagattccagtctgaaaaaaaggaaacatttgactatgcatgtttctaaaaacatagtttatttgtcctgagcattttccttgattgctccattttccttggcagcttgccatttttatggtttcatctaaaaccttcatgctcaggatcattatataaatatctctctcactagcttgaagctcttgtcccgtttcaatttctgactgaacacagtcacgattacctcacacagcatatttacaatgcctgaaccctatcttctctccaactttcctggttccttcagtgatctgcctttttgccagacatccaaactagaaacatccgtaatgtctgcctccacgtcccatagtcagccagtctccaacaactcacacctggtcattacctcagcctcacagttgcccagcttcactcrgacttccttcccagaccacatcactcccatgtccacccttctaaacacagccaatgcttttagcagtttttgagtggaagcagagagcattggtggttcagttcttgggctataggtygtggaggaaatacatgggctatgctctgcctggaaagtgagcagtaatattacatgggagaaggcctattcttatacctgtatcttcctaccagcaaatcctgcagagctttaaatgaaactcattccagaaaatcattttaaccctgttaggcctgtgtctccttaagtatttgtatgaaagttcaattaaastttaattatgtcaatggatgaacaagaaggaaaacttttatattatttttaaaatccatattccttaaactgagggtaaagatcactggacaggagcaaggtttgaaacaatttctgakaaagctgatcagtaacaacatcacccatcatgaccttgtatcartggagctcagaaatgcagttcttttcctacctctccagtcagaagtatgtaagaacgtggctatgggtaagttatgatacatttaaaagcagattgcttcagtacaaagaaagttatttaacctccctgtgcattggtgtcttaacagctctgtgcttcggtttcctcatctgtaaattgcagtaataacagtacctwtcatatagtgtttttataataattaaatgaattaaaagcctgccatttgtctctgtacactgagaacagcattggtatatgattagcacatgtaagtattggctattactactattactaccattttagggattattcttccttcttttaaaactgctattagaatagtattagtgaaaacagtgttcacaactggagtaactcccagggtgttagtctttcttgtttatctactcccaggacctgtgctcctaggtctattcaaatagagtatcttactgatgtctctatccagctgttacataattctgatctcaacataaatacagaaatacttaagtagacaacaacaacaaagctttttattagaattcaaaaatatgttcaaattggtgacttctggaaacactttcataagagaatacatcagaaactgttacgtgtcctatagagataagggacaacctactgaaccaaggcagttcagaaaactgatgactagttttggttaagcaagcatatgaaatgaccacagatttaacatatgctatttgtcaaaaaggaataatgaggtttctctacttttcyccatgccaccttgatgtctgttttcatgttcttttgctttatcataaatactttaaaaaatgatattgatataggaaaaagtttgggctctagccttcccataatcatcacactgctacatttccactggtgaatggaactgatgatcactcttttttttttctttttttctgagacagagtctcactctatcacccaggctggagtacagtggcatgatcttggttcactgcaatctctgcctcccaggttcaagtgaactttgtgcctcagcctcctgagtagctggaattacaggtgcatgccaccatgcctggctagtttttgtatttttagtagagatggggtttctccatgttgcccaggatggtcttgaactgttgacctcaagtgatccacctgcctcaccctcccaaagtgttgggattacaggcatgagccaccgtgcctggccagatgatcacccttcttaaatcccagaggcattggctttcctctaaacactccacagtgatttcactacattctygaggagaagcagtatccctgtgtgggtcctgtctttcaatgcctcatttcttaaagagagattgaggactcccaagagtcccattcatcctggggaaggaaagactgatgagcttattactacacagccttaacgttgtttaggggtgrtgatgggatacctaatcaactcacttctgtgcactgaatcacgctgctgcaactgtgcttgtttttacccctttcctgacagcagactcactcttctggaaaccaacttcagatcctgctgccttgctcacttgaacaacrtagaaattttgcaacactttaacttattttatctattcatcaaaggaaagagtatyagggattaagaaatggcatgagaatctctgagaattgggtttctttttttttttttttgagacggagtctcgctctattgccaggttggcacgatttcggctcactgaaacctctgcatcccgggttcaagcgattctcctgcttcagcctcccaagtagctgggactacaggcgcatgccaccacacccagctaatttttgaatttttagtagagacggggtttcaccatgttggccaggatggtctcaatctcttgatcttgtgatccgcccacctcagcttcccaaagtgctgggattacaagtgtgagccactgcrcctggccaagaattcagttttctgttatcaattaaagagcatctaaaaggatctttcttactgcttgccacgaagctgaaaattatttggctgctcagaaacactgacttctatgggaaccaacataatttgatggagttatatagagacaaatgccaagcttttaactccactggcattttcagattttggcagggggaggcattctggaaactctggatatctgactaggtagtgaaagttggtaatgctgcctgggctgtagggcatggtggataaagagcacacattgtagaactactaactctgccacttaccagatgtgtgatcttgggcaagttatgtaacctctctgggccttagtttctccatctgcaaataacatacctggaacattttcttactccaaaaatgataccatagattgagactttttttttctttaacactctgaccaaattagctttcttgaccttagaagttttaaagtattcatttaaaattatttttaagaattagcttcacagtctctatgtaattacaacaatgaatgatgacatgggattggatactattattattgtatacatggcattgtatactattattactattgtatcctattattattcctgggcttgtaactattgtgtaattttatttgcatattgaaaaatcaacaaggttttaaacatgtgcttgttttgcatatggatgtccaattgtcaaagcaccatttgttgactatcctttctccattaaactgttgtggcatctttgttgaaaactgttggcaatatgtctgtgggtctaattttggacagtctattctgtttcattgatttaatttttttgcgaacattgcactgtcttgattattgtagttttatagtaaatcttaaaattaggtagcatgatttctccaactttattcttcttttaaaaattattttggttcatttagttcatttatcttcccatawaaattttagagttggcttktttatagctataaacaaaatcctgcagagattgaattggaattgtgttaaatctgtaggccaatttggagagaactgacatcattattaggttgagttttctaatccatgaactcagtatatctctccatttatttaggtctttgatttctttcattaatgttttacagtattcagcatacacatcctgcacaagtcttattgatttatacctaaataaaaaatttcatttttagagaaagttgtttgtaaatggtagatgtatttttaaattttaattgttagttatcaattgttagtatatagaaatataattgatttttggcttcgataaactcatttattagttctaagagtagtttcttttgcttgtttgttttgtcttttttttttttaatagattctgtgggattttctaggtaggcaattatgttgtttgcaaatagggacagttttatttcttccttcctaatctggatatcttttatttatttttcttttcttattgctccttttcttttttaaatttttttattttattatkattatactttaagttttagggtacatgtgcacaacgtgcaggtttgttacataggtatacatgtgatgttgaataggaatggtgagcatggtcattgccttattcccagcattacagggaaagcgttcagtctcttatcattaaaatatggtgccagctgtggtgattttacagatgccctttatcgggttgagaaaatttccttctattcctagtttcctgagagtaccacttcaatttccaagctgycttgaatcaaaaccagaagactctggaggaaaaatgagaaactcatagctgattaccatttaggtagttcaaattctggtcttcttcctcaatccatatgctatcatttatttttcagggactttgaatagtagctcatgcattctgtccaggttttatagctgcattcagtgggagagacaaggtgagtgcttgttccactgtattcagaactggaatccttgagtcrttttaaagtcaaagaaagaaaattaaccagcttattcagttacataaaaaaaaagtactgttttaagtttcaaggatccaaagatgagttaaatttaatctctayttctgaggaattgtttcatgcccaccctcattcctcttttccatctggtaaattcctacttgttattattttgacttgttattattttgaagtaatttttaattcttatcaaagtaataagcatacacggtttaataagtcaaatagtactacaagatgtataacaatttaaaatagcacccttgtgacacagtctccccctcaagcaattaagaggttaaaggtaactacttcaactctgcttactacatcttttactatttacctccatatttctaagtaatattcttatgtctcyttatttttcaatttcagacattgtctattgacttcctattatgaaaggtaaggattatttttcctctcccacctcaaacacacatcactcatttttttctcccctcattccccctaataaagtgctatcataaacaaatcaatattgtttaccttatcattactatacagtccccgacttacgatgattcaatttaacaatttttctacatcgtggttcaatttaacaatttttctactttacgatgtagaaaaattgttaaattgaaccgtcgttaagtcggggactgtctgtatagtaatgataataaagtgctgaatagctcatgtaacttactgaatatattatgtcacagtctagacataatgtattcagtaagttacatgaggtattcagcactttattatcaaataggcttttatgttagataattttgcccaactgggaattacctttgccactctttccacctatgtcttcctctttcttggtttactccctttttttagcgacagcacatcatgcagtagcttcttgagaaataatgtaatgtttttgagatttgcacatttaataatggttttagtctacttgattaatagcttggctggatataaattctagccggaaatccttttccctctttgattttctctttagtttccaatgctgctttggagaaacccagtgccattaggatttctaccacttttatatgacctgttccctacttctctcaaaattagaagttatcggctttatttctttatccatgrggttctaaaatttcaagtggacatgctttgatgtgtgtgtgtgtgtgtgtgtgtgtgtgtgtgtgtgtgtgttccatttgttatactgtatatctggttctttagttcagtgaaattcttaaatayagatgctactaccttccttgagtctaagtaaaaaaagcagactttcactttatcttcttgttgtatggtttccctcctgtcctaattggtgccttttgtaagggcagaggagagccagctgcctagaagcataggatagaggagaaaatctggatgtctcaacggcctggacagactttcgactaatcttccaaatttcagtgccaccccacattacaaccttcagaactacacagtatcttcaagtcctgttgctaacaaaagcttaaaataggaggaggaaaaagctatgaaaagcttagaaagacaggattccaatttgccctgtgtttttgttgctgttgttgttgttttcctgttttctactgttctcaggactcagagtaaatgatgtatactttgctgcatgttttttggtcttgttctaatttgtcttttaaataaggctaaacactataatcctctgctgacaattgtcctatcattgatttcctgcttttcttcaagctgacaggtttaggcaaagaccatttttacaattccttttttggatctgacaaaattttttccaaacaggattataaacaaagcttacattttaacactagtatagatgatgaattatgtaactcattggatcataagttaatattaggtatttgagtaatactgtttcatttaaatttggctttgtctccataaagcattgaagaattccgtagcccaatattaacttaaattctaagtttctattttttattgtttactgagtacttactctgtaccaggcattactgtatttcattcttacaactttgttaaggttcaattatttttatattatgattagaaagtgaggctttgaaagaataagtaatttgccagagatcacctacaaagttgaaccaggattttaatctaggtttgaacactataaatttcatgctcttaaataataagttgtactgcttatgaataaaatcataaatataatagcaagaagcttttatttctatagccattgtgattgtaaggtatacatttacatttaagtaagtacttaatgtaagtaattargtacattaagtaagtacttaatgtaagtacttaaatgtaagtgtataccyaaygagctcagaaccgtaacagttctagagtcattgactgtcaacctattaattgcatttcacattcaggtttatagccagtatattgcagaattaatttgttttctttatactttaatattgttaaaattacctctttacttgctgatcatattgttgaacaatatgcactagtgatatggtaacacaattatcctacggcctgtcttgagaggagattgaaatagtcctgctgatgatttgaaaaggaattttttgaggttagaccttttctaaagagtgaaagtaagataatatttctattttaaatattagtttaacattctataattttcataatttataggggtatcattcttattggatatgcataaaaagttaatgaaacctcacagcctccctaaaatcataaacttgtttatttgcttgccttagggaggtgactgctgatttaattttaattgtatttagcaattactgataatgttgtgatccaatggaagcttttcttttagaggaatgtaaaaatcaacttgcaatttctctctgaaacacaatctatataagaaaggaggcccatatgcatgaacccaggagtgctatcttacttcagggcagatttttcttcaattctttactcaaaccaaatttctggttcaagaagagtatggccaattggttactgggataactgcaggcttccacatttcctgagctaacatgatactatcttatctgtgttctctgtacctttctcccttttctctcattgcttctgtccctatcaccatcttactgcctcatttctgaaagccttgctgttaggtaactgccataattctctttggggagttagatgataaagccmtaaataagcaagtggcatgatagagytaaactatatcagcctatgagagataactgctaaatacttaggaatttttcaagctgattgttaacctttggtagcttgaaatcatggtgggggtgtttgcaaaatggaaactggcaaacttaacaaccccccagtctccatgagaactagtttactagcacgccaccgggatcttgcattttcactcagtactcctgaaaatcttaaagattcaaaatgaattttcatggctgggacttctctaataggaataaacaataaaaaaataattacaggcaatgcccaagtgttaccatatagggaaacagctggatcatcttgctgaaacccagctctactgacacgtggcgaggagacatggatggtgagaaattataaaagttcagaaaagcattgcctttctgggccaagaaagattcccaaagacacatgtacatataacaatcctacaaaatatggattgttctgtaacaatgatccactgaatcagactattttttcagagttattgatcaaagtaaagaatgatgtataagagtaaactatgctccttaaaaagaacaaagaatttcataatcccatagaggatctgaagattacctagcatgtaaatttactaatagtcagccagttaaataacccagtggtttctaaaactgaaaatagaacttaatatccaactgagatcttcaaaaatcaaaactgctagactagagattatagaaaaggccaagcttacttacctaagtacatcaaactgcatttattcatagtcctagaaaattctctttaaaagggggaatagactaatagtgctaaacataaattagttatcttttccatgtatttctttctatgcctyactcctttttattttcaaatgctggttgtgtgcttattgtgtaccagacactgtcttcactataatgatgaaaaagttccagtctcacactgtatttcagaagattgcaaccattgttaaagaatatactacttccttaagtactattcaaaggctgcagagagatcctaccagcaatatacagaagatttactttgtgatttcttttaattagaaaataacatttgaaagctataaccttttaagcctttttgctcccacaaaaataatcaccaagagaagatgatctgatttctgaggaaatctgtggtatagctttaacagctttcttggaaggaagacaaatgtaactaagtatgaataatatactttaaatatagccagaagaattttgacttataattaacccatgtttctgaaaatatgaaatctacaagtaataaatatgcattcttaataatggtctcttaaaactacatttatattaatcctttcagtttgttgttatggttatttattataggaaaaacacatgtttctatcaaagcatgtaaaattaatgaacacattttatatgtagagctcaaaaaatactctcttgtaagctgtactcattaaataaaaataccaacaaattcattaaacaaaaacaaaaactcaaatcaacaatggcaaagctaataactccagaaggctgaaatgtagcaaagacaaacagagtagtgataaaacatttaattattaatatactgtttatctcaatatggacagttcctttgctatgatgcagaggaatcaggaggcatggggatcttttgtggtggatggcatggcaggttatttgcccagccctcactgctgacctaaaggcgcctatcttgctcracaggaaccatacaagacaagagtgtataagcctttcattgccagcaggcctgttaatttccatgatgtaaaaagtaagtccatctggccactagatggagatcaggttactctgtcagtgatggggaagctgcttgcagccagcaagtgttaagtaagcagggtatggagaacctrttctcttttttcaatacttctatgaaaggcattttccaagctctgaagttaggagcagatctgtgctgaataaagagtatataaatgaagaatagcttgaaagatcaaacagaaagggaactgtaaaagacaaacatttgcttgttattactgttgcccctggaatgacttctatttaggtttggttgtataaaccacttgtaattaataagatgagctggtctaaataagaacaattaaataagctgtctcattatttaccaagcagggaagaagagagatatgacaaaaaattaaaacaatgatagattattaagacaattagtcttgtctgtttgaacataagaatacagactcatgtttgagtatgtatataagtatgcatttttaatatcaaccaaaatggatcaagggaacttagggatcaaaggagaatgtcagataacatctattctaattttccaaatgaaactatcattcaattctgaattatacaactttattactaaatatgtctcatttctgtaatagctgagctttattttatttttttttagagacagggtcttgttttgttgcccaggctggggggcagtggctcgatctcagctcctgcaacctccrcctcccaggttcaagcaattcttgtgcctcagcctcccaagtagctgggattacaggcatgtgccaccatgcccagcttatagctgaactttaaactggagacataaagttacacatgtcctggaaaatgtttggtttagggaaagttcagatatttcactgtgtaatgtagctgaatattttgattattcttgagatgttagatccataattctgttcatttctaacttaataactatatatcctcattcaataaatatttattcagttacatctaaacaaataatttgtgacagtttaaaagaaaaattccatttgttatcaaatagtttcaattaccagtacattttagtatataggagtgtgagcacaaacaaacatattaattgcttattgcaccaatcattgtgctacaagctaggagtacaaagatgtatatatagccagagaagtaactggaagagaaggcctacatgattaaaaaacaaatacaaattcatttttgtagcagtcaagcacaattattaaatgattagtaaaagtcctttgtaaagttctatcgtgaaaaataaatttaatcttgaccagatggaaaacatgacctttgatctctaccacatataaaatatagaaattcaaacacaatagtatttactattaggcaccaatgactgtaatgagaacaagagcttaattcaaaaagagaagaaactaatgtttagaataataaatgaaacagaccataattaattggctttctaaatattgttatgagtagtaaccaacattcagtctgttgctgtaatcagtccatggcacttacttaatcacatgtttattttagagtcacacatttgttttagcttaattaaattaatatatttataccccttcaaaaagatttgagtttgaggttttcaaaatgttcctacaagcttttaaggatctaagagaattattattcattcatgaatatatctatttctgtttaaagaaaatcacaaaaataatcacataaaataggaattattaatcaggtattgacgaaatagtttgtagaaatttcttattttgctaatcggctctttgcagaacaacctggctgggaggaacctacttttctttttgttggataagaaagtaacgtgaacaggagaagttttgttccaaagattaaaataaatgaatagcaaataaatccctttattatatgctttagtatatatgggcatatagccttcctcattcttcaaattagttccagacagcaactagattgattagatgatgactgagtcatttctggasttatcaggtttcttttcactttggtggcctgttcccatatttttctccagtgcagggttgggtctacttattgttgactactaaatttgcattacttggaaataaggaagttgataaaaaacgttctattggatgcatatttttgctcaccttctctagtttagaggtcctggccttgtaataatctgytgtattctagttcctaaatgtttctgtttcctaggtagcatgtagagatgctgacactgaagatggtaaaagtgagaacagatgcaaaggtgctactggaaactggttagagcttaaggttaaaaaactaaaagctgctgattgtattcatatggtgtgatgtcagtaacctgcacatttaagcactgacagaaaaaaaggcacatttttactttttcatcatttagatggagaatttgtttttgtctttttattttgtatctaaaaattcttttagttctttaagcaactatttttgagtcactggcccagaaattttcatgactgtggcatctggaactaaatttatacttgaatgtgcacctctaagagataaggtgaattcaaatggtacctgcatatttctgtcatcttgtccaatcatgtttctccattccatgagtgatcgctgcagacgttcaagtccagtttcccaaagcctgatgtgacctcccatatcaacagtaacaacaccgcttttgtcccactcagccagcagtgcatctgtgtctgaaatggtcgacagccatgtggtatacggcgagagagattctgatctggaaaaaggaatccaagtgaagctaagagaccacaaaaataaagcaggagggatgacactgcacattgtaatgttctttactgttgaaaaagtrtgctcacactactcattattttatacctgctcttacctctgtcaccacataggcaggttatgaggatacactatgagcaaaagttcttaaacaaacatgcccagggttcgtaagcaaacatgaggcaggacaatcatgaatataaaaaaaaaccagaaagactattttaagaaagatgtttttataagtgatcacagtatataactaattggtaggccaggaaacaaagctggtttaaactgattaggttctctaaacttgctataaagaatttgctatggactaaatgcttgtatccgcacccccccgcccgccaaattcatatgttgaagccctaacccccaatatgatagtattaggaggtgggtacttttggaggtagttaggcttagatgaagttgtgagggtagagcctcttttatagaatgggattagggcccttatgagaagagaccagaaagcttgcacttgcatgtggtctctgcctgtttcccttcccccccattcatgttaggatacagcaagaagttagccctctgtaagacagccttcactaggaactgaattggctggcccctttattttggctttcccagcctccagactgaaaataaatatttgtcacttaagctacccactctatagtattctgctgtaacagcctgatctaagacagaactctaataatgagcacattaaaagacaagatatcaacagaaccatctgtaagaagcaaaaatacactgtaatttactggttctctgcattttcctgtatttcctgacagtggacgacactagcttccactgtcaggaagaaaggaaccctataccagttcatacctcacacgctaatgagtgagtactggactcactccttagaggcctaatgtcagtgctgaaaccaatttcttgtttatgcatttcgactgcatttgtatgtgatattttgccttttctgacttagaaagttacgtgactctataacaaggaatgtatagatttcttacatatttcacacatatttcattatatatttctgacatctgtatatgtgtgtatatatatatgtatgtatagtaatttctaggaaagcaaatttgtctgtaagagtcaactgcatatctcctttatctgagtatagctcttattatacaaaagtgatacagattataaattcctattgtcagtgttggcttgcaaaatgcatctgatattttctatatgaaataaatagtctaaagagatggtctgataagaaaaacataacaagctatcattgtagattttggaaaaacacaaaaccattatatattaggtaaattcttataatattctaaaagataaatcaagactaatttgaccttttttcagtctgccttagttgatactaaacacagagtgacaagggcggccactcttggacacagaagacttagaaaatgttcatatgagaacaacagtgggatgggaccatatgttctgagctactttacaggactcccagaagggctcaaagaaggtaacatttgatacaatacatggtactctatcaataaatatttgctgcaggaaaaaacttagtagttacagatgatggagtaaggggctattcaagaataatgaaatttatccatttgtaactatgttgtttgaaattctgccaagaacacccaagctgtatgattctattgaccactgtacctactaattgtcactacttaactcttcatagcaaaactttacatttacaggcaatttctttaatttatttaaaaaaaawtactgaagaaattacatatttactacaatttgcacactaggtctaaaatcttttcttcacttaaagaatgttttccttataaataataacaaagttttaaatgaacacatagaattatagtagagtgaagcctaaatttatacacagccacatatgaaagcttggcagtactactttacaaatgcagataatataaaactttgaagaaaattatgtgagagcaaaagtgatgtattcattttggccctgaagctacatacagttttattgtattttctattatttgaaattagctatcaaatggaaaattcctgatatctagcagaatgctaaatctaagctactagcaaaaaactgaagtccagatgggttgttcccttggattttatacatatgtcaaaaaaagcagtagttaagagaaactcaggacatactgacaatgaaacagactctaaattcatactgacaatgaaacagactcttgacacttgaaatgtggcaagtccaaatggagatgtgctttaagtgtaaaatacatactgaatttcagagacttagggaaaaaaaggaatgtaaaatatttcattaaaaatttcatattgactacatgtcaaaataataatatttttgatacattgggttaaataaaakatattaaaattaatttcaccttaaaacaatattttagtgtgtctaccaagaaatatataattacatatatggctttcattatatttccattggacagtgcagccctaactgaatgaattatggtggccagctggctctgggctgtgcacacagctgctcttccagatgttctttccatggcaggtataacatgtgattcatacggaaagttaaaagagaaaaacgctgaaataaaaaactagtgagagaaatgactataaatactggaaaaaattatcaatgttttagatatgttaaaaaagatgttatttgcttttgttacttgaattagtatattttaatgagcatataattaagatggaatatgcaatttcctcaaatgattaaaagccattttccattaaaccaacacattaggatgttccaagaagtcatacttatatatgttggaagaagtatatttatttctttgaatgattttgttttcatatttttttaatctgattaaagggtcctaagaaatgaagctgtgtttctgagttatttgtgctatcatgccgagctatcttcttctaggggttggagaagggggaagaaaggaagcctggtgacattttgggtgactgacagattctgttgtccctggtcttcctctgcaggccctccaggctactctgctagagcttctagccaagacttcaaccactgtgttgtgagggctcagtggcaatgtgagggagtacatgagaggagcagatgtgattgcaatmtaggtcaaaatagagtagaaagattagaggaagaaggctttggcatggagggcaaagaaagggaaaaagaggaacctaggataagtaggccaaagcaggtgcaagcttaggttggaagagggaaataaggcatggatgcacccagaaagggacgggctccaggtgatgatgcctgtgttcttcaagggacagatcaagctttattgtttctgtttttaaatcctcagtttacctagtttaaatgctttgcttccatagtgggacaataatgaaggaggcgaacagtaataagtcctattctaaagctttgggatcctttggctattgtacaacctccctgactgcagatgcataataacatatatcaaaacaatattaaagaaatctatttaaattgttttgatattttgaacacatttacttcagaaaatacatacacaaagttaataagtattataatttttgtaatactaaaaatgctattcagatacagaaaaacttattagaacagatcaaacaaaagagaacaaagacttgcaggctgtttgacttatacctatgtaacactggaatatttttacaaaatgaaaataaaaatgccaggaaaacattcagaagaacagcaagatagaaaccaactgtaactggaaaaaaaaagagcttgctatttaaagaagcaaaaaagtactcatttattcagagtacttagcaagaatttactcattttttatgacatactaagctaagaacaaaggtgaaatggattacctgggaatagggatatatcggagtttctttgattgaagatcagtgacttctatataaccagatgtttgtggaggagtaacatctacaaacaagtcatgacatgagccaagtwttaaattactgcaagataccaaaatggtgctaaaagtggaatcaagttatctgtagcctagggtagaacgctgggatctacttgacaaggtactgggtcaaccctcatggctagactctgagaaatatgcttccctcagggaagcatattgggctgtgattctttactgtcagaaaacaacctaagttattttcattgtctttgatagcttcccaagatgagtcaatgtttttgcatttacagtttttttaaaaaatatttcatcatctgaactgtttttccttcttaggaagcaacaacaatgcagtaaaatgtggtggaatcggcacactctctaattagactgacctggtaggaagtcctgctcctgtccgagctgtgttaggttggtcaagttattgacctctctgaggcctgctttcttcatttgtaaaatggggataacaaccccactgtaaaatggggataacaacctcagatgaccacagcatctgagcatcataagcattatcctgaggattagatgaaattagtaaatgcaaagcaccgacaggggttgctcatcacacagtatctgtcattattagggccctgcaagacaggggaaggtgaggtgaggatggggcagtggggtgaggactctggagtttggatcataatcccaaaagacaatcctgaatgccattattctgattgttgaaatcccaaaagatagataaaagtccctaaagtttaaaatcctgaaaatcacaatcacagtataattgcatcatgttatacggagctattactttgttactgtctttgtttggaaatttaagtatggtttaaggagatgcatataggtgccaagctgacaaagggtgtatttgtggacttaattttaggtgtcagttggaccgattatggaatacctagaaacctggtaaagcattattttggttgtatctgtaatctggaaaagagattagtatgtgagtctgagggaaccaggtggtgaagacctgccctcaatattggtggacatcatcccaccagccaagagcctagaggggacaaatacagaaggtgaattggtctctgagagctggaacagtcttttcttcaaccgccaaacatactgatatgcatgtatgacatttcccttttgaccaattgctttatgaatatggctcatgtgttcataactgttatactcatgtgatgtcattagtgtacctgagtgtttatgcttgcaaaaagtgtatgttattattgcctattttattgtgcaaggtggtttgtgaagtgttctgctgtttttgtttgtttgtttgttttttggagacagagtctcactcttgttgcccaggctggagtgcagtggtgcgatcttggctcactgcaacctycgcctcctctgttcaagtggttctcgtgcctcagcctcccaagtagctgggattataggcacccgccaccaaacccagctaatttttgtatttttagtagagayggggtttcaccatgttggccaggctggtcttgaactcctgaccccaagtgatctgcctgcctcggtctcccaaagtgcagggattacaggtgtgagccaccacccccagcctgttctgctgtttttatgtttctcaaaaaaaaatcttctttcaaaaatgtacataaatatcttttaaataattttaaaattattttttccagaattatattttcaagattttcatcttttgggattgtgccagaattttagactttaggaatatttatctttcttttgggatttcaacatttggggttatggcatggggattgtgttttttgggattatgatcagctctcaggatcctggatagtaaagaatatgaaaagttgggggaagataaagagataaggggtccagagccctcaactaattctataattgttatactcatgtgatgtcattagtatacctcagtgttggttttccagcaaattcctgtgctacactgatttctattccacagccctgagtaaccatcatcctcaaaatcattagctgccaccatggtgtgtcagaaacactgcttagtcttcacagagagtgcttctgatactgacaacaacaaagactaataattcttgtctgagagatgaagaaactgaggcttatagaggtaatgtaacaatatgacttatttggggtgatacagctggagagtgatggagatggcttcaaacccaggcctctttagcactaaaatctatgctctggccaccactccacacaacttctatgtgagttggccctagtgaaatagctatttgtaaaatatcccattttataaaatcttggccaccaagttctcttaaaaaaaactccccaacacaaaacccaagctttttaagatttttgtctgtttctctatctaatctttgatgacaatttctgattagaattatatatttatctattcatccatccatccatccatccatccatccatcttttattacaatttctggttggaatgaagtatccaggatgtcctggataaattcaaatttgaatttatcaaatgtagtttacaaaaaacaagaaacttgacatttttatttcatgcatgtagttgaaggtttttaaataggccagctgaaaaactcgacatatctcctatttatttaacaaatgtgtttgagcatattttgcgccagacatcatatgaaacagcgaggatacagaaaagagatgtggtctctgactttgaggcrttcacagtaaaatgaggaaagttcctttttattaaaccattgtgggcctctggggacttggaaaggattctagagttggaatcacagtcctgaggccaggtatgagctgcagagctaggcatgggttgtcccaagagacaaatagctcagcaggaagaaaaggtaatgtccaaggagaggaatgggtaagaaaatagagttactatagtaatttgaccacccagctggattagctgtcttcaagtggccatttgcacaaaatgaatatgcttatcgtaagccacacacagtctgcattggaaattctgcctgtgatataaggtcaatcttggataaagttttgtatcatatatcatttttaacaattcctgctgctcgaacctagctgaagtaggttgaattatttatagctcagggttctctgccaagagtgaccagttactgaagctatagagatgagtggagctgcctcgctaactaacttactcatattttggcttgccacttagaggcacttttacaaataaggaatagtattaagttgagctactgccatcagcacttttagattgcctgtgaaagcaaagtaagccaacttattttaaaatatcttttttttcccatatctttcttttcttttactttgctaattaattccttggtgagaaaatgcaataatgacagtgtctactatttcaagaagtagaaagcaagaattttactcctggtattaagaactattttcatatatcagagaagggtaattgtggctacagatcacttcagggaaatatagtaaaggtggtggtagtggtggtagtagcagtaagcactttaaaaataataaaaattgatgtttactgatttgaaaataagtcagctcagaagaaaagaatatttacaaaaagattcttgaacagaatacttgactgaattaaggaagtgaaaactgtggccaggtttccctccaaacttagccaagtcctcatccatccattttaaacgttttaacactggagtgaggatggaggctcagtaaatttccattacatttataatccaggtggatttcaaagataggtataagttgtatttagggattagttcactaaccattaaagggaagtcattgcagcagtgtttatcacatagctcccatgaatagtggggacagtttacatgcacagtgccaaggttagaaggaggtattaaaaactgtcaggcaaaacaaccaagacaattttcagagggaaggtgaaatgctatttaaaaagtcactccttctagaactgtaatttgatgtacacctattaatcactgggtttaacacacttctgtgttcacagataaaaagagtgatgtgtgcccccaaactgtgctgataccaaatttttgattttacccaaagttcaaaaaaacattgtactgctttcaatcaagaatcattattttgtgtttaaagagctcagacctgtggtttaaaagaagctagcatttagctagaagaaaaacagttggaagaaagcaataaatttctccccatctgcattaaataaaagctacctcattattgtgaaagccaccaggagagtagtctttacagttgatttctttataaaaggctgatatacattagttccagactaattagatggttggatttggtttactttacaaaattattctagcttgaattttcatcagagatctacatgcacatagaattaagtatcaaaaaggcttaaagaacaaacagccctgctttaccccctacccgcccccggccgccccaccatttcctgccccctagagacactttcaactttttaagctatttctgtggtattcaccttcatcattatggtgccctcttgatgtttcagcttcaggtattatctcttgccttcctcccaagcaagaagagagtttaactctttttcattccccaatcccccactcccgattttcccatccccccaaacattcatataattttgcttggattaacatccagtgcttatattattataattatctaaatgctaatcacagctttgctatgtcttatattatcattactttttcctgtataactttttgctttcattggagctaataagcatcatgttttgtttgtttagttttatttagtacaaatttattcccaaggttccctaattgttaaaatctctaaatatgttcatatatattgggtttatcaatttcaatttctaagagacatctctcctgaaatgtcatctgttctaatcttaggcctgtgcatggctgttaccctgggatcttccttcaccatgctcatagggattttcattctttctctctttttttacagcccacatttataaaattcttcccccatgccagacattgtcctaagcactttatatatgtttggaatattttagtaacactacttaaacaaaagaagggaaataaaactcctagaacctaagagaaaaatggctaaataggcagttcttggaagagcaaatggcaacatatgaaaggatgctcaaatgtactaaaagtcagaaaaaggtaatgtgaaaccacaataaaaggtttgacccttacaagagtagattaggatgggatggaccaggatcccctttatgctactggaacacctttggtaattctgctcctaaatatgytccctacagactcaacatatacacaagcagactggtgcaaggctattcatagcaccattatttgtaatagcaaaaacctggaaagaacctaaatttgcactgacaaataacagatgaataaattgttgtatgtgaagcagtgaaaataaaagtagaactatcagtatggatgatgacaaaggtctctctttgactgaactgtagtcaggctcttctgaatcttcttcccaactagttcccaactccggggcctctgtgttcatctctgcattgttcaatgctaacaagaatcctgctaagtcagtttaaacagaatccctaacccttgatatctgattgggttccccattctccaccatcccccaggtgatgtcagatcactctcggctgctctcagcagggatcctgttaggtttgttcagccagaattccctcttatcctagatgttttctctcagtaattttccatccactgacccccaccctactccttcacttatttccacttttccttgttatattcagagttgagccccatctctttcccttactacaaaacttctttgcagtcatccctagacctatcaagatggccctgcataaagcctaccttcccattttctaacaaatgtcatgaatgatttttttctttagcaacaaatctcacaaacatgatggtgaaaaaaacagaccaagttgcagaagaataaatacaatatgatactatttacacaaagtttaaaaacataaaaaaagctatatgttattttgtgaatgataagtactgaactcacattcagaatagagattacctctagtttgtcaaaaagtgaaggagatgagaacacaggggtctctgaccatactggtaatgacttaccaatatgggtggtgggtgcaaagatgttctttgtatttttctttaaacttttgtaggcctgagatattttgtgaaaaattaaaatacacatggaaacataaacacactcttcccgtccccaaataggaagtgttatgagagagtatgacaagggcacctaatatagatttgaacaagaccttctgaggaagtgacatttaaactgagaactgacagatgagaatgagtttgggggttggggggaaggggtgcagcagaaagttgggaagaattttgtaaattcaaattaactgaaagaagtyggagagttatgtaatggacaaaccacgctgcatcttttaagccaagttaaaatttctaaactttatcctaaggacaatgtgacctgagttgtgttttaaaatattactttctgactaaaacagttttgaaaatgaagaacaaagtggaagaatctatactacctgggtcaaccaagactcactataaaatataaagctataaagcaatcaagagagtacggtattagtaaagggatagacacatagaccaatggaacacaatagagaatccagaaatagacccactcatgtgggcagctgattttcagcagaggtctaaaggcagtgcaaaagagaaacgacaggacagtcttttcagcaaatggtgctggtgctggaacaattgaatatccccatgcaattaaaataaagagcctcagtccataccttacaccatgtaaaaaattaactcaaaatggatcataaatctaatgtaaaatatagaactataaaacttctagaagaaaacatagaagatttgcccttcatcaaaataagagaaaatgtttgcaaagtacatctctgacactgaacttgtatctacactaaagaacactcaagagttcaggagtttgagaccagcctgggcaacatggcaaaaccctgtctctacaaaaaaatacaaaaattagccagatgtggtggcatgtgcctgtagtctcagctactcagtagcctgagttgggtgctgcttgagcctgggaggcagaggctacagtgagctgaaatcgcatcaccacactccagcttgggcaacagagcaagaccttgtctcaaaacaaacaaacaaaaggaatgctcgaaactcattaataagaaaataaataacccgatttaaaaatgggcaaaagatctgaaacatattttattaaagaagatacacataaaacaaaatactcaacatcattaggtgctagggaaaacgcaaattaaaatcataatgagaaatcactacactcactagaatggtgagaaactgacaataccaagtgctgacagggatgcagtgcaactgaaacctccattcattgctgatagaaatgcaaaatggtatttccactttgggaaatagtttggcagtttcatcatatgatgcaaaaatgccattcctaggcatttactcaaaagaagcaaaaccttatgttcacttaaaaacctgcccacaaatgttcatagtggccttactctttattgcccaaaactggaaaaaaccaataaatatgtcaccttgtgaatggataaacaaactgtggtacatctatataataggcaaccacttggcaattaaaaaaaaaaaactaatgatacacacataacataaaaaataaataaataaatgattctcaaatgcactgtattaattgaaagatgccaggcttaaaagaccacatactgtatgattccatttatataatattctggtaaaggcaaatctataagaaaagaaatcaggtcagtgataagttgtaggtaagtgcaggcactgacacaaaatggaatgggggaagtttttggggtgatgaaactcttctatatcaagtgtggtagtggttacccaactgtttgtgtctgccaaactcacagaactatatgctagaaatggtgaattttactgtatataaaccgagcttaagaaccaatgtatgctgtactttaaaaacatcaccctgtctgatgtgtgtaaaagagtaggaggggaaaagagtggaagaggtaacaatatcagaaggctatggcaacatttcagtgtacgatggtggtgctttggatgggatattggtaacagaattggagactagtgggtggatacaagatatatttgcaaggctgtatatcaggacatggtgattgatgatggatgaaatgtggaggatgagggagaagaggtatcaaggtgagtcccagatttctgggtgaatgcaggtgcactaaactctggtacataacttcttgtaattcctggaatgctctgccaagtccttgcatctttcacatggagtacccctttcctggaccaaatccttcaactgattaactctcatctttcaagagtcaactcatagtctccagaatggattgtaaacttctactttgtgtttatatatcaccttgtgaatattcctatcttattatactgtactagaattgtcagtttattcatctgcctcttctaccacaaaaaaaattttaaggaaatggtgatttattttccatgagtttcagctgggaagaaactaattccaaatgttatcatataatcagaacttttcaaaccctgttacagattattataatacatttagcattatatttgtgaagtccacactaatacaatgcatatagacacaagataatatatcactaccactgtgacataaaaaaaaaaagtcaattaatcaatgatcaaactttttcatagttatctgttatgatgaatgccagtgtggttcaataagaatagatctaaacttgggattagaagattgtggtgcaaatctgggcactgttgtccactggtggggtgatcctgggccagttattttagttctgtgtcagaatatcttcatgtataaattagagagcatgctaacaataggatggggttttaaggagtaagtgaatttatacaaggaaaggagatcatcccaggaattggatattttatgcagtaataaatataagttgactttcagagtgctgttaagtgaatcagtctgcacgataagcccctgactttcagtcttaggagtttaagacaaaaggcaggcctcagtttctatgcctaatatactaagactttttaaaaggctctgtgaaaacatcttttaggtaaagttactgcatatattataatataaatgaagatgagctctaacagcagtggccacaaccacacactgtgaaaatgagtaagaactttctgaatacggagaggtctttttagttacttctaaacttgtcggaatgatcaatttttataagtatgaaatgataaagataaattaaatatcctctaccaaaaggaagctactttaaaccacctttgtaaattaggaattggtgagttccttcttaccttttgggtagatatcttttagagggacttctcctgggggtaaaatcctcactacctgattcgtatctaaaagagtcacacaattgctttgttttggagtcccccttttcttctttcctctatagaatgatgtatcagtgccacttcgtttatgcaaagatgatggtctcttccaagaataaacttcactgggtgactgaaaaaaagaaagagattaaagtactgaagtaccatatactacattcaccacaaccttaacaacgcagccctttaagcagatactagtgggaaactaatgtttcacaggtataagaaaatcaaattattggctgggtacagtggctcatgcctgtaatcccagtactttgggaggccaaggttggtggatcacttgagttcaggagtttgagactggcctgggcaacatagtgaaaccccgtccctataaaaaatacaaaaatcagccagacatcgtggcacatgtctgtattcccagctactgaggagatcttgtcttaaacaaacaaaaaataaataaagtcatttggatgtggtacaggaaggaggtagctgctttgtcaataatcataattttcagacaagtgtaaaatatacaagttaaattttttaccttgaaatcaattacaactaaacagaagaaatataggaattagttaaaaaataaagtaaacatctatacataatagaacataactagcatttttaaagccctgggagggcttcaaaagtgattgggccccttcccagtcattctctctctcccctagatttaactcttctggaattttgtgttatttttcccttgctttactttaaatttttaccacgtatgtatttatccttcctaagatcataaagataatttcttatgctttttctaaaagttttaaggctttatctttcatagtgaagtccttagcctatcaggaattaatttttgtgaatggtatgaagtggggatctgcattcatccttttctcacatgtatagtttattgtccaaataccactaacttttgcccatagcaacagtatcataaaacacagtttatatgcaggtatctgtttctgggcactgcattttgttctatggtgcatttttctattcccaggccaatacatggtcttagttactgaagttttataattatccttgaaatttaataggaagagtacttctgtctggtccttcttcagagatgttctggttattgtttgcccttgcaataatgagttgcattagctctctgcgtccttatcagtacttggtattgtcagtgttttttttattttagccattctaacgggtaggtactagtatctcatcatggttttaatttgcatttctctaatgactaatgatgtccaataacttttcatgtacttatttgccatccctctatcctctttggttaagtgtttgttcaagtcttttgctcattttttttttcacatttacctttaattttacttctatatctacctaaatacattgaaatctatgagttcacaaaaatatatccaattccaatctaataactacatggttcattctagttttcttcctttcagtatctgtaattcccctctccaacagttaaaaatttgttttcattatccttaatgtattttgttacccttcatatatttactttcttgctcaagtccactgtatgtgacccatctcccatctccaccactaaccttactccctgggcagatgctccactctacctgcttgggttctgacagcccataggggctgcactcacacagggacacatacttcaccttacttgggctcctacatcccattccaggctgccccttcacaggaatgccatcttcatcctgtttgggcttaacgtccatcactagtggttacctctccccaccatagatgtccttaccttgcttgggctctgatctttgataactcacactggcctactatttgctcatttgtaaaattaggctatttgccttctgactgttaagttttaagaatctttatagactctagataccagtttttgttggaaatgtggtttgcaaatattttttcccagcctgtagattgtcttttcattctcttaacagtgtcttttaacagagctcaaattttaaattttgatgcagcacaatttatcaattttctctttatatatcatgtctaagacactattaccatgtttaatagaatggtaacagtgggcaaccttgttttatttctaatgagaaaagaaaagaaatacttttgatgtttcaccattgaggatgatatttgctacagattcttatagctatttggtattagattttaaaagttatacaagtaataatttagatgccactgataactctatgaaaaagttaataagaggtagcatactcatttgtcaatagtttcatacataatccaaagaagttcacataaagcaagaaggcagtgtggtgtggtaaaaggatgtgtgttagagggctggctagtcacacttgagctcaaattccattgcttataatctttgtggcctaggggatataagctctgtctgtttctatttttttcatttgtaaaacctcatagaattgttgtaaaaattaactatcatgtatgaaagggcttagagcagcacactgcctattctgttgtggcctaaaagtattactgtcatcttaaaggctgcctagctgactctaatcttctatttaacaaatactcattaaatacctcctatgtggtaggtaccacactaagtagcagggatatagcttttaatttaacaaggtcactagtgttacaggctataagaatttctacaaggttaatagaaacagtgccttaacttagcttttattttctaactttttataataacattatacttctatattgatttcttcaatcagaagaaggtaattagaagatcaatttttaaaatagttttatctccagaaaaagtcccaattttttttttacagcagcaaacattgtagaaagcatataaaacacatctctttcatatcaaggctgctataaacactgtatttcaataacgtttcattttgaattacatgatagcagatgcttttaacttgataattaggaaaacatacatcagagtcctaagccacattatccattgagttttagatttcaaatcttatatcctgaagtacccagcattcattaactatattaaaatgttgaggcatacaaaattggagtaccgtcaagcagagcccatatttttatctttaaataattctatcatcccatctaaaagctacaaaggaaattataaaaattaaatgtttagtcagaacacatggagctacatctaaggttgttagatggcaacttggactgaaataacttttataattaatttccccacatttccatcagaggaagatgtcgcccagtttcacctacagtcaattcaaatagcttctcctttataggtaataggagataacagaagggcccatctaagaggaaaatcaattgagacaattagccattatactataacctggatgctgcaaagatatgataaatcagagcaaaactcaatggaaaataaatctatcttcatgactgttgaaaattttaatctacaataatgacaayccaacaaatttaactttacacaggaacaaaaaaccaaatatcacatgttctcacaagtgggagcgaaacatcgaggacatacggacacaaagaagggaacaacagatactgacacctacttgagggtggagagtgggaggagggtgaggatcaaaaaactacctatcaggtactatgcttattatctggatgaccaaaccatctgtacaacaaactcctgtgacatgcaatttacctatataacaaacctgcacacgtacacttgaacctaaaataaaagttaataaataaatatatagaatgtgtagatggaaaaataattaactttaaaaaattatagaagacatgacagaaaattaccatcagaaggttaagcatttaaactgtattacatgaacccccacatatggagaatactcatttccccctactaaattctatcattgcattacgctttcaatgttaatttttgaagtgtaatgaaactatttaggtataacatattttctactgactgatttggaaggaagacttgatccaacatgtttaccaggaaattatgtttttaattacccctcaaacaggcttacagattataggtcaaactaagggaaagaaacatttatccgataatttaaaaaatgggtgcttaccatgagatctggaaaaccaacaactattgtagcataatttttctcatctgagagaattctgttgggagaggcaatcttttgttccacagctgaacttagatgttcagatgatagttgatcactggaaattttatgaggtatgctgaactctgtttctgaaaagtacaaacattagacaccatatgctcctgaaatgctccaggaattaattttttgcaagattttattctcaacaagtcaaatggaaaagaacaagttaaaaaagagaaaacattttaaattacattcatgggcttttgtttgaaaaaatgctgtttttataatcaaggcatcttcccaaagtgatttcaagtatttacagaattcaaaattttattaggaataaatattataattaatagctccctgtagaaaagatgtaaaaactgacccaaccaagggttggcaatggtatgttttagatttttttcgtaagtactattcatcccccaaaactgtgataaattaaatagaaatcccaatagtctgcagaaaaaagatgttatcctaaattagacttgcaacctaaatgtatataaaaatactgatctgtcagttaaaaaaattcaaggacagagcttacaacagtgaacttccttatgacaatttgagatactagattcttatttactatttctggtgtagtgactaagttttttcttttggtgtaaacttaacataggctggtgttttgttcttaaatgattctagaagacagtatatgtacaagcatgcactcacacagccataaacacagatgacatagtatttaccttgtgtaactccaaaccctgtgctgggcggctcctctttcagcacatacaactggcaaaccccactaccctcagattygatgtgtgcaggcttagttaaaagatatttcctgcaaacaaacaaaacatctagcttaagtgaaatttttctttttctaatagtaataaggccagactaagaaaaattagattctcctcagtctcttttttatagttccagtataatttgcagttttagagtttcatcatgaattaacaaataacttctcaacactgtgttaaagagcagtgcacaacagcaatacagtaatgaatgtgaggcaaaaatccartgcttcctrtaagagaaagggttgtggggaggggaagcaactctaatggggtgcactcttattatcatgtaaccctctcttgataaaactctttgatcagccaggaagggggagtatgacttctgatttgtgatcagctaggagatagatgccctcacaactgtagtctccttgatctacttatttttaacatttctaaaatatggatgtatatataggcagaaatcctctgcaatgagatacttctgcttgtcagcagaggggcagaaagagtctgcacttagctagtggagttgtgcatgagggaaggtgctcaaagtcgacaccgcctttcatcaagaactgcacagtccaatgggtcagataacataaacataaacataaccacatccaaaccagaatacacaagataaaaagagaaagacacttctaaggtgtgaactctgtgaatttacaaagaggcaacagctctaggatagagactgtggctctttgaagggaaaatctactttgaagtgtctccagtttagcaagaatacagtgaattctcaatgtacaaataggaaaaagcccaaataaatatggatcatatgaaaaagtcatgattttttaactgttaatttcaatgtcattttctgagaagtgacatttattttttctcccctcctcaattcttataagtctcatatatagagatgctgccaaacacagaaattgttaaaggacagacacaggaaagacagaacagtaaagatgttggataattcataaataagattgagctacaacatactccatgatacactatataaagccactcactgatttgttttgctctccaccagaagccatttgtcctctgctacaaggaaaactgtcttgaggttgatgggaagtgagatggtgtgagttcgcccttctagaacatccagcacagtcaggctgttcctggaaaagaagaaaactgtatctgaaaggaaatggtgaggataatggttgagtaatctggcataatcatttcatgatacattatgcaacccataaaaagaatgttttaagattaagtaataatatagaaaaatgttaattaaaaaaacagatatgcaaaattctaaactatgtcagggtgtgtataagtaaaaataatggaaagtagtaaccattgccatgttagtagtggctatgtcatggaattgtgagcactagcttttcttatatctgtttctcaatattctgcaatgtgggcaagttactttatattaaaacattcataatttggttacattcactttatagtaaacaagtataatcaaaataggaaatagaatgggccaaataagaactccagtttaaatcctctataataaagagctcaccctttttctttgtagaacaccagccagtttttgtgtgaaaattctttacacattttataagtttcctaaagacaaacaaaacaagatattcatattaaatgtgtcagatacagtcatgtccctctttagctacttccccttaaataaaataaagttcttcaactagtaaaacatgtaattctcaaacaagctatctatttatctgctctaagactcttatggtaaaatggattaaactatatatcaaaatttactgtgaactttgtactaaagcctcttcagaataaatttttaaaaacaacaccaaacattgttaagaaataacaggctatctgatgattaaccatggaatttacaccataaaataaacacatgggaaacactttgtttcttatattaggatacatttatgacattaaaaaaaatcactcttttcatagtcttttaagacctaagtatgttgacttgcagggcagagggtaaaccttattttaaatccattatttttttctgaatggcagaataaattctcttgtgttggcctaaactatttacttactagtttaatttagttaataaactaaaacacttatttgtctaatggaggaaattaggtatcatactcacagtttcatcatataaatccaaaacataactacataactggaaaacaggttaaattgactccatgatcagaaatttgttaaaaatacgatattcaaatagtttttaattttctcttattgttagtccagtcctggcaaatcttcatgcaagtataatgtcataaaaagaatttattgatatttaattatacacatatctatggttatatatatcatgttaaaatctatacgtgcataacaggaaattctcttgygcattacaacaaaaaaggcacttaaagggatgggcatgcatgcatctttctggttagaaagctatagaaatccttggcaatttgtgggacaaatgtggtgtttcttacagcttcttctttgttccaccagaaaggtttcttagatgtaaacttctcggaagggaggatgagacgatgaaggrcccggccagtagtatctaacaacaggataacattactctgcaaatgataaaaacagtgaaaagctcaagatttgktctttttttttttttttttaaagcagcaacctcttggcaacctgacagtgaaggttatagtgataaatcaaaacaaagacaatattgtaatacttaagaaatatcacaaagacattargtgatttttcttaagaatcacaaagaattaagtgcttcttaatttaagaatttaaaatttttggtggttttatgaagacgtttctaaatatgtgatgcagaaggtattctctttaaatatttttatgtaaaaaccattcccttttaaatataagctagttgaaccatgattctgttttattatctagttataaggaaattacaaggattgatgattttaagaaattcatctacctgtaacaaaattatacttagagaatgctcagttgaaagctctcttatattgtgcataattaaatctcatttatctttttcacaaatccaggttcaatttagaaaataggtataaaatagatataaagaggactaagcaagaaatatgaaggactccaagaaactagctagtaatgaatgttccttcatttagaaattcaccaagcttgaagaaccttcataactggtgctgtaataaagtacaaacaacagatttctgcagcattattaatcacagctatgcaatgatgtaatctttcagtaattaggatacgtttttttaagaaaataaataaaccttatgtgttgaaataaatgaactgaaatacatgaaataaaaacttaacattgagaaagccagaaaaaattaaatattttaaagggatgcaaagaagttggctttttagttaaaatataaagaattttgaagattagactaacaggtttgcagaaaggtacctgcaagttatttgtcagacctcattgttatgcgggtgtcttttctttctttgttttattttattttaaatgtggggctcctccagttatcctaactcttgtgaacttttcatttcaagaagaatttcttttggagaaaataaagtcacaaagcacatgaagaattaataaaaaccttgaaaaatatagaaaacaataaaatgtgaagtgtttgttcattttttccataatatttattgaggagcttatatttaatatataaagaatacaacaatgaattaatcatgacccttgccttctgtcatataatttagttagagaaataaaaagaaatgtaaaaaaatgaatgattcatctgcaaatctagcatctcagtgtgggtttaattttattttacaagctaattttgtggaagtgttcaagaattaaaatagtatttgcaccatataactcacttcacaccatatactctgaattttatttgtattaaaaaattttactaagcatgttaaccaagcttaaatttctttcataaacatcacccttagaatgtatcattctgtataagatataattctccattaagaatgtgtgttagaaatattcttttaaaaattaacatataagaagtgtcattcaccactacttgacagttttgaaaatggtaatgatatcttagagttttccttaagaaaaaaataaaattaagttaaaaatttataatctctattctagattaaatattttttgaatgagtactttttgatggaaaaaatatttcttgtataataaatatgtacaacgttaaaatgaattcttagcacttaagcaatttgggataatattagcctttgtaagcaaaggaagtcctaaaaatgtttcatgcccaaaaatgagtaagcataagaataagcagttgattaaacaaatatgatcaagcagaaaaagaagttagtatcgtcttccattttcctacctttttagggtctaatacttacatattcataacatggcataagtgaactgaaaaactgtatctttctaagtgacagaaaacatgtatttccagccactgctgtatttagaattagtttataagcaattggcaacatgaaggagttctgttgctccatccttttagatgttaatggtttccttctgtaaaygactaatgatagattctgtctgggtttaaaaatagaattttgcgtcacacatgagtacatgtaactgtggctttggcactcctttaaggggggcagggaggagacgcgagtgagcaattttattatgtttgtatttaactgggagaaaagtaacctctggatgacctcaatgtccctaaatctgaaattctaaactttgtacagatgtaataaataatctcatggggagtgggggaaggggagggtctttatttttaggcatggcaaagtttccctttccttacttaagattttattttagcaaggaatttttgaacaacttcttaaactaaccagggacatgcatctgagcaaagctttatgttaaaaaggcaaggaatagccgaattcatggaagtacttctctataatattttgcttcattttcagttagggtagaatgaagaagaaggaattgatggcagtctacttatttttcattccactagaattatttatcagttgttaaatttcacagctgtgtgctgttcacatggaatttyacaggtctgacatcttgacagaggtatattgtaaaataagatactctctccgggaaaagagaaggcagtttagaggacaggtagagaggaagtatacagataaggtgtgcaggtctgctcagggttccgaagcagtttcctggaaaacttgaaactgtggccaaaggggtaagtaaggcagtatatgaggaggcaagatgctggctatggaagtcaagcacagcttcacaatgaaaatcagattttctttcatgaaagtaattgaaattaaataaggtattaatcagcaatgttaccaaataattggatcttttgaggaaataaaactcttgctgagaacctacaaatctggcacttttattaaagaatttgtgtatgtaaatttgacagttaatttgacagctgaaaatgtggcaggactgttaaaataaatattccaaatgtagtctcatccaattttgactgatttactaaattacaaaccaccaagatatcatgtaccttttatgacacattgttttggttatagagttaaattcaatggcatcaatactttgttgaaaatctttaaagtaaaaccctcattccaattttcaggagayaaagttttataaacaatatctggatgtttataaattctgctcctaggagaaagtaaaagtaaaaataaaaaagtgaaaacaaaatcagaaaaatacttataactcagaatttgtgataatttctggtggcaaggactaaagttaaagttgacttatttcctcaatgaactactgatatattatgcaatacttttctcttgattagtgaaagtattatttcttggtagcactttgctctttaaatattcataagtaacaacactgcatttaaaaaatattttcctattatgagtactttttaattttcaaactaatctttttccccaaatctgtagtgagtgagagagtaggtgatgtttaattctggtagggtcaatccaatatgctatgaatctcagttctgctatgtacttgccagacaagttacttgaagtctgagcctcagtcctctcatatgtaaatgtggctgagagctaccctcactgggcagctggaagaataacatgagtaatgtaagcaatctcttacatgttatgtcatcagcatttaacaattgatccttatctttgagacattcatcacttgcattcctggataacacactcctcagcttatctatctactctattggtcactcactttcaaactcattttcaaatcattgattcttcctcatctccctgatttcttaatattttactgccccaaggcttagtgtttgaacttctgttctctatttacattcactcccttggtgagttctttcagtctcatggctttaaagaacatttgttaatgaatcccaagcttgtatttcctggtaggagctctccattgaactccagtcttatcatctacgtggatatttaatagacatctcaaactgaatctaatatcatctgagcttccctcccaaactgattgcttccccatcttagtcactggcaacttcaagttgctcagtccctaaattttacggttgtcctttactttctctctcaccccaaatattggaattgtttggaaatcctgttggttctaccttcaaaatatatctagaatctgtcattgcttatgagccccatcctcctccaaaccaccattatttcttaactagtttccctcattgtgccttagcacctacagactattcacacagagcacccagagaaatcctttaatcatgctagctccctgctcaaaacctcctaatgtcttccccttttactcatagtcaggacccagaaacttcaacggcctacaagactctacaccagtggcccccaacctttttggcaccagggaccagttttgtggaagacaattttcccactgactggggaggtggggtgggggctgtgtgggkgtgtgagatggtttcaggatgaaattattctatctaagatcatcaggcattagattcttacaaggagcgcacaacctagatcccttgcatgcgcagttcacaatagggttcacactcctatgaaaatgtaatgctgtggctgatctgacaggaggtggagctcaggcagcaatgcttacttgcccaccacttacctcctgccgtgcggcccagttcctaacaggccaggagccaatactggtctgcggcctgggagttggggacccctgctctgcacaacctgcttctcaccacccccttcactttgcccctactccaacccacagtgtaacctctttatctcacctcctcctacttccctcttattcaatcttccccactacgcttctttaaagatgaagaggcatgtttctagactctgggcctttaaacctactattccttttgtctagaactctcttcttccaggtacctgttctcctcttcacctctctaaaatctttgtttaaatatccccctttcaattagacaatccctgcctgccttattttaaattgcagtcttattccctcttgtttctcaccttctaatttaagatataattatttattttgcttattgtctatcttcctggatcagaatgtaagyttttgagaacaagaatttgtgggtatttttggtcactgcagtatccccaataggaggcacatgatatatatttgttgaatgaataatatgcttagtgtagtacttggtatatactagatagataataggtatacaaaaacattaggctcctttctattggtattgtatagattaacttagacctttagaatgatcactaattgaagcacaatctgtcttctgatatatgtgttttgtttggaattatttttagcctgactccgggcatctgtgcttgtcactagtacaatcttagtgtactaatccatagtaaatgacggatagaacttgagcatcattagatactgatggatctcactgtattccctttggtgtatttacatgactgtctctaccaaaaaacgtcattcgggtctcagatamaatgtcgtctcctaaaaggaaatatctcagcactctttttaataccattcacctcaattcctcctaccccatctacatcactcccttggacattactctgtttctatatgtaacaattatcattacctgaaactggcatgttcatttgttggtttacttgtctatctccccaaaatgagtgtaagcttcrtaacaaagaatcatctgacctcagatgtcaatagtgtcgaggttgaaaaaccctgacttacctgtttctagaggtataggtcatgttgaagtctctagagaaaagaagatattagcctgcctttgtagtactgataaaatgcaactcctgacccatccctccagctcctctccttgatcatcatgaaagcacatcttttcagttataggtttctaatcactcttgcctttcatgtaagtcattcctcacataattgtagcctggtgtgcattacctgctgctcatggagaaccacttgacctttgagaggacttcccagcggtgccactgtcacaaaagggtgccaaacgccattggctgttcttgggaagatatcaaaaaagtccacaaagaagccacttttcccagtcatattcataaagtacagggaagcgggattgcatgtaactacatagagagtattttgctcattttctgaaatgacaaaaaggtgttaattttgtggctggcaaccaattctctaattggccaagaggtctagtgaaaactgaatcatgaatacacagctggaacagagttggaactcagcagatgatttgtatcatggcttgattaggctgaaaagaccatgagaaacaacttagttttgaccctaaatgtagataaggtcacacctacctacttgaaaaaattggttatctatttgttccccaaagaatgtcataatatcttgtgataaaaccattaaatattaaacaatcctcaatgtcaggaaattcttccttgtatgacagtaacgtgcttagtgctacagtgaaggtctgttctcttgttggttcagatggacaccagttggtcaatgtcttctatctgctaatcttgcattttccagatagttactagctctttaagatcttcttgctgtaaataagtaattccatttaaaaaatcttagctctatggatcttattttccaaatttttgttcatatttgagtatttcttactataaaatctctgtcttttcaatctgggtacctaagtccatttccttccatttgaagaagtcagtgcttcttcaaatttcaagtgcctatgaatcacctggggatctaataaaactgcagactctgcttcaggaggtttggggtggggtttcagattctgcctttccagcaaactcccaggagaggctaatgctgctggtttgagatcctcccttttgagtagccaggctctggactaagtttctcataatctcttatgtgggmaccgctgaagcaagggattaagctacttttgcataatgaatggtatcagcatcacctatcacccaggtatctattttacaacagtcatattttccaaaccccaaattaagacatgagatatgacaataagatacgtcatttaaatttgggactaccctggaaaatctggaacactatgtgtgtctgtgtgtgtatgcatcatatctatttattatatataatgatatattatacatatcacacatattatatataaagatacagtaaatttaaataaataagtgaactgataagaaacacaagtcaacagaaggactgaaaaagacctatttttttaggagacaatgcaaactgtagatgttagtttcaattatcagatagaaccacagaatttataatttatggatctttcataatgcttccattatcaacacaaataagttctattcaacatttatggcataatatagggcactgggaatacagtaaaagtgttaacagaaatgtacttaataaactctttaactgttttctctttttgcaggcattaaatgcagttcagtctttgtcttaaacatacagatacaagatttatatttatcttttaccaatttaagaaaaactgtaaatttttaaaagcacatatttttatttaaaatagcagatttgtggaataaactacatcaatagaacttataggcataaagacaagataccaatttttgtctcaacaattctcatcttatcaagttagagactctctcccttcccccagccaccacttctgtttttatcaccttagtaactgacagcagttgaggaacttctgccaaaatgtacccagggtccactgcatgaatcagtaggtaatggcaacagtccagaagtgtggatgccaaaaattcacattctttatttgccatcctttacaattagaagtttaatgactgcaaatcactccagccctactttcatggttcatgtaatcaccaaactggaatcccagccaaaaaacccaatgtttctcctttttatttttcccttctatttttagcacatgcctgggtgtgtttaactttgtgctacaattgtaatgaraaacagacatatgcatacaaactcaggagtgcttatgtggattccacaatagcatttttttaggttgttagaggaaattagttctaaattacatataattgctatccaatccaagaatgacagacaccaagtctatcataaactttttgatgtctagagattattttaatccrtcttttaaaaaaacatgtgcaggaaggaaagatcaaaagaataagcagacataccatgtgatgtagcaatgtcacagattatattaatttcatccaatggtattctccatgaggcacattcttcagtaaagtttagggatctttcttcatgtctttctattggatactcctgtatatttataagtgctggaccctataataaagcagttatctcagttaagatattttggttgtcaccaaaatgtagaaaagctaaagttcttccaaaatataaactttaacattcaagtatttaatatcctgctataccttttttcaatttattgacaggcttagtactcataacagtaatagtatcacacacttgcacttataaatgctttcacatgtgctatcttatttaatttctcattttttctttttactcacaaaatataccagatgtaaaatcctatagcatttctcatttcttcattccttcctaaggcgagagccagttttgaactccaagtatcaggacgcagagctgtccaaaccaggagaataattcgcaaatgaatgagccagagcctgatgcatttccattgtgaagaaggatttttatgtcattacacagaaatgtaatggttaaacctgggtattttaaattaaatgcaaaacatgtggcatttgaaattttttaaaaaaccaaacttactgataaccactagtggtgacttatgaaggatagagtatttcacacatggtgataattattcaatataaatataagcagaggagctaatttaataatgttaagaatattagttctgggtacttagatatgacttcttgaaagaatgctataaatgtaagcaaaaaccagtgatttgcatgccctacagtccttaattaatcaaaaatgtttggactagatattggcatccatgtcccccgcccaccacccctcttctatctagtctatatcttgagggctagggagtaagaaactgcatttctcatactctctttaaaaagggttctggaaatgatttaggttttgccaattaaatgcacttgaatgagatttggaaggcagaaaagaggtagtggccatcttcctgcagtgatagcagacaaggaggctctgacaaaaatgaacagttggattaccacatgtctgggtgtgtttcactttgtcctactgtaagggttgacaaactatggcctccaggccaggtctgatccacagcctgttttttttgtaaataaaattttggtgaaacacagccacttccatttgtttacgtactgccatggctgattttgcactatacggcagagttgagtggttgcaacagaatctgtagggccacaaagcctaaaatattgactctgtggtcctttagagaaaatgtttgctgacactgctctactgtgctgccctcagcagcagggatgacagcagaagcagaaatactgatcttgaaattacaagtccagtgttgcccctcaacttctgttcctgctgccctttctaatgattttacaagcatctactttctcacagtaaattcctttctgcttgaaatacctagagggacttctattacaactagtaacggacagttctttactttactttcacatgaagactgaacctggcaacaatgtgtggctaaaaagaggccaaaaatcaaaawgcacaaagttttaatcctatcagcacaagacaaataccacagagcaactttcctaggaaaatatgtaacatacctgactctcatcatccaattagctctttagaaattctatttagcctttaggaattatcaactgagaggccagcctgatttgaaagttagagcagaagctaaaataacatccgaacaaatcatttctgagattgtttgaattatctccagggaagatacagcaaaatttataaggttcaatattttaagagagaataatgatgatatcaacctttatgtctatatgatgagtttccactggacacaagagtttttgcatcccacttcttgcctgaccaattgtccagtagcccatgaacgtttgttctggcagagtcaacctgttaaggatgatttgcaaagtaaatatttcttattgtacccaagtcatagaaaaaaataacacggcatctattatcaaccacacaaataaatttgaagagtgctttacttagaagtgagttatacwtcattttattaaacgacagtgtataaaatcatgtttaaaatatactttaagacaaaaaagatctcgcatttcagaaactaagaaggtaaggcaaggtcctgtttttaccttaatgacaaatacaattgatttacatacatactcctttgaattgcagtaattgaacatctaaatttctggtagagtataggaaaacttttctttaaaattggagcaatctatcaattttttcagtctatttttttttttttttttgagacgaagtttcactcttgttgcccagactggagtgcagttgtgtgatatcggctcaccacaacctctgcctcctgggttcaagcaattcttttgttttagccttcctgagtagctgggattacaggcatgcgccaccacacccggctaattttgtatttttagtagagacggggtttctcaggttggtctcgacctcaggtgatctgcccgccttggcctcccaaagtgctgggattacaggcatgagccaccgtgcccagacaattcttttaaatttggaatcaaataatgaagagtacaccatactactagtcccacatttgtatgttgtatagggcaagtttcatagactttattttggcatcttaatttttttcactttgaattaaaatataaaatacatactaaaatgtccacataaatgtcagctctgcacacatgtgtaacaagtacccaaagaggtagagcattactggcatccagaagcacctgtggggccactttcagcactaatccaccaagggagctaaatgctgatttctgatggaatcattctgtatttagattcccttttatttaaaatgactttcaaataaggtgatttgccaaaaccaacatggcaatactaaagtataaaacagcagataattttttttaagtcttcattttttttttttttctttgagacagggtctcactctgtcacccaggctggagggcagtagggcaatcacagctcactgcatccttgaactcctggactcatgatcctcccacctcatcctcctaagtagcagggactacaggcatgcaaaactatgcctggctaatttttttattttttatttttagtagaagcagggtcttgytgtgttgcccaggctggtctcaaactcctggactgaagtgatcctcctgcttcagcctccgaaagtgctgggattacaagtgtaagccaagtcttcactttttaatcatactatcttttatttgagtctttaaaataggaaccattgatttgtcatttaatgcattagaaaattagtgattcagagttaaaagctctttaaaaataatatgcacatggctacaaattgaaatgtatccttggaatgagtttgatgatcattaaaagaacacgtttatatttagaaattattttatttaaagtaaaaagtagtctgacataatatttccatatgcttaataagatcatgtaaggctaagatattttttgcataaaataatggaagcaaacattctagtagaatatgcttttcgtcccttttgaatgctaatgtttatcacaagaggaacgaaattaaaaagaaatttacattgaaattcttctaagtcatatgacataaacctctcaaaagcacacacacacttttgaatctatcatctaaaatatattttaagtatctgtacaattatctcaatcggggacccacttacttccatctttttaccaggaaagaatgtgtgtgtgcagggggtcgggggagggtactgaattaggggaataaagggttttacaattactgtgttctctcttttgaatgtaataaaaatacatttctgtgttaataggccagatcttgaaaacatagactgggatctctctcttggtttagggaataaactatattttacatttgctttcagcagttcaccaaaggagaattggggctccaaatgtagaaacagaaaaataacagaaggagatacacttaatattctgccagcatagaagacataatgtaacagactgcaagagatttgggttttagttctagttcttttattaacctgctatataaactcgggaaggggaaagtccattgttttctctaagtattaattttttttctttttttgtctttttgactttgcttgatattaatttcttcatttgtgaaatgaagggaatgatctgtaaagttccttacagcttggggagtctgtgaggatcaaggaagagagtagagagaagtgtcactggtaagttttatagtcttgcattgtcttgatactctgaagtgaaaataaataatcagaatgaaaatatctatagttaccaacagaacagatcccctgatagatacacatgctttattaaagcatataaaaacaagctctgaatacatcccaaattggttctttgaagacaacagaaacagtttcacatcttgaaatttaatttaattcaggggagatcattaattaaaacaatctttggttgatacctagcctaaaaaattgatctaatatattctttcataaaccgtaccaaacaatcatataaatgctttaaaaaaataaaaaaccttcatccatttgagaaaaagtaactttgctcaactttcagattttactgacaatgccaggcatgttcataaaatctggtttgaacttgccaactcattctaagtaagtcatggaaattatatgttgtctggctstatataaaaatagcactggctgtttggttggcagggtatgggaaggacctccaggtaccctatacagaatctatttcagaaccacataacatgatgctatttggcagtaataactaaactgaaagacacataacacagggtgtcctggagttacacaatcaaactgactccatcctgtcccttggtaacatggggtattattgtttccggacttttactgtaggctctaggctggccaaactgaggtaaacccaagaccctcatttattttccactactaagacctctgaataagctgtgggaaaatttgaccattactaactttctctcccttggtaagttagtagtcaggggaaaggggaagcattgtattatatttcggtaaatgagcaagctttggaatttgaaacataatcaacattaatttaggggaaactctaaataaccagctagcaaaaggccctctattcccttagtgaactatgtcatccaactctgaccagacttaagttttaatatctgatttgattaaaacaataatggcattttccatggctttaagactttgtcacttgtattgtttaactttgttaaagtcctagctggaaagatgtgtggatttgatttcatggggaaggagaaggaacttaaggcccataaatagcactactttttatctgcaatgtcattcatgaatttatgtttttttaaaacagtgaaatatttcagttcctatgtttgtcatttcttaatcccttgtggaaatgataataaggatctggaagtaaaagtttggactaaaagaaaggtgagtatcataattatgactcaggtcaaattatagtatttgagcaagttacagaaagaacaaaaaaggttttctttttttaaaaaacacacatacaatycataacatgatgcatatggacaccaaagccaagtactatatagtctgaatgacatgcaacagatttgtctaagattgcttccataaagaggtgagctgggttttaaagagtatgttctggcaaatttctgccttctctgaacatttgccaatactatttttggaatatgaaagaaaacacatgcaaaagatttggatctttctaggggcattatgcaattggaagttgttgacatacctattatcaacaattccgaaaacatttccttaccacaagaactactaattttcatgggaataatggaacccttcagggctgttccaacaactctcaaaaattcaacaattactaccatctttgagaagaaaaataacaactccaattttagcaggcctcactcattcctgatgttttaaatctaatttctggcaaaaattaagttgagttgtccaacaaagttcactggagcctttcatggaatagccctgactaataattctggctttgtgcttatcccttcctttcagtctcagccacctcaaactattagttgctattcctgaatatgctatgcattttcatgcttccaggaggccattacctctgcctagaattcctttctgctctggcctccttggtgaaatccttcttattcccaagtgccaattcaaatgtcactcccccttgcattactccccactcccctatattcctttctgggaaaaatgaattccttacacttctgggtttccacataaatttatacatacaaaactcctagaaactcttagaataaatttctatagaatctgtaattttcacattaaagacctgagagagaaaaaattttagagagagcaggtcagaagtaaaccaagaaatcccttaaaatatttttacatggggccgggtgcagtggctcacgtctgtaatcccagcactttgggaggccgaggcgggcggatcacctgaggtcgggagttcgagaccagcctgaccaacatggaaaaaccccgtctctaccacaaatgcaaaaaaaattagccaggcgtggtggcgcatgcctgtaatctcagctacttgggaggctgaggcaggagaattgcttgaacccgggaggcagaggttgcagtgagccaagatcgcgccactgcactccagcctgggaaacaagagcgaaatttggtcttaaaaaaaaaaaatttgtatgtactaaaagaaaaagccagcacattaaagagagataatacaaatgccccyttacatacttgaaattagtaacaatggataccattattaattcccagtaatatcttcctttatttgctagaaacttcagaatgtcgcttccctaccatctcacaggatgttggtaaattaatttggctttgctgcaaatgatgtatacctgagtatttgtacatattttctctttctgtgcttggttctgcatttagctattatggcttccacttcataacttagacttgtatacctctcccacctaggtcctgcagagatcacagaaatgcagagtaatctagatgtatgagatggaagattttgggaaatttgctattcttggcaggcacttctcaaatatactccccgatacccagaatgacactgtagtttagtgctgttgcccagcgtcactcagagccaaagcagatgttgtcagcttgctccacacatctctggctctcttcctcctcacagaagttgccagactagttctggggccagggtttcctttccttcatctttcttcacatttcactgaaaaaaagtcttctctctttctgccatctgctttatcagttgcatcttagtattttctaatcttatgttctttccttttctaatcgtccacgacaagaataactgggactgaaactctcccagttgttgaaaactttcccagagaaaaatttcctgtatttctcacaaggactcacggaatgaaaactctactatgaatatagcactttgaatataacattgcataataaggttggtagttttacatgttttccttactagagtgttaatgcatcgagagtaagccttacatattactcatttggatctctagtattcagaatccatcagttctgccacctaatcctctctcgctgttgtacctctttttcattgccacggccacaatgtgggcctcattcttcatcacctgggttactgcaactgctttgcaacaggtcttcctgcctttaggttcaccgcctttcagtttattacctttagaaaaccaaaaaggagtctttttaaattagaaaggtaaccatgttgttctctgattgaaactctgatctcttcctttcagcctcaccactcagcatgctctcatttaaccctgagttagttgccaaagggcctctaatttccaaaatgcaccatattttcttaaaatgtctccagtgttcttcccttctttatttgcctggagaataatttaatgattcagcctctctatcttcactgactcttccccagggcagatggctgcaatcctgagtcttggttccctcttgtgtggctctaacttcacatgagtcactctgtctctctgtctctctctyttttttttttttttttaagaaacagggtctagctatgttgcccagctggagtgcaatggctattcacaggtgcaatcattgtgctccacagccttgaacttatgggctcaaggaatcctcctgcctcagcctcctgagtagctgggactacaaacatgcaccaccactcctggctacaagtcagtctttcacttgacagctttcccaattaattgtgatcgcttcaaaggcagataatgagtcttcgtcacctttataattcatactccctatatgttgtttaccactaagtaagcgtctggtaaatgaaagaatgcttggttatattataactgccaacattttgacctacttgtttctcatctcaacggcaatttgcaaactactatggtaaattttccctttgcattctgattacatgtcaaccatttccttcacttacaagactcaacaaatgatgcactctactttgcaggtatatttagaaacgatagctacaggtggggattggtgatttctattcagctgggagacaggctttcataaaacatcacttttaaatgcttaagggatccagaatcattctgtgctactgcatgcatgagagaagattcatagatcttgaaaatttctatgtagattcgttttgtatccccataaatgagctaaaagcaaatggaatggctgtgaagctacttcataatatgccaagagaatataaggcaaagactatgacaatataaaactcatcaccactcttctgcttatggcacttttgagatgtcattaagtagactttatcatttttgaaacaaacagctcttttctgaaatgaaattaaatagtcattcagagtggaattgtacaccttagaactccacgatcaacaccatgaacttatttgaaaaaactatgactacaaaaagaaaattatgacatataataattcgggaaaatgaaagaaaggcacaaaactttaaacaaagaatattttatgttagttggataaacagtaaactgataatcattctgactttcaaagagaatctaataaacgtattccaaagagaggccctggcagggggatgttctttttgatgcctctgatactttgaagactccatagttgttctttgttagagaagtagcagctgctattgatggcacaactatgtaaatttttaaagcagaaaaccgattctaggcagatgtcctttcaagggcaaattcaaaagagatgaagctttctgtctgcaaatatgcacatctggcactgctctgaaaagataaatactaagtacaatcctgtaacacacactgcagtacacacaaatgaaaacacaatctcagctactttcatcaggggtaatactaaaatatgttgatgcatcaaaagtaagggttacatctctgatataagggaaggaagttactacttatttggcttccctattcaattagggacagtagatgacagaagctatgagttggaaggacgttaaggactatttaattcattgytctaagtctgaatcctctcaagtgcctccccaaaaaggtttgtccagatctgtttgaacccaatctacagaaagtacaccttctctttgtcctcagtagtctattccttctttgaatgaatataggagctattagccccccaaaggaagcctactctaagttgtaatgacttaatagcaacttacaggtacacaggtaatgcacagggatttatgattaatctgttaaagtgattatattaatgatcgtaattttgaagatcatagtactaagtaaaggatttttataaaagaaatttcaggccgggcatggtggctcatgcctgtaatcccagcactttgggaggccaaggcgggcagatcacgaggtcaggagatcgagaccatcctagctaacacggtgaaaccccgtctctactaaaaatacaaaaaattagcggggcgtggtggcgggtgcctatagtcccagctacttgggaggctgaggcaggagaatggtgtgaacctgggaggcggagcttacagtgagccgagatcatgccactgcactccagcctgggcgacagagcgagactctgtctcaaacaaaaaaaaaagaaattttaaaaagaattgttctattcattttgaagaatttgttaatgcaaacactttttttttttttaaagcaaaagcaaatccttattgcaggagaaaagatttaggatacaaatactacatgttctcactcatatgtgggagctaaaaaacttacctcatggacatagagaatggaatgatagataccagaggttgggaaggttgagtgggtgggaggggcttatgaagagaggttggttgatgggtactaaaatacagttaggtagaagagatatgttctaatgattgatagcagactagagtgactatacttagcaataacattttgtatatttcaaagtaactagaaaacagtacttgaaatgacaccaacacatagaaatgagaaatattcaaggacatggataccccaaataccctgacttgatcattatacatttcatgcatgtaacaaatactcacatgtgctccataaatatgtaaaatattatgtatcaataaaaaaagatttaagataatctgctcagattttatagaagggatgtgtttattaattcctggaatcaatgacaaataacattaatatgaggaaaactgtaattaaaagaataggcctagtcctcaatgcaaatatctgatccatgtttccaaatggtagaaaatagaatttgaaagacaactctaaagcttccattatctttgaaatctccatatctaatgttgtattgcatggcttttcccatgaaaacagttgactaaacataaagatgatgtttggaatcagagagatctgtggttgaatgccccgttctatcacttattggttgtagaatttatttaaggtctcttgaatttccrttttttaatctgtaaaacagattcaaacacacaaatgtacataccccaaaacctaatagataatagaaaaaaattacttaatagaaaaaacaatattgtaatgtagattagatgagctaacatttgtaaagtgcttagagcacttaataaagacttgataaatgtcaactatttttatttttgctgctttaaaaatgtgttgtctaccctcacttgatatgtttatgttgacacctaccaatgcataaacttacttatgcattggtaggtttaacttctggttaaaatgccatagaaatgcctagttaacttgatttttcacttgccgttggcaaaagtgccaatgttctgccattagagtaggcactgctgtgtggtataagctttgctgtactggaggcaaaggttctaagaaacagcaatttcagcacaggcctttaaaattttcatttaaataagaggacaaaatgaaaaattccagtgtccggagagtcaatagacattttacaaataaaatgtagaaaataatacatgtgttagaaaattaaaatattactaaatgtgatgcatccttttctctttctagggcctctctcaaaaacaaccactacaaacagctatccctgtgttctgaaatagtttaaaaagtgaacctattatatttaataaaaatattggctattatggtcttagaacgtgttaattcaaagttaccttattttgcctgaaacacaaaatgtaaaaaattttaattaaagcattagaaggcaggaagaaaatgcataacaacaggaaatctgaggagtaactacaagacttcattagggcatcctttccagctacaggacacttttaaagtacagtctcatatcacagttatttttagatgtgcagtttatctggcaagagcatttttatatgtctgaaaaggatgatgacatttaaacctatgcataaagacacaaagcactgatactaatgtttttaatcctgatgagaacatctcatatactttatgaatcttgttcattatgtttagaaaaaataagtttacaatttcaaggaatgagggaaatggagaaaaagtagagatgggaaagaagtgttagacataattaaataaatttatttttgataactttctttccaacaaattagcttgtgaatgaagtgtcttaagaagaactcctggaatatctcttctattatgtcaaaaagaaagactcaagaaaataaaaataattagaaagaaatatttttcagtgcatgaaataacacatacagtcayaggaaaaagtctagaaggatcatcaatggctatttctggatggtaacattacaggagtttttattttctttttgctgattaattttaaaaataaatgggatgccattcttcatttagtaaatatcatcataaagaaagccaacatctaaaaaactttttaatttccttagtttttttttctatttgactgatagaaatggatgtttgttaaataatagctagtttgctagtgacaaataggcattgaatgctctgggaggaaaagtagcttaatatgaagtaagtagtttaacatcaagtaagtagcattaaaaaagaaatcaacagaattaagggcaaagaacttggagcagagagaatgaacatttaagtattttatagaatgtgtgtctcctagagaaggcagggagagaaaaacacatgaaggtaacttcagaggatagagacaatttctctgtatgcttatttaaaaaattaccacaatctttgagaagtctataaatttcttttgtgttccaaatcaagaagaaatgatggctagtatacttcttatataaggtagtcatacaaagttttctaaggtttttatttttctaagtgaatcaccttgtgttttattttttgatcctccatatgtcacaagaaaaggaaacttaaatgagaatgaagaggtctccaaaatgatctctgttgtgccaaaagtctctatttatctgcttcgtggttactcttcactttgaactatggctaaaatccaagcatctgaatctgttataattccttgaagaataagaatttgtatattgtatgtacatgacawcacggtcaatgatgagttccaagttggttacttaaaatcccaaggtccttttaagccaaaactattgataattttcagtatctaaataactactctgatctagaaattccctgcaatctacatatcaatctgtttatatcatccttagaattggaattaatattacwtatagcccagctgtacccctgctttctaacctccagcaagttacataacttctctgtgcctcaaattcctcatctacaagatgcaataatattatatatatgccataggtccgttgggagaattatatacatttatgtaaagaaagtgcttggaaatatgtctggtacgtagttatctataaatgtttctattaccatcatcaatattattgtactaccatcattattaccattattatgaaatataatcataacattgttgttgttataattatatttagaagtatttacatttcattgttgatctatgaaatgacaattttctcatcttaagaactggaaagttagagcgacatataaatttaagataaaatagtgtataagtttcttaaaatggaaatctcatgaaaaagatagcatttttttctttctttaaaacaaatgttttcccagtatagcagatttcataaattattctgaaacacactttttaatttggaagtgctaatgtgctagcagtatgtttattcccaaataaaagaaagttcagacataaaagttcacttgaggaaaaaacaggcaaactttgctttaaagtttatatttatagttgtctatactgaagtatagcagataatctatgcctttggttggatgtttggacctaattctcttaaaatatatatgttacaaagatatttccaataacaacatttaaaattcaagagtttcaattttaacataaatcctcctatctctccctacaatactgacaaaatgacattagtacatgcaacacacacatatagcatcaattgtcttgtttctctataggccaaatccccatcttgagtgtggggatgatcatcttttcttgattcatagatgacatacagttgtttctctataggacaaatgtcacagaattaaattcaacccccatataaagcatagtattcatatttttaaaaatactttctcccgtatacttccttatttggttatgtttgccttctcttggcatgtcctgtcccatgtattagaaacttaaaagaggagcaataacaaatctcaggaagtactagtggaaaggggcaaatgcagtgggtgggtggggtctaggtagccaattctgatcctggtactaaggtctgggaatatatttgcagataaggaagaagagctccattatggcaggatcaagtaaaataaaataaccacccaataagactcagtctaaaaataccaggtttagcaaaagtttattaaagaagacaagttaaattcacctcatcacattgggcctttaaaaaatgtgcagaaacctgtgagatagataacatcactgcmctctttaggagaacaaaagggaaagtgacagcatctctcttttgggaattttgccaaagaacacaaaaataacatcaccgctactgaacagacaagtatattctgatttcagttgaggaagaaggtgctgtagatagctacacaaatagtggtttagcattatcttggcccttgtaaaaaaattcccccttctaaaacatctgacttatatctctttttagctatatgtagtgggtggccaattatctttccatccccatcctgagtgtgggyatgatcatcttgttctagtttcagtgtaactttactcccatcaataagcactgcggttggattagagaacatgaaaattaagttgtagcaagaactgttcattcagggcaaaaagatactaatagtattaaaccattttatccttcttccttaggaactgaaatccaatgtgtatcttccccactaacagtagctgcagagctgggtagaagcagcctacaagaactggtttagcaaaaggtctagaaaagtcaaagtgaaatcaaagactgcatggggaagactaactttttggcggtctatgtgattaccatcaacagtacactacttggggggcaggggtggagagggggaatgaaaagtgttagtatcacatatttttatgtttgtttttgcagatgagataaacattaagattatattaaaattcaaaggatgttagaatagaaaggaaccttactgatgatccacaatgaagataattgcatattctggcctggccagggcagtcttattttacactctttttacagaattattgtcaatagctccccctgcctttctcaaaaatgtcctgatttagatggtaaatcaaatatttttaaaaataatttctcccagtgtacttccttaatatttttaaatatttgaatatttaaatattcaaatattttaaaatatttttaaaaatcaaatagatatgctatgtataagaaaaggccctctgtaccaatagagaattagttaagtaacttctctaaattcaaatgaccaaaatggaatggtgagctctttgagggcaggattctgtcttgtcatctgtttctccatggctgatccaggtagacaggtgaacatatgactaactgctaaattcccaggccattactttgttcactttgtcatcctactctctctaagtacaaggctgataatttgatagaaattgctacactttgtcatcctactctctctaagtacaaggctgataatttgatagaaattgctacggaacctgtgaatttcaagaagggcaataaaacaacactacttttgagcagcctaagttattgcaattaacagatgaggaaaaaattgctctgaatgactgtggaaattatagcctactctgatctccttctaaaaggaaaattcactcttccttcacatctgcttaagtctatttctagctatatgcggttgggggacaactagttgtttctatccccttgtaatgcaagagtgtgaccaacttgtttccaggctcaaagtacttctgcttctactcaaaagtactagagttagaattaacttgccatagcaataatttttctgtttagaactgaggatgacaatgaataagttaaaccatttttagtttcttccttagaaactaaaattgctttataagtaaaaattttatcatgattaaccttaccaattaatatgtattttaatttttatttatagtcatgcaagagtagaaaaagaaattgttttaaaatcatgagcttagtttccataaagccagtactctaattatataaatttgttaatggtaataaaagccatcttatttccagctaaaaataaagggagtttacaaaaacgaagtaaataacttaagtttgcatattaaagaaaatttataatagaaagtttgcatattaaagaggatctcttgaactctcttatacagacaatttgttatacccattaaattactgacctagtttcaaatgcccataaggactgctaatccatcagtaaaatagcattgtgccaaaaaaaagtgtgcatttgcaactgccacccagtcattcttctggaaaataatttacttattcattaataatataaaccaatgcacggataatataatttctaagataagtccatcttattcttttaacacagaagggaaatatttgtttctcttttagaaattcctgatactttaataatttatttctattggcatatatcctgacaagtttttataatgacttcaaagaatcaataaatatggatgagtatacactttggagattatatatatatatatatgcaactttttttgctaatcactgatttatatttaatatataatcagtgatttatatttatatttaacacatttttttctacagaaagatagtgtctccttttggggctaaaattgaacagtaatttaaaagtgattattatcccctatgaatttataattaactatttttatagacaaagatggtattagatgcattatcaataagttaggcatattgaaaactattttctagtgaatttgtgctgacttaattactctactaaaaaactctgtcaattacttttctgatcaacaccatatgtgcaagattcttaactaacattaagtagtagcctatgattataaaataaagggtaggcaactagctcacatgaaataaacccactagttcttactacctctttcatctatgaagctgacataagtaaccaaaaatctctctagttaacatgatcataaatttagaaaattatcataaagaaaaytatatagtaacagaaataagaacatatcaactaaatgtacattatctctatgtgattttcatgctcgtacaatgatgtgcactggattatacgaaatagtaatacgcatagtaattcaacaaaaggactgagactgttaaagaaacaaatatttccctttatttattacatctactcatgggacatacataataatcaaaattttcaatttacaggcctataaataatgctatttaactgaaaagcagccagcaaacagcaacatatacatgtatttgaaaagcttactcatggaaagtaatttccatagcaactcagttttgtagaatggaatgataaatcaagaactatcagcatttaagaatcagaagagtactgaatttgccttactcctttgccagctgcacactggtaggctttgctccgataggtatcccgtatttgtgtaaagtgttaatcaatatctccctcatgtcattgttgtaggaatcaaagtcaaacacatttcgaactacactggagagaccttcagtcggaaatttctgtattaaaaaaaaattcccttattatgcatgtgataaaatatacaacattataaagatttatgaaatggataggacaataatgatyaaatgaactacagcagaaatttactggccttgtcaaataagcaggtagtaggaatgtagacatttttccctttcagtgtttgctcagatgacttaacaatattttcctttttaaataaatgccagaatttgaggggaaagagttcctcctctcaaatgttagagcagtgcctagatcctggtgtcagtgwttgccactgctttctgaaatctcctgcctttaatatgagtaccagatcgaacagtttaaaaatgctagttatgtaaaggagcgtgttaaatatctatactgaagttttcagaaaagtcagtctatgaataaatgaagaagaaaagataaagcaacaagaaaagaaggaaagaacataaaaagtrcaaacaacagagaaacagggagcagtagagggcaagaaaacaagtatgactacaactgaatttacactgctcatgtcctctgagtcctttcctgggtctgctttgattttctttaggtgatgggttctgagctggctgaattggacttacggttttataggcagaacaaagctgttatttttaatcttgatttctttccatatatttttaattgacaaataataactgtatatatttatggggtacaatgtgatattccaatgtatgtatgccttacagaatggttaaatcacactaattaatatatctatcatttaacacacctttatttatggtacaaccattacttaaaatctactttctcagcaatttcaaaatatacattacattgatattaactatagttaccaggctgtgcaatagatctcaaaaacttatttctcctgtctaactggaactttgtatccttggatcaacatcttcccctgtgtgtattctccctgccccacctttctacttttctttctagggttttcttggagggttggggataaggcagaggtcaagagttgttgggttgtgactgttagcttggagacccttatttgttctgtaagtaagatttatattattttttatttgtttgttttctttactaaggtggagtacacattgtacatggtcgcaggaaatttcattctcctgcctactctatcttgtgaaacttccttgcggtatttacaggtatttaatcagtacggttagttcctactctgtttactgttgtctccatgtgatttgyttcaaaatgaaaatattttttacctgcataccacatgcttgttgtaaaaagccaaagaacagaacaggaaggtttccccactgactcactctcttgcttcacctgccctctaacagcctcccaccaaatttcctaactccttggtaatgattacagactttgccaaagttaattcaaaagctgaacagataataatgttcattggcctaccatatttataacttagattatacacatttcaaatcatgtaatctgactcattattgtatttayggaaattaaaaactctggtacaaactgtacagtctgaaaaaataaaaaagagagtgatggctcttaggtacaggtgtgtgccatacctacctgtaaatgtttgactatgttgacaacttctctggtagaataaggatagttaataatcccttggtcagccaaactcctcagctctccaaaggcagccacaagcttctgaaggatgggctcaggcacatttggtccatactgtctgagcatctcgagctccgagtggggtttggggttatcaactgcatggcagctaaaaatatcacctaaaggagagaaaagattcacattcagtatgcaacaaatccattacgatgtcacaggaaaaaatggaatggttgtttaaagagccactggttgctcatcaaagcatagaaagcccatccaacaataggatggtacagagaagaaagcaaaagactgaagcaaaagaaaagaaaactgggtgatggatggtttatctccacgaatttatttttgttaaaaaacttacataatacttgaatacatgctcaccgggagatattccaatacaaagaggaaaaaaaattctcctttaagtctatgccaatgccactccctccccaaaaagcactgagtcttaatgtttagcgcatttatttttccagacctgtattagcactttttttaaaaaaatgcatacatgcaaacagagtttagataatttattccttttctattaatgggaatatatatttcaaatggttctgagacggcctttttaacttcaacaaatgttgagtatcttcaaaaattatatacatctatctcatataaatgcttctttatgtactaaaaaagggagaattagtagcatcactctctaaaaaatttgtatcttgtgcagattgatagaatatactttagaggttagttttggtagagtaaacctgtagagacattgtctgaattaaaatcaagaaaaggaatgtagaaacataataatatttcatctgtaatttagggaaatgagaatgtactagaaaaataattctattgattcataatctaagagaccagggatcaaatgaagtaaaagtaaatagacttacattatttaatatgttcattttagaaaatgaggatatctagtaaggtagcaataagatcttactttgatttaggaaccatttgaacagttattttgtatgtgtgtatttaaaagcaattgaataaaatgaaagccatgatatcttcaaaattttatctcatatactaaagcttttcaaatacaaaggtgaagaatggcttttgccttttttgctgaaaataaaacctatcactaacataaaaagacaattgacccctcattcatttactcatcaaataatgattaattaggacagtagaaatggtgatgctgggggaggtcagtcaggtaaacctcatgagaaggtaatatctgagcaaatgttgatacctgggggaagagcattccaggcagctggtacagctaatccaaagaacttaaggcaggcatacctggcatatggaaggaagaggcaggagagcagagtggatggaatagaggaagtggatagagcagcaccaagcagtacaggacacgaggttacagacataggaggatgtgggagacatactgtgtaggacactgcaaactgttgtaaatacttgtacctctactcagaatacaatgggaagccatggaggattttagcagaggcgtggactactgtgctgtgaacacaccacaaaagggtgtaggaagataaatatcttgtgagcagaggcactgaccacattgactgtatttccaagaatatctgaagagcaaacagtgcagccttggaaaacatattctctctctctgtctctctctctttctttctttgtaagaaggtaatttgggttacctaagctctgggttcctcttctataaggcatctcactataagtgcaggtatcatttggccctctttctgttgccctgtgggaagtggggcttgaggaaccaacacaaatgctggtactttgactactgcttttgctgaataatcattcctcttttgtctgtgactcaggagtctagtgtcttctgccaygaaagccttctgtggcaggctaacttgttagcttaaaagtagagtaaactcttagatctttcacagttcataacaaagaataaggctggaagcagggcgacccattaggggactatttgaagtaatccaggtaagagacgatggtggctcagatcataatggtggcaaatggaagtgatggggaaagtaagataattctgaatatatttcgagggtatagccaataagattgcaggatatttggaaaagagcataagagaaagagagaaacaaaaaatgaatttggagttgtcattaacagagatttacaaaagactataaattaatcaggtttaagaaaaaaaagttcatcatggacatgttaaattcgagatacaggagctattgaactggaagctggatatgagtgtgaagttcaggaggaaggtctgggttggagatgaatatttggcaataacaggcatataattggtagtctaaaayatgacacattctgattttattaaaggaatgagtatagataggtaagagaaccagggcctgagccttgggacattctaacaagctccaacaaataaggctgagcaggaatagttattaaggtaagaaaccaagaacatacttgaagaagtattgtaagtcaagtgaaggaaaatgcatcaaggagaagagagtgactaactgtatcaactatatactatattaaatactgctggtagattcagtacgatgaggactaagaatcaaccactggatttagcaatagaaaagtcactaatgacctagataagaacagtttctgtggagtaatgggagcaaaaatctgattagaatggaattaagtgaggatggtacagaagaaacggagatagcaagtgtagacaactcttttgagtacaaatgactgtgaggaattttgttacaaaggagaagaaaaaagtagcaatagatcgcaaaaagagtaagattaagaggtttgtgtgtgtgtgtgttttgaagatgaaggaaatagcctgattgcagatgggaataatgtaaggagagggaagctgctgatacaggagagggagggcagaacagctagagcagcaaccttcaaaaggygggatctggtgctcatctggagggactccctctagatgggaatgtgaacagtttacctgcaacaagtgggaaagcagggcatcataggtggaagacttggttgtaggagtctgtggacatttgtttttaattgctttcgtttttctcagtgcagtaggaagacaggagaaaataacagaaatctaaaagaaagtcagtaaactgaatcctggttagcaatggggaaggaatgagactggtrggaaaatgaaagagaatttccctttcccctccataagcccttctatatttcaatctcttgcagtaagtgaatgttcaagtattgtataattttaaaacaaaaagaaattcatgcagcagtgttggagctgcgaggagagagaagatatgaattaccctaggagaacaggaaagtgaaaggtctaccgaagcacggtgtgactgcatttagggacacttgaggcccattgttaagaatctgaaatgagattggtcagttttgggctttttctaaccacattcagctgcacatgtgtaggttcaatgttgttagagagttggcagtaaccaactctctccctctcaagggcagaggggttccaagtgcataggacaagctaagagaggaaaagggaagctgaagaataatatatgtaagggagtcataaatgtgaaagatcatggaattgaagctgggtaagaaaaaaaaaggctgggtaaaggagaagaaaatatatcaaggtgggtaggtgaaaaggtggtaggatcaatggattgaagcttctcatacatttgaagagttactggatttggtgtagtagagggagtaactggaaagactggaggtggtgaatgcatagatgagataaaaatcccaaggacaattgaggacagaatatgaaacggaaattacagaagtgtcagtcgtagaaactagccatgaatgtctaagatatggtataagataagactgctggaataaaaatatccaaggagccaagaggccagagagtgggaagsgtcacatatgtgtatactgcaatcactccaaaagaagagtagggttggagagaatgaaagcgagtaaagggctaaagatcaataagaagtgacaaggatgaataggggtagatgacaaaacaagagcagatggcacatatgttttaggatttggaggtggatggaagayggagacagaacagggagtgagtattcttacaggcattaaaataaatgtgataaggagtggcttggrgtataaggggtgacctacaaacataaaaagaactcaaacctctttacaattagaaacaacttttctttggtgtgtttacattattacatctctaagtgcatcagtaatctatgaattgttagtaacttttaaggtaktatctgcacataataaaaactacaaaaatagtataactgagtattttatattcccatccctaacttccattgcaaacaatgccttatcagattcttgtggacctttctgaagaaattctatgcatatacaagcatatgcatgtacacatccctcctgccttttccaaaacatatgaacgggtaaactactatacccactttacttacttattgtttcaattactattttgagtattgattttttttttctatcagcatcagtaaacttattctctttttttaaacaactgcatagcattctattgtgtggatacaaaaaaatttctttatccagtcccatttagatggatattagggttgtttccattctttctactataaacaatgctatagtgcctatccttgtacttaaacattgtataggtaaattccttggataaattcctttttgggtaattgctagatcaaagatcccactgagagactgggtctgcttcacattgagtgtgagagtccagaattatatacttgctatagagaagagaagtccttcttaaagacttttgatgagtaagtttatcccagggcctctccaatcaatgtgaatcagtctcctcagagctgacctcaatctttttcatggttagggggatgtgacaaaagtaaaaccattttttattctgtgttttattccaagaggtcctaaacaacaaagtatagtgtaatggtttaagaaaaaagactctgggatcagatagacttagatatgaagcccaagtccaccactcattatcccagacactatcaaaaaataatctctctgggccgggcatggtggctcacatctgcaatctcagcactttgggaagccgaggcaggtggatcacatgaggtcaggagttcgagaccagcctggccaacatggtgaaaccccatctctactaaaaatacaaaaattaaccaggctcagtggyacatgcctgtaatccctactactggggaggctgaagcagaagaatcgcttgaacccgggtggcggaagttgtagtgggccgagatcatgccactgcactccagtctgggtgacagagcgagactccatctcggaaaaaaacaaaacaaaacaaaaacctctctgaatatcagatatttttcttcactaaaagggggataataaatattctcacaaggtgattatgatggtggcacagcacatgataagcattcaatgacagccattacagcagtgttactaatattattattactgctattggtattgttattatcattactgtttttacctaaggtaccgaagaaatcattgcctaggaaaggaaatccaggtctatttgccagaacaatcatcctaaaatcaggatgaatcactacaacattttctcttccattcacattagcagaatctgaaaaacaaaatttgtttattctttatcaatatttaataattcttaaaaatatcaagcaacaatcttttagataacataaatagttatactgttcaattgtaaaaagctctaagatatttggctgtgataacttggttgcagaaacaaaaactttcttgaaaaaatttgctcaagaaccaaacactgataaarcatatactaaattgtacagggacttgcactcttatataccttcagagtacatctaaaaaaaagcaaccttgtccaaatgtagacttacagtacttaagcctggcttgagatgtttttagtccttaaaaaaattaaaaatagaaatccataataagggagaatccaaggaatagctaaaggataagttctttagtttttatcaaatcagtaacctcatccttctgcatagagcctgccattatgcagctaaggagttattcctgtttagatcacgcaccctgaaaactaaatacatattaatagaataaaggtcttaaaaacctagtcaactcattagtacaatgttgatttatttccagtcatgggattgtaccatagttcttaaaataagtgatcttaagttgactggggcttctttgtgtaaatgtgaaaggtatttctactggctagtgtacatttcagatagaattgcaagtccagaaaataatttaagatagtacaagttttattatggttatttcaggaagaaccacttgctatctgaatttatttaaaccccacccttaagttgcccatctttaaaaaatgatagttgtgaagtacctacagctttatttgagatgagtttggaagagcctastctcayttttttawgataccaaaaagtaatctttcagcatgtacatattcatgtacaccaatacaaccaatagttttaactgtgatccccattaatcttagtagtggaaaataacaagggtatgtggctacaggcaaaatttaatcaattaatcaaaacaaaaatgacaataaaaaatgaaaaatttaaaaagtaaagaaaatgaaaaatataaccctacaagtgatggttcatgaaactacattcaaaagagctgcaagtgctcttgttcaaaatgtcagctacaatcatatttgagtgtaaaattataatgactattcctcaaaaacatatcagagaatgtagagggttgccaggagataattatttcttaactacaactgtgtttcagcaattctttcttcttttccatttcactgtcctcataatgcctcataagggcaggcagaattctgagggtctgaatgatctttttttttttttaagagaaagtattcagggtaactcaaattctaatttttcacataaattcattgtgaaactgaaatattagaatgcttttattagtgctaagctcatactcagaaatggcaatcttgcaatgatgctgttgcagaacatctctgtggtgatgcacttgtacctttttaatggggttytccttacatactctctttgaatattgaagattttagttattagtctcaacttgtttggttactctggttggctatatattttcaatggctagttatagattttcaagtcctttcaggacacaaacattttaaatgtgaaattagaaaatgttcttacattgcatcaaacttaattgttccttgtagtttaaatacactgacaagattaatctatcttcatttttttcctaacaataacaacaaaaagggtgtgtgtgggaggggggcaggagacaataaaaaacagaggataacttcttcctaaggtaggagtgtgtgtgtaatatacatgtctttatatatacacacgtattcaccacatatatgtgtacatataaaataaaaagtccagctttttttattataatgagcaaattgaaaaaaaaatcatacacaaataattgggagatgagtacaagggttatacgttggtatgtcagagtagaaaaatacaaagttgatttgtcctaatactactactaaaaatttcaaagatgcttggtgggtaaaagtaaaactgacaaagctagattcagatgtattaatttttataaatgattgtcaatacaggcaacttaagtcatattgaacttatgcttattattgtaaataagtaggcagctaagtttgtgatttgatacagagatataaacattgtatttattaaaggaaacattgctttctaaaatactcacttgcaacaatgcgtcttccatctgctagaatcatttctccattttctactagagtttttaaaatacacgtgacatttgttggagctttgtcagcctcatctactaccagaatatgacccaactttactgctttaacctttgacgacagaaaatttatcataaacaattaaatgaagacagccattattaaaacttcattacttactgctttggacttataacagctggctttatttaagttacaagtatacacgtagacacacacacacacacacacacacacacacacacacacacacacatctatagcagagctggaaacaaaattttgggatttctaccaaaagcttcatgtagctaaactgccaactctacagttatctttttatttcattttagtattaaaattattcccatggtagtgatacccaacaacatctcacacccaagagtaggagagatgtaaaacaagcataacaaatagagaaagtgccatgggagttatgaggagtgagacatcacaatcactgtggatattagaacactgaatttgttaaagctcttaaaagagtatacaattttaatagacccaaatggatagtggagaaaaggtagttactcaagacaaagagaatcaatggtcaaactcaagaaatcctggggcatatctagaaatgagtgactatgaacagtctatgctggctgaattagaagttaaatgtgagaaaagtgactggaagggtagactgggtgtctaccactaagggtttaactgtcagaccaagaaataggtactgcctcattaagtaatgggatgcaatttaatggttatgagttcacacatgacagaagtggagcttggagctacacttcaggacatttaatctggtgacaatatgcrgaatagtttggccaaaaagtggtttgggaatctgatttgagggaggtatgaaaaaaatggaaataaaaggcattagattgatttgaaggttttgtagrgacagaatctatagtcttggcaactgcttaggtgggaagaggaaaaaggaaaaataagtcttaggtttaaggtgactgggttgatggtgacatcatgaaaagaaagatgaaagctagagaaaactcttaaaaacatttttgaggggtggataaaagaagatatccaatgaatttaagtgaaaatctcaagatttttaaaaaaatagtaagaaatataatgtaaagtggaccatatcctaatttttctcataggatgktatattttaagaaaacacagattaagaaatgggcattccttctaccacaattattttaaaccatatttttaaaaaacttataagaaatttcttttttaagatatacctaatgctaaatgatgagttaatgggtacagcacaccagcatggcacatgtatacatatgtaaactaacctgcacattgtgcacatataccctaaaacttaaagtataataataataaaaacataaaaaaataaaaaataaaaaaataaaataaaataaataaattttaggattaaaaaaactgaatttaaaaaaagaaaacatgtagcttctatcctcaaccctgtctttgttcagggaaagacaggcccaacctgggagaactcaagcaggagatcctaaagactccactccctggggtctggaccacagaggttcacatgatgacttatttgtgccattactgcaaaggtgtcatgtgcgcagagggacatgcctggcaggctgagatttctttaggtcttgtgtaggaagttgaggactggatcttcccagctgtctaaaacacttggctaatattttattaattagaaccatttaaaaaaacttttctagaaaccttacctattttcaaactctatacatttgaaaatgatagtaaactttaaaaaaaaatctggaatagaaatcaatagaggattgctgtcattctctaaatctctcactctgaagagagaagaacaaaataggaaaacatgttatcctcccaataatttgcatatatcctctcctaaaatgaacatgaatgaatgctttccagttaggctgaaacgtattagaatctgatacggtttggctgtgtccccacccaaatctcatcttgaattgtagctcccataattcaaaagagggacccagtgggagggacccggtgggagataactgaatcatgggggcagtttcccccatactgttcttgtggtaatgaataagtctcacaagatctgatggttttacgaggggaaaccccattgcttggttctcattctctcttgcctgctgccatgtgagacatgcctctcaccttccaccgtgatggtgaggcctccagagccacgtagaactgtgagtccattaaacctttttctttataaattaccccrtctcaggtatgtctttataagcagcatgaaaacagactaatacgtaatccatgagagwtccatcctccaaaaactgaaatacaactatgatacaaaaatacacttgaaaatatttctatgattaggttactaaccaaaggtgagtcttcatatacaataagtccgtctttaaccgaaggctgaagcgtaagagtttgtactgtggtatccctaaagtaaaaccaacacattttatagttaggaaggaaataagctgatgattgatcatgataaaaatacagcacaggtgcattttttaaaagatttttgttcatcatcctgcttcccctycccccaccaaaaaaaaacagcaagtgaaatttatttgagtaacaatactttgtagacttaatacagtataaattacaaagaatttgagaattaatccagacttatagattatccagattctttacttctgtttttctttctggtaatatgtcttgtaaccacttcacacctcaaaattaccacctgagggtgaagacgagaaactaaaaaatatatatatatatatgtattatataatatttatgttgtttaaatataattttgatggcaagtttggtaatgattggcatgctgacatggacaattaaagcaaatctagtaattacacattcaggcccaaactgccatcactaggtgccaaagccagactatcacaccgcttgccaagaatactcaagaattactttatgggattttgaacatttctgctggcattaaggcaatccattatatttcttaaatctactttttactatttacttgaccctcctttagatcaggatcttcaaaaatattaacagttggctatcctgatgttaagaacctccttacatgatgagatgtaacattcacatcaagtgtggatattcttgccaaaatgtgtgtaagaaagttgcaggtgatatgtagggtcagatatttttaaggggatcaattttgtatctttgccttctatctaagattatttcccatagagaattagaactactttaaaaatataagtagcgtctttgaagagttcagctattttttcaaactaccctacttcttaytcaaagtaaagcacaaagttgcaattgtgttgttttgactatctactatgtataagacactactggacrgtgatattcagacctggacgttatacttgtgaaatgtacaccaaatgccaaactttactacaatctattaaaattgtaaaatgtgtatctgttttttaaaaaggaataaatagcacttgacaataaaatacaagataaacttaacgtcatcaaataactgttttgcttttagtagaagaaatataataaaaatcagctaattgctttgagaggcagctgtggagtagtgcaaagaagaccttggagtcatatcaatcaggattcaaattcttgtttttgccccttattggccatgtgattgtgggtaagtaataaaacccacccaaaaggattgctgatagaacacttggaaagtgtataacgccgtatctggcagatagcaggggtgtaattacataccagctttagatatttgttgtcactattgttgttgytgtgactgaaagttccttgcctgcctacctttcacttgatcttcagttttttagcagagatggtgcttcttgaaagatcccttccctgaccttttgtagagcagcttaggtgcccctgctatgtgttccccttgtgacccatatatcccccaattcggcccttaacacactatactgcaagtacttattttactatcttcccacacagactgtaagatctaagagtacagaacatgtccacactgtccctcattctgtcccccacctagaacatgtctggctcactggaggaattctataaatatttgttgaatgaatgaaataaacaaaatatatgaaaaagtaaaagtcaacgatgtagtttatagtgcaggataaaacacatggactttcaaatttatcagatcattggattttgtttttaaacagagaatctggaacctactctagtaaatgttgggtcagagtaagtctaattctcttacgggtaagaaatggtacattatggccgggtgcagtggctgaagcctgtaatcccggcactttgtgaggctgaggcaggcagatcacgaggtcagaagttcgagaccagcttgaccaacgtggtgaaactccagctctactaaaaatacaaaaattagccaggagtggtggcacgtgcctgtaatcccagctactcaggaggctgagacaggagaatcacttgaacctgggaggcgggggttgcagtgagctgagatagcaccacggcagtccagcctgggtgacagagcgagactccgtctaaaaaaaaacaaatggtgcattctaaggaatgcatctgtaggtctgtattagaaagtacagtcatgttgagaaggtatgcatggggttgactagtcaagggactgaggagttgatggtttatgtccaagatggagttgaattggaacttatggttgcagtacgtaccttccccatcagagtcctcatttacggagcttgaacaggtacgctggcaatacaattattgacatttacaatttgtagactatttgccttatttgcctccaacttggaaagcttctccttctaacttgarcaaacagtttcttcagttaattctctgggattctgacctattgctgttcctgattcctaaccaactcccatcaccataatcctggctctcctgggccgggcacctgcccccatamtctactgcttcttatggccctagcactacactttacaaagaatctaattttgtttatcttctctaaaaaacaaattaaattgtgtctaaagataaagccctgtgggatgatagggaaagtgaaaaatacattgtggcaagttattggtgattataaacttttagtatgaataaaacgatccctatataacacatggattgtcatatatctattttctgtatttacgggttttataaacttactgcagggcatatgttatttttttgctaacaaattaattgttaaagttttaaacaaatcaagaacaaagtttaattaaacttacttatattaattgttaatattctagcaatagagaagggggtggatgaggaagggaaatagatgtgttcacacagattgttatagtaatataatgaatttctcatctcagctttcacatatttaatgggcaataacatgtcatcttccagcaccaaaaagaaaaaggaactcttccatcattattagtagaaaggaaattcagttgttaccttaataattattgtgcttcatagcagattaagaaaagtaaattaaacctgaattctaattttaaaaagaaaatgaagttgctctgtaacactcgaattctgatagcatacaacttgtcaaattagatttctcaaaagacttctgtgccagaaataaaaatcacaggtttgagaaaacaagcacaaatcagatgatttccaaaggagactaaaatgagaataaatgcaaatgggaaacgtggcttttagtgragtagtatgtgagaaagagaaattcataggataaatgtggttttgttctgctcttataattagycccttcatctagtacataaaaaaagcaaaggctagtaaaatatgtaaaataatatttaacttaagaaattagtaggtttatgtttcagtaagttaccctcattatgtaagtgggaaataatccactattgtctgcataagacttaatacaataagaaaaaacgcttgatttccaagatatactataaaattacaaactttaaattattaagtaataaggtgactactgttgttacaggtagcataaactgactcttaaagacaatatagtatttctttttcagagggtgcttgattaaaataattgctctgcatttatgagcaacttggataagaagattaattctccacacaaataaacaatgaccctaagagaatattttatttcttgcaacttcaatcctcttgtgaattgttcctctcaaaaacacctttgaaatgtaagctaatgaaaatttagtgtcacagcaatactagggagaagaaaacttaaaacacattttagttacatgttcttagcctaaagcttaaaaaagagatgtctttccagtacaagacatttatcagtaatacttgatgaattaattagaatgttcagctaagtgttgacatttatgttatcactgttctcactttttactatcttacagactacagcatctatcaactaaagcctgtgtcaataaaggcgctgctcaaagaaatattgtactaaactctattcttaactttggcactttaaagtctttttaaaaattagagttatatttcaatagtaatttaaaattattccacatgtaataaaagcaattaaattgtgtaaagaccaagtttttatcaaaataaggaaagaaaactggcctctagagagcaagcacaatctgttctgaaatattgcttayaaaggtacattaagttagtatcttctaatttattgaggagcagaagatctcaaaatagcgatgtttactttaaggatgatattttaataagttgtatcttaactgatttatagttagattttttaagaaaaacaataatagttaaacataagagtaaaggaagaaagaagacacataagagtttcataagagctgatgaaaatcttctctgtctttatagttcattaaaacagaaatgcctataggaatggtccacgcaataatacgagccaaacatgagaaaggaaagacagaatatggaacaaagacagcactgaaaaaatgtttgctcgatattttttcttttctttttttttttttttttttgacagagtctcgctttgtcacctatgctggagcgcaatggcatgatcttggctcgctgcaacctccgcttcccaggttcaagtgattctcctgcctcagcctccagaagaggtgggattagaggcatgcaccaccacacttggctgatttttgtattcaccatctctaccaggccaggctggtcttgaactcccgacctcaggtgatccacccacctcagcctcccaaaatgctgggattaaaggcgtgagccaccatgcccagctgctcaacatttcaaacagaagtttaattatgaaaagagaattaaatggcaatttttaccagtaagacataagcctaacatcattgactgagagaagtaaatgctgtcaaaagatatttttcaagtgaagatgagttcttggtatcaagaacataactttcacaagacctattttaaaatgagtaatgaaataaagataaagaggactaaaaagaattatcactaataaaatagagtggtacttagaaaaaggtgatgtaaacaagtttaagaatcacttgatgtttacagtctgagctgtctgcagaatagtggcatcccataccctagccctatctataaaagacaaattcactttgccatattaggcaagaaacttccttagcccctcaaacaaaaacagtcactgttaaaagcagtgttgctatccgatacaacaataggagggtatagaattttgaacaggaagaacatgttttcttcttctttttgatttctattgtwcaacatgttgaatatttctagttaataatagtgttgcctatttcaaaattgctaagtaaatttcaaatgttctcatcacaagtaatgctarctatttgacatgatgggtatgttaattagcttgatttaattattttgcattgtattcgtaaggtataacatcattttggactatacattttttttccccacacaactccctcttcacagaacccataaatttatacagttataaactgtcaatgtaaaattaaaaaaaagaaaaaagaagacaaaatgagctatgactactgcagtgttgaaaagcagcaccagactaaatctgaggccttttcccagtttggtcaatctcctaacctcctgaagcccaacattactcatctctacagaaggaattaacatagaacactgaagaaatacgatagtgtaaaaagtaaggaagacaaaagagcaagaatgagagacagaaggaatattattatacagtgttttgaatattttgaacgctttgagggaaaagtccttttagtatgataagtaaaatatttctgccaaagctgctgaaaagactctatatcttaaaatagttattttgttggactgtttatttagtagtcaatcactcatcactaacatgctcagatgcaaaaaatcctaactataaaaggaaggaaaacattagggggataatattcatagaatatyatctgtgaygaaacactttgctcttcagaggtagggtcttgctgggaactgctggtagcaaaaagccacagcaaaacagtcacctgatggaaactaaacatttcaaaatgtgtttagtttacaaaatctacttacctctaccacgtctccwactactatgttaatactatttaaaaagaaattcttcaaaagtcaaagccatgctgataatcaagtcttttaactacctaaaaattttctaagttgtccactgtttataaataaaaacaaatctactaaaatagtatatagaaaattggatcttttatctgcactctgaaaactagctttccagcttggtaaattttaggcattcaacatgacctaatttctttgcagtaacatcattttcctttttcctgamwaaaaagaaagacagtgtgcaggtcccttatttgaacagaaaaacacattttctaatcatttttttgaaaaaaaatggaagaatgaaataaggataaaaatacaaagttgaatgagtatacaaagatgcacacacagatgcaaccagcatgtgtggctgatgaacactgtatccactgcataaatctttagcagtaaatatggtatatatgacctttttaaaaagactttatcaattgagtaacaacacaaaagtgtgataaagagacaaaattagtgagtgaccactttttcatgttaggactttctatggtcttttattcaacaaatatttattgaataccaatggtactgctttagagattggaggagtatctgtgaacaaaacaggtaaaaattccttttcttgaagacttcaaattcatactatacttaagggaacttatcttaccatactaataatgtaccatctttagtacagtactcaattttgcatgagattaaatatcaaaagacattttgtcacaggcaattcaaagaaataaagttaaaatgaatatttttcatcatcaagagaaataacaaactagtctggtgcagtttaaacctaccaggggagtcacgctctctaggaagttggttaggtatgtctcttttggttaataacccaaaatacatcttcacataatacatgttatctaaaacttactatataagttgcattttgtatatagcataatattatttgatatactctaatccatgaattattttattctcattttggttgttcatcaaacagaaaaaattcccaatgctctagctttatgtttatcagactttaaccacccaggtcaaacaaaaaatagtatacaaataagcactatgtttggaaaactcttaccttaaagaaaatcagtgtttaagttttctaccatttacctattttattgagtctttatgatagatattcgtaaaggaagacacaattgcatcataggaaaaacaatatattctgcatttttagcaacaggagttaaacaattcatttcaaccccagcctatcttccagtatcattgtttttttgtttttttttttgttttttttgtttttttttttttttttttttttgagacagagtcttgctctgtcgcccaggctggagtgcagtggcacaatctcagctcactgcaagctccgcctcccaggttcatgtcattctcctgcctcagcctcccgagtwgctgggactacaggcacctgccaccatgcccggctaattttttgtgttttttagtagagacggggtttcactgtgttagccaggatggtgtcaatctcctgacctcgtgatctgcccacctcggcctcccaaaatgctgggattacaggagtgagccaccacacccagtccccagtgtcattttaatggcagaggaaaaggaacagatacctctgaggaatcagaggacagaagactgaagcagctctctaaacatattttcttgtcatcttatgttttatcttaaaatttgatgtagatttttttaaaatttaaaacttcttttactctctagccctatgtcatagtgatatagattttgaaagctattccataatatacctagtttctttcaatacaaaaatatttaatccgtcattaggaaaatagcagcaaggagctgttgtcctgagccaacactttcaggaaactgggttgaactgaagacggctatcgctgcagagcaagttcagcatccgcatgcatttttctgttctagtatcaatcacattataatcttggacctcattatatcttggtataaatgcaatcggtttttttactttatgaactgtgccagagtgatcaccatccagagcctccagaatgatgccaagaaggaggtatgtgcagcattttctgactcctgctggtaggcatttcagcaatggcaccttttagagatatcacacagcttaggtcatgtgggaccaaaaagttctctcatctccygggaaatctacyacttcaggatgaacacgaggatgtggttcatttgtcccgttttctcatctgagtttaggtatcactgcaatttatttaagattacccaaaacatcttcaaaactacaccaaaacaaaatacttaatatatgggtcaaattagaaaaaaacaggcatgtttacagaggcaaaacactggaaataggctactgtccagtgctactcaaatgtcaaccttctcagcgaggctctgcctgatcaacctattaaaactgtaatctctgctctggcccccttccctgctttattttcccacataacacttatcactattttacgtacttaacactatgtaaaatacttattacgtattttaacgatctcattctccctctcaccagcaactatagataaacatgaagactggcctttttagcacttgttcactgatgttatcactcacacttagaaaagtaaccagcacgtagtaggagttctcaatgcttgctgagatggacgcatttcagatacttcaatcacatacgatgaggccatactgagctattataaattccttacacaccgggtttatttgtgtgcaccttttctcctttctgcaaagttttctcttccctttccgccactttttatgataaatggttatggcccattccttaaacactcagctcaaatgtcacctcctcttagaagcattccttatttctcactgttatcctcccagctgaactattgttctayagaaagcactttacagttaagaaacttttcagttgttcacatgagtatctccttgacaaggcatactgtctatagacaagggtataacatttttttatgtacacctagtgtctatcattatgccttcaacattgtaggcatgcaaaaaatggttagccaaagaataaacacatgaatgtattaaatactaattataaaacgaattatatttatacatttccaatgtgcaaagcagattattaggcatgaaggtttataaaatgaatagttcacagaccctaatcctgggaagctcacatgacacacagggagatagatataaggcaattaaattaaattcatgtcaaaagatgacaagggctgtaacagaaatcaaaacaaagtgcagtggggacacagaagagaaggcaattaatcctgatggaaaagaacagagtcctgattatggaatttgattttaactggcaggaatgagtakaaagtatgtctaggcagaggaataagcacatagaagttgggggatgcaagagaagtttaaggctacacttagttatccagcatgtctaggatatagtcacatggaaggatgtagagctagataggcaggctaagtccagagtgtacagtcctcgttgccattttggagtctgactttcatttcatggaaaatatgaaaccatcggagaaccaatcatctatccatttcagagacaggattggagaagattctctaaatggatgttccaaagatggatggaagggaagagacatcacattcattcatttgtttaacaaatgtttatcaaacatccaccatactccaggcatcatgctggaagtaggaagttcaaagatatatccctgccctgaagatctctctgtttagcaaaggagacagagatgggaatatgtaattgtgataaaaaatgacaggtacaataccagagcctgttctaggtcagtggctctaaacttaaccatcaacaaaagtttttaagaagacacattctaaaacatacaaaaatagaaacaaaaaacaatgagctaaaggtgaaaaacagtaccttaaaaacactcttggattttattggttaataatgcaaaaccctttttgttctcattaaaaattaaagaaggatattttgggaagagcaatgtaatcgatacactttattatttgtgtgatttaaaggtctcctcctaaattcagtttactttgctactttatttcaatgcctagcatctctgaaaaagaactcacaaacacatgagatccaaatggaagaagtgcaatactgactgcattccctgtagttcaacatgcatttttcaatctcatttatcaaacatagaaaggctcttttgcaccccactttatgcttatggtggcacaaagaaaggaatcaacatctgcttgtggagaagaagaggaaaggatctaagatattttcttagaggaaaacactttgattttcattttgaagataaagtatgagttttccaggtagacttgacagggaattccaggcagcaagagctgcacagaacaagttggggagtaatagatatggtatgtgatacctgggaaccacaggcagctcatatggcttaagcatacgtgggagagaaaggttggtggaagacaagtgaaacagatagtggcaacgggagtcattgcagggttctgagcagaagagcaagtaatcaactttattagyagaaacatgtaaggcatggaaaggagagatcagaggctgagttcttaaccaggaggctactgcaatagttcaggcaagaaaagatgagcaatggactggttctcactgctacaagcatgctgtcacgaatgattctattcccctagtgagagascttaacttggcttggtcccattagctgttggctgtagtcctattccaaactgtcacttgaccaaattcttacaaccctctaattgctgtaatgtgaaaggttggctattacttcgcttacagatcaaatctgcattgggtcaattcatccaccaactctccagaatagacaaagttgctgaaatgccagaatgtctcaccacaaataaactacaattatgaaattaataattgctgccaaacatatcagcgtttgagttctcctcaagtagtctcccatttattccttatcacattaccctttaaaaatatttatatcattttcactttattaatagcatcaatattttcctgtttattaaattatttgttcattgcctatcttctcaccactagaaagaaagcttcatgatagcagtgaccttgtctgtcattctgttcattgttgtattctcaagaacagtactatggacataagaggaactcaataaaagtttgttgcaatagatctcctttaccaccaaatgcaactataccccagctactgcagcagtgacttctgaaagctcaaagttaaacctttctctagagaattttcttccactaatgggagttacctcacccagaaatgcttgggaggtcacaggtgcctgcttccctttctccctcagggcagcccttaatcaatgacttagagatatgagggtgaaaaaggctggcactcttgcttccaggtggggtaactgagtagtaacattcacgctccagaactccctgtgaagaggctgaggccagccttcagctaaaccacctcttttcactggccttatcctgagtccttcacttccttacagatttcacctaaaagctgtccctctaaatcatttccacaaacatttccatctctggttctgctgctagggaacccaacctaagatatctgttgactgttcgaatgaatgaagataaatgtataaataattcttagatcttctagcaatacttttaattcttcctgcataaaacattatagatacacctcagttaacggaaattagctaaggaagttgtgaactgaacaacccataaataaataaatctacttactactaatttaagcccctcatcccatccctttctgctcatttgtcactgttgccatcatctgaagattctggctaaagcaataaggaatggcattttataaaactaaaacaaaacaaaacaaaacaaaacaaaacaccattttaaatctaattgaataagragaaagttgggaggtatcttcgtcactctgtctgcttacctaacaactctgtaagaaacctgcagctggtgctgactagaaaggtccaaagagaggagagcaggtttaagtggttaggacatgatgttaaacatgttaagataatatatgattgaaacagttctaatactgacttgtttaatttatttatttttatttatttatttatttattttttgagatggagtcttgctctgtcacccaggctggagtgcagtggcgcaatctcggcatactgcaagctccacctcctgggttcacgccattctcctgcctcagcctcccgagtagctgggagtacaggtacccaccaccacgaccggctaatttctttggtatttttttagtagagacgggtttcaccatgttagccaggatggtctcatctcctgacctcattatccacccgccttggcttcccaaagtactgggattacaggcatgagccactgcacctggcctatttttttttttaattatactttaagttctagggtacatgtgcacaaygtgcaggtttgttacatatgtacacatgtgccatgttggtgtgctgcacccattaacttgtcatttacattaggtatttctcctaatgctatccctcccgcatccccccaccccatgacaggccccagtgtgtgatgttcccggctctgtgtccaagcgttttcattgttcaattcccacctatgagtgagaacatgtggtgtttggttttctgtccttgtgatacattgctcacgtacagaatgggagaaaatttttgcaatttacccatctgacaaagggctaatatccagaatctacaaagaacttaaacaaatttacaagaaaaaatcaaacaaccctatcaaaaagtgggcaaaggatatgaacagacacttctcaaaagacgacatttatgcggccaacagacacatgaaaaaatgcttatcatcactgrtcatcagagaaatgcaaagcaaaaccacaatgagatgccatctctcaccagttagaatgacgatcactaaaaagtcagtaaacaacaggtgctggagagcatgtggagaaataggaacacttttacactgttggtgggagtgtaaactagttcaaccattgtggaagactgtgtgtcaatccctcaaggatctagaactagaaataccatttgacccagagttgtttttatttgtattacaaataaggactaaatttttaaaaaatccctcttccatcagaatatcactgatytcatcatagaaataatgattttcttaataaaattttgctttacaagtgaaaaaaaaaggattaaaaagttataacctaaatttataatagtgatcgacttgaggaagaggagaccagattggaagtggtggttaaaggagacctcagctataattatagtgttttatttctgcaaaaggaagagtagaatcaaatttggaaaaatatgaacagttgttaaatctgggtgataaatttggatatgtgttatatatttgtatttacattttttggatttttaacgtttttctcaaactaaaaaagtaaataacacttgaaaggaatgtagctgttctctagtggcaagggacataacaaaactaagtagaaaatacacactgcatctcagtggttctcaagctccttaagcttgtgatctagaaaataaagatgaagaaacccatagactcttgtctccagtattcttttccaaaacagccctgaccacaccacttgctggcatctccagtttcaggagtctgtagctctgactcatcaaatycataacccacaaattagatgacaggataatgtaaccacttggtgggtacactgaaagaaaggatattactgaggtacccagctggggaggaacatcatctaaaggaccacaggaattaatttggtaaacgtttttatgaactgtccaggtgacggaacagaaaacaaggctattaaatttactgatgacactcctcaaaggaggtgtgattgagcatcaaagtaagtgtaatawtccagcgaagtgaaatttaataaggatatcactattgacaaaaatggaattaatatggaataactggctgaaaaatgtggaaaaatactttgggatcaagctgagcaaggattaggaatatgatgctagaattttaaaaatcaagtattatagtatatataggctgaagtgtagattgtaacaattggtttgacccatagtcctatcatatggataatactttagtgacatacttactgcagtactaccctcactaaaataccatggattcagcacaataaactcaagcagcagttttggttactgtagccttgtaatatagtttgaagtcaggtagcatgatgcctccagctttgttcttttggcttaggattgacttggcaatgcgggctcttttttggttccatatgaactttaaagcagttttttccagttctgtgaagaaagtcattggtagcttgatggggatgacattggatctataaattaccttgggcagtatggccattttcacaatattgattcttcctatccatgagcatggaatgttcttccatttgtttgtatcctcttttatttcattgagcagtggtttgtcgttctccttgaagaggtccttcacatcccttgtaagttggattcctaggtattttattctctttgaagcaactgtgaatgggagttctctcatgatttggctctgtgtttatctgttattggtgcataagaatgcttgtgatttttgcacattgattttgtatcctgagactttgctgaagttgyccatcagcttaaggagattttgggctgagacaatggggttttctagatatacaatcatgtcacctgcaaacagggacaatttgacttcttcttttcctaatcgaataccctttatttccttctcctgcctgattgccctggccagaacttccaacactatgttgaataggagtggtgagagagggcatccctgtcttgtgccagttttcaaagggaatgcttccagttttcacccattcagtatgatattggctgcgggtttgtcataaatagctctcattattttgagatacgtcccatcaatacctaatttattgagagtttttagcatgaagggttgttgaattttgtcaaaggccttttctgcatctattgagataatcatgtgatttttgtttttggttctgtttatatgctggattacgtttattgatttgtgtatgttgaaccagccttgcattccaggggtgaagcccacttgatcatggtggataagctttttgatgtgctgctggattcggtttgccagtattttattgaggatttttgcatcaatgttcatcagggatattggtctaaaattctctgtttttgttgtgtctctgccaggctttggtatcaggatgatgctggcctcataaaatgaattagggaggattccctctttttctattgattggaatcatttcagaaggaatggtaccagctcctccttgtacctctggtagaatttggctgtgaatccatctggtcctgaactttttttggttggtaagctattaattattgcctcaatttcagatcctgttattggtctattcagagattcaactttttcctggcttagtcttgggagggtgtatgtgtcgaggaatttatccatttcttctagattttctagtttatttgcgtagaggtgtttatagtattctctgatggtagtttgtatttctgtgggattggtggcgatatcccctttatcattttttattgcgtctatttgattcttctctcttttcttctttattagtcttgctagcggtctatcaattttgttgatcttttcaaaaaactagctcctagatccactgattttttgaagggtttttttgtgtctctatctccttcagttctgctctgatcttagttatttcttgccttctgatggtactggtaccaaaacagagatatagaccaatggaacagaacagagccctcagaaataatgccacacatctacaactatctgatctttgacaaacctgacagaaacaagaaatggggaaaggattccctatttaataaatsgtgctgggaaaactggctagccatatgtagaaagctgaaactggatcccttccttacaccatatacaaaaattaattcaagatggattaaagacttaaatgttagacctaaaaccataaaaaccctagaagaaaatctaggcagtatcattcaggacataggcatggggaaggacttcatgtctaaacaccaaaagcaactgcaacaaaagccagaattgataaatgggatctaattaaactaaagagcttctgcacagcaaaagaaactaccatcagagtgaacaggcaacctacagaatagaagaaaatttttgcaatctactcatctgacaaagggctaatatccagaatctacaaagaactcaaatttacaagaaaaaaacaaacaaccccatcaaaaaatgggcaaaggatatgaacagacacttctcaaaagaagacatttatgcagccaaaagacacatgaaaaagtgctcatcatcactggccatcagagaaatgcaaagcaaaaaccacaatgagataccatctcacagcagttagaatggtgatcattaaaaagtcaggaaacaataggtgctggagaggatgtggagaaataggaacactttacactgttggtgggactgtaaactagttcaaccattgtggaagtcggtgtggcaattcctcagggatctagaactagaaataccttttgacccagccatcccattactgggtatatacccaaagtagtataaatcatgctgttataaagacacatgcacacgtatgtttactgcggcaccactcacaatagcaaagacttggaaccaacccaaatgtccaacaatgatagactagattaagaaaatgtggcacatatacaccatggaatactatgcagccataaaaaatgatgagttcatgtccttcgtagggacatggatgaagctcgaaaccatcattctcagcaaactatcgcaaggacaaaaaaccaaacaccccatgttctcactcataggtgggaaatgaacaatgtggtgggaattgagtaatgagaacacttggacacaggaaggggaacatcacactccggggcctgttgtggggtcgggggagggaggagggatagcattaggagatatacctaatgtaaatgatgagttagtgggtgcagcacaccaacatggcacatgtatacatatgtaacaaacctgcgcgttgtgcacatgtaccctaaaacttaaagtatattaaaaaaaaagaaatatattttataaggccatggttgccatagatactgattcctcttacggatctgggcaaagtctattgaaaatcttctggaaaaggttcaccattccagatcccattaagaacatttggcttggcatggtggctcacacctataatcccagcactttgggaggctgaggcgggcagatcacaaggtcaagagatcgagaccatcctggccaacatggtgaaaccctgtctctactaaaaatacaaaaattagctgggcacagtggtgcgtgcctgtagttccagctactcgggaggctgaggcagaagaattgcttgaacccgggaggtggaagatgcagtgagccgagatcatgccactggactccatcctggtgacagagcgagactccatctaaaacaacaacaacaacaacaacaacaaaacaaaaacaaaaaaaaaaggaaaaaaagaaaggaaggaaggaaggaaggaaaacatttgattcacaggaggccaaattatcaacattaacagacggttaagagaaattgaaatcaactctcacaaaatattttcaaatgttcaagactttagtataagagctcactgcagatatgctggaaatagcaagagaactagaattagaaaccaagcctgaagatgcaggtgaattgctgcaaccttgtgctaagacttcatcagatgaggaactgcttattgctaagacttcatcagatgaggaattgcttattgtgaataaacaaagaaagtggtttcttgagatggaatccactctaggtgaaaatcttatgaacactgttgaaatgacaacaaagtatgtagaatgttacataaacatatttgatwaaaaaaaaaaaaaactcaagcacagtacagtacagtggttagaacacagggctgaagccagaatgtatgaagctagctgtgtgaccttggccaaattgtttaacctctctgtgtctcagcagcctcaattgcaagacagagacagtaatggtattgatctcatagagctgtrgtgagcagtaagaagttacagtttgaaaacagcttagaacagtgcctggcacacagtagctgctatgcaaatgttaaataaaaaaaaaatacaaaaatttaaatcaatttggagatcatctagaggagtcaaaaattattacaaacctaaagatctacatggaaaagtagaggaactgccataattcattttttaaaaaattaaaaagggggggcagtagaaggcattattaatatggaaactactgcccaattgctaataaaaatgtttccaaaacagccttttcaaatttataatggggaagatgagaaagagggagcagcctggctgttctgtgcagcggctgacattggacagggctccagttctctagtgctcttatcagtgctaagaatgctgtgatgactcaataataattttttccaggagacttcagaaaagcttttacgttttctattttctgccagtatttctatgtgctctctgggactctgtgaatttcaaaatttatactgtcacattcagttttcttcagcttgaggagagcctcatatattgaattatgttgtgctttgtaaagcatgtcatcattcactccaggatatttgattttaagagggcagaatttgctaaacggtttacttcatttggtttcataaagaaactatgacagaggraaagtaagtgttttaacaataaccatccaaaatgcaatattttaatgacctcagttggttagaacacttacataacagttaaagatctattatatacatagaattaaccttaattctaaaacaagcgtcagtgctcctcggtaagcatgactgaccacaggggagcttgacctggaagtttcagatgaaattagcacatatcaagtcatttaaacaaatacttactggacatccactgtgaattaagaaccacaccaagtacctgcctcatgattggtagatcacacacaggagttactgttaacttctcttttccccccaccctccacatagttataaaggctaaaattagccctgtaaacctatttcaatatgttccttctttccactctcattgtcaatatgtttgctcagcaccaacagtatgatctggatcacctcctagtgttttctgtgattcaagtcctgcctgttttcaataaccataatgctgctttctctgtgctccacttagaaaactcctacttaccccttaagactcagtttgagtgctaccttctccacatcaccttctaccatatcacagacatgtattctgagagttcagtgtccctcctcaaggctcccacgacacctgcacatgctctatcatagcttatatacaataactgtaccataaatgttgatgcattttcaccactgacaagcaagctgtactaggtcaagatggatatcatcatctatacgtcatccagtgcctaaaacagacactgccaaacaaaatgaatagatattaggcgaatgaattaacatacagtgaataaaccaggttcttgccctcaaaaagttccctatttagttggagaggcatgactgggcaaagaggaggggatggaaataagacatagaaactactacagtgcaaaccaatgtttgataagaaagtagggtatacggcaagaagctaacacttattatgttgcctaaatgtttaggtatctaaaggtgccagacactgtggttggcccattgcacacattctctcatttattcctcacaacaaccctgcaagctattattatttcaatttgataggcagggaaattaagactcaaggagttcagggctcagaaaggttagtgaagactggatttgatctctaaaacccacgccctttctatcacaatggtacaaattcaattctgtggagtgtcagaggagggaacagttacacccagaatgaagaaaaatcacaaaaggttttatgtagaagtaacagtggaccaaaccttgaagggttgggggagaaaggagctacattttagatggaggaataaagaaggcatgcatacaaattcaaaacttgtgagtaggacactgaatagtctggagtaaattgagaatatctgcagaaaatctcactgaaagagaaagttggggctaccctgggagacctgggaactcccaatctaaacaccactattagaaaaataaccaagagcataggtcatgttaatgattggacctgtgctgtcctcttcaattatgaaggatagcaaatgaaaaaaaactctggcagtataagtatttcagagccctaaaataagtctgactttaatcttgtctaaaattttaattttagacatgtatttttaaccaaggaggaaatacagctacagaagttaacatattcaagtgtcctcttaatgtcaaattaacataacatcatagaaaaacaagtaaatagattcacttcacaaatgggagccatatattctcttctgttttaaatgtatactttcaaaagtaattactttcattaatcttttaaattacatatatcattctctccagacatcttgattttaactaaatccatgaattgcccagcttgctggcattatgaaatctgatcatcaaaacataacatggccatatttaaaagtacactggttgtgttttgtgtatgtttgctgacagttttacttatcaatactatgttttgaatggcccttataactaatttgttcaaatgacattcataaactaagtgtgactgattatttagatggtaacatcacaaatccattgaaaggaatctaaaataaacaaagtaaagatcttaagtggattatccatagattagagaagtcttaaacattctttatagactgccttttttaggtcttttagacatatgtttctcttaaggcaattttatgagctaaaatgttatagcaaatgtagccctaaagctgtatgtaaaatgttatggcaaatgtagccctaaaactgtatataataaataaaaaattccccacactgaaattagtaggagtgtcagtctagtcagtaaaaaatcttcagtgtatgtatttttttttattttgaatttttgtaggtaccgatactgtttggctgtgaacccatccaaatctcatcttgaactcccacatgttgcgggagggacccagtgggagctaattgaatcatggtggcaggtctttcctgtgctgttctcgtgatagtaagtctcaagagatctgatggttttaaaaaggggagtttccctgcacaagctctcttctcttgtctgccaccatgtgagacatgctgtttgccttctgccatgattgtgaggcctctccagccacatggaactgtaagtccaataaacctgtaaattgcccagtcttgggtatgtctttatcagcagcatgaaaacagactaatacaggtacattagtaggtgtgtatatttatggtgtacaygagatattttgatacaagcatgcaatgcataataatcacatcagggtagatggggtatccattacctcaagcatttatcctttgtgttacaaactatccaattatactcttctagttatttttaaatgtacaattaaattatttttggctataatcaccctgttgtgtgggcaaatactacatcatatgtattctatataactatatttttgtactcattaaccatacttacttccgcaacaccccactattcttcctagcctctggtgaccacgcttctgctctcttatctccaygagttcaattgttttaatttttagctcttacaaataagtgaaaacatgtcaagtttgtctttctgtgcctggcttatgtcgcttaacataatgacctccagttgcacccatgtttttgcaaatgacaggatctcattcttttttttatggccgaatagtactctattgtgyatatatatcacattttctttttccattcatctgttgatggacccttaggttgcttcttccaaatcttggctattgtaaataatgctgcaataaacataagagtgcagatgtcccttcaatataccgattttctttcttgtgggtatatacccagcagtgggattgctggatcctatggtagctcaattttcagttttttgaggaacctccaaactgttctccatagtggttgtactaatttacattcccactaacagcatacaagggttcccttttctccacatcttcatcagcatttgctattgactgacttttggatacaagccattttaactgggtaatatatatattttaaacagaaatcgagacttttcacttccaactttacatagtaaataaccaatattgttggagatacttagggcccttgttaaaatgaatagatattttatttgtaatactattatcaatcaataatatagtaatgggtactataaaatataaatatttagctttgaaatttttattatattttcagtttagtaatttttttcatagataacatatctatacttttatctagccactttcagaattactatagaatataaatcagcagcatgcaactctttacaatttatggatcatttgttattttgtaacaaatggttagtattaaagacatcctaggcagaaagtaaggcatggtatctctaatcctttaaacttttaaaagcatcatgaataccatcttctttttgcccaatgaaagatattcaaatacagagctaagaaagatattattatataaatgaccccaactgctcctcttagagatgaaagaactgagacccaaagaaagactcaaaaatatatagcttcaaatgagcatactataaagattgaaaatcaataatttaggcattcacatcaaaaagttttttaaaagaacaacacgtgaaatcgaacgaaaacaaaaggaagggtataataaagattaaaatcagaaattattgaaatagaaacaaaacatacaaaagagagtttcaacaatgccaaaagttggttctttgaccaataatattaataaacccctgacaaaactgattgagaaggcaaacagcaaataccaggcataaaaatgggaatatcattactaaggacattaaaatatcataagatgatattctaaataactttacsccaataattagagggaacagatcctaaaacaacatttatcaaagcttctcatggctaataaacataatgaatccatgactaaaaagcctgcttataaagataatggtggtaacatacacctagaaataattactaatacttgttatatttcattgtctcctttttcgctggttatgaccataatctaaaattagaattgactgaggcagttcagcctaatatatctttctaaaaatatattttgttgttcaaaataaaggaatggagaaactgccctcatgatatgaagaaactctcatgtaaaatgactttctttttcctagggtattatcttgagagctgattttaatttccaaagccatccttaaggaaaaaattggtttttggcttatttttaaatattaaatttaaattcacttgttttcactttaagttgatagtatatacttatatggcatctgtatatacatctccatggtgaagtgattctcataaaaagtgacttcctcttttctggagtataaatttcaatgacattttcaacttttgaagccatctttaagaaaaaaagttttttccttattttaaaatattaaatttaaattcatttgttttgctctaaattgatactatacacttaagcagcatctgtatatacattaaaactgtcaagtaataaaatatttttaaaggaaccctcactctacagcaggaggtaaacactatgcaatcaaaacagcacaaactctgctaagaatgaactgcaattctcacttatcatccttaaatataaaatattggtcttgctatgtgccctgtaactcaaaagttggaattatgatatgttacaaatataaattattcaagtgagaactagcaaactagttgaaaattctgattctttcattatatttccaactttatccatgtgagaggaaaaactaattgaatagcttaaaggagaggaaaaaaaaagagagtgtttcagattcaggggaacatagaagattgaaataattacaagtaagaacagtattacagctcctgtaggattatgtttcttatttcttcctatatctcctataatacacagcctcgtagttttaatatgacaaatacttaaaaattttttgagttgaaagtcctaggtttatataatacatcgttcatacaaagaaccatgagaagatataaaaatagtgtggtaaaaatttggatgaagctggagtaaaagaaccagtattagtcttcttttcaaaaaataattacaacctttattttagatttagggggtacatgtgcaggtttgttacatggctatattgtgtgatcctgagatttagggtatgactgatcctgccatctacacagtaaacatagtaaccaattgttagttttcaatccttgctcccctccttctctctgccctttagcagtccccactatctattgttgccatctttatgtccatggatactcaatgtttagctcccacttataagagagaacatgtaagatcctatgttcttaaagcactagaaaaggctagaaattttctgaaatatgtggttgacctatataaaatttaggaaatgaaatgatgggtgatagaagaaagaaacatggaaagttgggagtgggaatgtgggggacaagtaatatgacaatgagaagagggctttctacggaacaaattcttaacatttaatgcctaacatattgagaagaattatatttagcttcgccaattcatggatctagctttgtaattacaattctctaatattggcagaaatgacggtagcagaaaatcaggattaaaaatgtattgtaaacaacaaagaataccttctatttccagataatgtagaatgaacactatatagcagagatactgaggatactgagggggatgttgaggtagatgaagataaggggaagaatttactacgacggaagctcatcatctcacaagtatgaaacagataaccttcagttccatttcaaacagccatcagcaagttagaagtatttgaagaaataatggtgtctattgaccttgttacacactattaacaatagcaaatttaaaatttgcatatattctgttaaattaatttattcctaaatatattctttatactactgtaaatagtatttttaaattttttcccattgctatagatactagcatatatatatatatatatatatatatatatatatatatatatataymcgctagtatatatattccatatatatggaatatatggaatatatatatgccagtatatatattccatatatatggaatatatggaatatatatatatggaatacaattgatttttgtacattttccttgtatcttatgaccttgtttaacttattagttctaatgctttttttatatgtttcttaaggttttttatatacacattcatgcaattgtgtcatctataacatgcatgccatttattaagttttcttgctttattgtgctagctggcacctccagcataatatgagtagttaatattcttgtcttttctcctaatcatgagaaaaatgtttagtctttcatttttaaatatgaagtttagctataggctttttatagatgcctcttgattgaggaagtttcctgatatttgtaatttatgtgatattttatcaggaatggatattgaattttctcaaatgatttttctggtggcaattagaggatcatatggttttttatttattctgtaaatgtgttatataatttgatttttaaatgttaagctagccttgcattcctgagataaaacctccttggttatgacatattattctttttatatattgttgaatttgatttgttaacatttgttaaaaatttttgcatctatgttcataggaaattctgaattgtaattttatttttttgcattacacaggtctgctgataaaaaaactcagtttttgtctgaaaatgtcattattttgccttctgaagaatatttttgccaaatatactaatctatactgatattttttttctttcagcacttcaattgaattgtggttcatatttatttctcaggagaagtcagcagtcacttttatcattgttcccctataggtaatacgtcttttttcctctggtaattttaaagatttttctcttggtttttagcaatttgattatatgctatgtagtgtttttttkgtttattctgcttgaagttcattgagcttcctgaattggtgatgttatcttttttatcaaatttgagaattttcctaccattatctcttcaaaatatttttctgtcccatttttttctcctctcttttgagactacaattgtgtgtatgtgaagctgcttttttagggttgtcatttttacactaagaatttccaattattccgtcattatgttcatttttctccctttaaatgtttgaatctatttatggcaactgttttatagtccttgtctgctaattccattatcctgtcatttttagtctatttctattgaccaattttcctgctttttttgtatgtctagtcatttcctattgaatgcttgactcaatgaatgctatgttgctgagtgtttggattttgyggtcttcttggttgagtgttaagttttgttcaggtatgaagtcaatttactgttgaatcacctgattttttcaaggtattcctccctccctccccaaatacccattatttttatttttaaagccattttgtatgagacaaaacttccaaaataatattaaatagcaagcatccttctttatcagggcttagttttaaaatttgtaaagataggtatggagtaactcttactttagggatagattagtcctacttctaaacatagactttataagataaatacccttctgaataccagggktatttaatgaaggaactctggtagttgttcagctcaaagatccctagtagtttttcttttcctagtgtttgtgaattttgttcagttttatagtttttattgtggtagggctaatctggtaccactaccctgtcatgggcagaggtataaatcccaaaaggcagtttttcaccatatctcagctttcsctgagtcctttcctctttctcctttgacccactaactctgccctttattctcttataattctctctcaagaactgatcacttagtgaaaagacccagaccagaaactaactcttataactcaattcaatgctctattatactatatattttttacttcctaggattaaaacaataacaatctaagttagctttaagttgttcattacttgatatatttcttgacttatctattttgtttttggtggatctatcatttatattttattttctaaaaattagaacgggttcactcataaagctaaaaatgacccatattgagaaaaactatttgattaaaagctgaaccagcattctaaccatacaaaattatctaaaaagtaactttaaggaaggcaaggagacaaataataacatgcttctaccagatttctgggttccttatctcatacctgagattcatatagtttattatttctccttgtgagctattttagctgcttgtgagagaataggcttagatcctacatgtttttcttctaacttaagagcctttatgttgatgagatctgttcctagaatgtaatgttcatcactctctgtccacagaatatctattaattcatgtttataaagcattagccactttaaaaataaattttgcatggttttattacctttaaaggagagaagagatargagcaagaagaacagaaataaaactggtttataaaatgggcctctaagaaagtatttttaaattgtaccaggagggaaacaaatgaytaaatgagatttttaagaggttgtgggtctaatagtcttacctgtgtagctgaatatattctcggggtctgttgagcaggtgaaggaatctgtcaacaatcttgttttttcctacaccctgtaattacacagaaaacattaaacaaaaagaggctattttctggagataagcttatgccaaatcagaagaatcttttaccaaaacctgctttctcaccttgttactgttttagtttattgttcatgaaaaccaaactggcaaacatatatggaatatctcctatgacataagggtttaaaaaatttatttctaaacgtactagttctaagccattcttatttgaaaggaaatccataaattagcctcctacatattgacttttctgttctgtaaatttacactgaagtctaggcatcacagcagatgcctatagtattaactatttcagatttgaagaatgtcatcaaaggtgatcaagtaagtataaaacaatggtttttctaatcagttcttcagaattatgattttcagttacagaaaggtaaatataatactgtattttttctatttgaatcaaacactcatttcttctccttttatcccattttccagtcctttaaaaccttggaaacctaaacttaaaaccaaggtgtattaataaaactcaactatatgtgctcttcctagaaatgccctcatttccttaccacttactgctgctgagagttgctatccttttgtagaagacagattgttaaaaatggaatccacccccaagctatttccctatttcaaagttttcacttagaagtgaaatataattaatggggtgtaaatcttttaacaagcaggttgtgtggaaagagttatagtttaaaagctgacttcatatcatacatgctagcaaaaataactcttactgattcttatatgggttgagcatccctaatccaaaaatctgaaacccaaaatgctgcaaattctgaaactttttgagcaccaacaagatgtgcaaaggtcatgctcaacagaaatgctcattggagcacttcagattttggatttttagattagggatgctcaactggtatgtatacacaaatattctaaaatgtgaaatgcttctggtcccaagcatttcagataagggacacttaacccatactgtgccaggctgtagggtaagtattttcatgggttatttcatttcatcatcacaacagtcccatgaggtaggcattaaaattatttcaacctcacaaatcaagaaaccaaggctcagaggtaagcattgtgcacacagtcacatacaggtaattctagtgaaacgaggactcacatccaggtaattctagtgaaaccaggactcacatccaggtctatatgattctgakgctcataattatagtccctgcattatggaatatctttctttcagtttgaaattgattttggtaatctgggccttaagttatctcctttctcacttctaggtccatcctaaagaaataattaggtagactggggcaatgcatggtatacagcaacaatagcagaagcccaatagggaagcaggtatttttactggtatttttactacatacgcaaacatcttgtgaagaaaagcattctacaagcatcaaggatagaaattcaaatcaattgaaayggtatttattgagcgccacagggggtagaaaccacatctgttttgcttatcactatatccccagagctcagcacagtgcctgagagtgcgttcaataaatatttgtcaagtgaataaacgaatatagggcgtttggaaagtactggaaaaggagtgaggattctggtaaaatataaatgatgaccatgttaataaggatgctgaaattatggacttataaaagaagaacgggccaggcgcatgactcacaccagtaatcccagagatttgggtggcttaagtgggaggatcacttgagcccaggagttccagatcagcctgggcaacacagtgaggcctcatctctataaaaacaaaaaacaaacaaacaaacaaacaaaaaattagccaggcatggtggcacatgcctgtagtcctagctacttgggaggctgaggtggaaggatctcttgaacctaggaatttgaggctgcagtgagctatgatcacaccactacattacagcctggtgatggagcaagactccacctgtaaaaataaataaataaataaataaataaataratagatagatagatagatagatagatagatagatagataaagtgggataaattttaaaagtgatttatttcgcctacaaaagatttaaggttatcggagctgaatgtcaaattgacaaattcacttaagttagaacaatggatcatttcatcttctaggaatcttttcagtayctaattggatttcacccaaaatagtttcaagcctagcacagaagcacagaggaggaaaataacatttgcacatctgtatgtaaattacaactggtatgtaaactttaaatggcatgtgaccataaatataaatttttaaatagacaaattcagatgagtaaaatgtctgtgttaatatattagttctgttaaattcagcaatcctaggaaaagcagacatcacaaatgcattacaatgtcagaaatacaaaggatttcctggaagaaatgtcatgaaaatgtgctatcagggagttcctcctcccttcccacctctaaagttattaaatagccatgcctatttaaattcctcctgagcaaggcacgatttaggagtcacaagtcccataaatgtagtttgagatgtggagtcccagctgccactaaggagctcttttgctgtgtctctttaaatgctggagtctccagaaccccaaccttggctgtcttgttccatatgctctctctcccatgacctcagtcatcacagacagctcacacttcttttctaagcttcattcgatatcccctattcttaaccgtcaactgaacttctgaaacagatgcttatcatccttccacccaaacctacttttttctcttttcaacccccatataacagcacagccaagtactcagctgctcaataaaagaatgctagaagatttttgatggcttcattttttcccttctgcaaaacgtcattaggatctttgcagtccctacctgcaaaacttttagttttattctttccttccattccttgtctccttcattcctctttcccttccaacattttctccctccctcccttcgtttctccctctctcacttccttgcctaactcatcaattatttgagcacctaatattacagcactgtactagttgagctggatataatggtaaaggaaacagctacagcctctcaccatattcacagcttatagtctagtagggaacacagacaacacatataatagatagtgtcctcatatgacaatccaagatgcttgaagatttaacctaagggctcaggaaggccgactgcacagttatgtttagatcgagatatcaaggaactaaagaggtatagggaaagatgagaaaggggagtgatacaggtagaacagtatgtgtcaagactcttgggtaacagtcagttggagagctggacaggtatgcaagaagtcagaagctagagaaaagtgagaaagggagtggtaagaaaccaggctagaaaggtaggtggggtttaagtctggctaagccctggaarccacttaaaagagttagaactgtttcctcaaagcaccaagaagccactgaagtaaaggaataatacgatcagattttcagttttagaaaattgctctgatggaatggtayggtggagtctggtagagagcagaagagaaagcaaaggaaagcagtttgaaattcctttaaaattcaagcaggagatgatggtggtctaaactacrggatagagagaaatgaatatatttaagagatatttaggaaaaggaaccaacaggacttaatgagggcctggagttaaggatgaggagatgaagaagtcaaagtttctgtcttgggcaatcgagtggcaggtcacagaagaaacaggggaggagaactgaattagctgggtgggggagggaagtctagttataaaaggcagtttaattttggatatgtttactttgaagtgtctgcttcccatatctgctccttcctctccaattcactgtctcaactcaagggtagctcatcccctccccagactactggaaagggcctaatttggtttggtttcccacctccagatttacaagactatcctcaatttgtttagttatttttctaaaatagagatctcatcaagttgcttactacttcattttaagaagctctgataattcctttgaggaaatgctgaaagcttcatctaggaaagaatttctgtaaatatcctgagcaaaatgaaacagttataatgacttgttccttctaatcacagtttttgcctagaatagagaatcctcaggattattttaattgaataaatatataaatagtgtcttatttttccattataaagttacacatgcttatttttcccactgggaaacttagaaaacaataatcacccaatgtccagttgcttaaaaaatctgctaacattttaattttgttcctatacatatttatctttacttactaaaaattccatttatatgtaatttgtatcctttagtaaaaatcaacatgaaattgataaatttttatatcattaactcttattgagaataatatttagtaagtggaaatttgatataggagaagaaacttgtggaatgagagctcctaaaaaataaaaataatctcatgagaatgacgctaacatttatcattactgttctgctggactgtgctcttcatgatgacgtactggccagaaggattttcgcagaagcaggagtagggcggccctttcactaccgggttaggagaagcaggaattatgtgaagccccacagacaggagtcaaaccaaggagaggaagtaaacatgcttctaatttctgagagaaaagctcagggaccatgactttaagaattctgagggatttctgggactcttataacttcctcaggtttattattttagttaccctgtttcctcagagagattagcagtaaaattctttacagcaaaaggactttggggcttttcttcctggacaagaaaaaaatacagaacgtacaaaactctatccatgttccatcaaaggaggagagaaagaaagaaatagagtaggagaaaaaagctaaaagggaatggaaaacaggcaaagagaaaattagtctaggaatgggatttggactaaatgttgggacttgaatgctgaaggatttgtaacagaccttgagggatccctgcaacagcagataaatttgcaagcatgctcatcagccctctgtgactctcactcaaacaagttcctttcagccactgtctcctaaaaattacctttccatatccatatctttgcttatgtggtttcttttgactacaatagctcatccttgcccatctgtctgtcatcttccactcccccacctagccttctgataaaatgttccaacttctctgaagctttgcctatctgtcccgttgttttctctcctttaactctcagcaccagaatgatttcctcctttgggttcctaaaccactctctctcaccagtatactctagcaatgtgccaggtccttggcaggtagacaggcttgctccttgaggccaggatcatgccctattcgggtctcttaatgtcatggagtcaaagatcagtcagtttaaggttgtaaaatcacataaaacacgtctgggagctccctgcatgttatctaaggttcagaagggagaacagtgaggaagcaaatccagatcttttcttcagcaattttaaaaaatggactctaggtgagtatttgccactgccagcattcagctttcttgcatgttctctgaaacttgtttactgtgggcctgcctttagttgcctccaattctttaataattttcataaagttagttcagtttgtataatagagatgttctttccataggccgctaatttctttgttagaaaactccccacattaatgtcattaacaaataccaattacaataaaaaataacaaaataaaccaatattatggtaaatccagagaaataaattccaattgctttaaaaaaatcccatctaatgctgaaccttctaattctttgcttaaatgcctaaaaatacactatactatccctctcaggtgggaatttttaccaccatctgagcttagatttgctcatttgaatagagaggccttagacaagctaatctctaaatactattttacaatgatattctttggtcttataacaaaataagagatcactgctaatgatcactggaaatttcttattttccaaattctctcaatacatatacattacttttgtaatcagaaaaaaaattattaaaactgaatagtaaataatcctaaacagtcatacaaatgggttcgttgtaacggtcaacaaacagtagtcagaagtcagattagaaaacacacatttcaattacattactagtttgcatgactctaaaacacaacccttataaacctccctatcaaaatcataacctccttttcacatgaaaataataatatctacctccctgcattttccctttgaaatactgtgttgctataaatggcaaaaatccacttttgggtagtgtggtcagctattaggtataaccaaagcagtcacgacaaatattgcagggggcaaaaatcaatgtgtctgcaggaacaaaatacagattcaaaataaattcaagaaaaaatattcactaagaaacaatggatagacaaactaaattggcagaaagaatgtggcagaatgccaaagaatttccacattgtaaactcaggcaacttcattaactaaggggtttgagaaggaacaaaaaataatttaaaataaaaatgagtgccactgtatttgatgaaacaagtatttcatagccttgggatccccaggctgctggagctattagacactaagttatcaaattccctgctgccactaccagctgggggacacaggcaagacaatttctggacaaactgttcagtgcttctacagatattaaacaattatgctgtcatagcaacatggtatatttctgagggtgcacagtagcaatctgccagggcttagttcaaattattaattagcaaaattcatacattctttaattttagcaataaaatattcatggtgtctcaatattaaataattcaacatttactaaacctctatcaggagaaaaatagaatctctaatcacattaagtttgtaattaatagaatgagatacaaagaattagttaaaatgttcatagagtcttgcttagttggcattaaacatatgtttattgattttcagactgtataaaagagttaaaaaatcaaatgctatgaaacgcagagaagaatgaatcatttctagcctggaaaaaattgaaatggcataatttcattgtataaattaatcaagaaattaaattggcccagtgaaagttacttttataatatttcctcaatggaagttcatcaatattggtataattctgaataaaaggtttatattcaaaaatatgggtctatacttcttaggataaagatgacaggagggtacatctttcctctttcaaagagacttaggaggcacatcaactaaattcaatgaccaggctttgttttgatgctgactagaataaatcaactataaaacaatgccttttttttttttttttttgagacagaatcttgctctactgcccaggctggagttagtgacctaatcttggctcaccgcaacctgcacctcctgcggtcaggtgatcctccaacctcagcctcctgagtagctgggactacaggtgcatgccaccatgcccagataattaattttggtattttccgtagagacagtattttactatattgcccaggctggtctgcagcttctgggatcaaggcatccgcctacctcggactcccgaagtgctgggattacaggtgtgagccattgtactcagtcaaagtaacactttggagataactggggaaagctgaaaacagcatcagatcatatgaagggattattgttaatttgttaggtgtaataataaaattgtggtcacattagagctaaatggtgaaatatctataagaaaaatgatatgcaaaagaacaatatattaaaagatgacatacaaaaaagtgttgggagaatagataaagcaagatagacaaaatgcttattaatcattgaggctgggtgatgaatacaagggggttcattacgtactctacgttgtgtggaatatataaaaaatttcccataacagaaacattttaaatgtcctttacttagtatgtaaagtatagtctctggcctattataagcacttaacaaaagttagttattatattattgttgttgttgttgttctgcctagtacaggaattcgtgtgctatgatgcaaaaaagcatgagctttggagatctaatacctaactctgacattaactagctatgtaattttgagcaaatatttttacctttttgaactggtctgcttattcgtgaaaggtggaaaataaaaatttttacctcaaaaggttgatgtagaactaaatgaaattatataaaagtacattgaaaattctaagacatacaaatattactatttttaatcttagttcataagaaacttttaaccaattatggatgaaatcaaacacggatcacaacaattttaaaagacgattgaatcaacatagtgagaaaatactataaagttcagaagaaaataagattacttcttttttgggagagacaaagaaagcctcatagaagaaaaacatctgaactcttgaaagtcggcagaattttcacaggcgaagatgagagtaagaggcaccatatgaggcaaacaacatgaaaaatggggaaggggatattgcactcaggaagtgtaagaaattgtagtttgaggccgggcgcggtggctcacgcctgtaatcccagtactttgggaggccgagacgtgtggatcatgaggtcaggagaccatcctggctaacacgatgaaaccccagattactaaaaatacaaaaaaattagccaggcgcggtggcgggcgcctgtagtcccagctactcgggaggcttaggcaggagaatggcgtgaacccgggaggcagagcttgcagtgagccgagatcgcgccactgcactacagcctgggcgacagagcgagactccgtttcaaaaaaaaaaaaaaaagaaaagaaactgtagtttgaaagaactagaactataaaaggagtttggagccagattgtgggtggttctgagtgtctctctatgaaggggattttatctggtagacaagatagagccactttcaccttttagaataaataacattaagagattctttctaggatatccctcactgctgatagatcagaaggtgtcatagaattgaaatgagtacctacagactcagtaatgtaaaaacatgaagaaaatgaaaatcagggatagagaaggcatcctgtatgaaaatcagccagaattggctttttattttataagaaatatataatatattggagttttagtaagggcaaaaaatatggatgggaatacaagaaaagtttcagtataaaaattttaccagactgttattttgtaaagtgatataaaaagctggcttaaaatgacaaaaaaaaaaaaaaaaaaagctgacaaaccctgggaagtgattttattagacaatagtcatgtagaaatgattgtgaattattaattatgcctcattaaatataaattaacttttgatgacttactttgaaattttgtctaatatcagaaaccaagtgatgttatgatatgtagatcaaatttttatttctaaaaacaaaacactgaatatttaaaaaataattcctttctttttttgagatggagtctcactctatcgcccaggctagagtgcagtgctgtgatctcggctcactgcaacctccccctcccaggttcaaacattcctcctgtctcagcttcctaagtagctgggattacagacaagtaccaccacatccagctaatttttgtatttttagtagagacagagtttcaccatgttggccaggctggtctcaaactcctgacctcaggtgatccgcccaccttggcctcccaaagggctgggattacaggcgtgagccacctcgcccagcctaaaaaataattcttatgtaaggatacttgaacatttcagaacacaacattcctaaaatatgttttgccttcaaatatctgataaagagcaactgtctctcaaaacacatgtattcttacacaaaaacagagactcactcttagggacttttttttattattatttttatttttgagacagggtcttgctctgtcacccaggctggagtgaaatggaacaatctcagttcactgcaacttctgcctcccatactcaagcaatccttctgcctaagcaccctgagtagctgggactacaggtgcatgccaccatgcctggctaattttttttgtattttttgtggagatggggttttgccatattgcccgtgctggtctcaaactcttggactcaagcaatccgcccaccttggcctcccaaaatgctgggattataggcatgagccactgcacccagcagggactttttttttttttttttttttgagatggagtttcactttcctggcccagggtggagtgcaatggcgcaatctcagctcaccgcaacctctgcctcctgggctcaagcgattctcccgcctcagcctcctgagtagctgggattacaggcatgaaccaccacgcctggctaattttgtatttttggtagagacagggtttctccatgttggtcaggctggtctcggactccctacctcaggtgatccgcccgcctcggcctcccaaagtgctgggattacaggcgtgagccactgcgcccggcctccggcagggacttttttaaacaaaaagaaatatggcacttatggctgattctatagcccccaattttcacaataaatattttgtatatcaaattgaatatgacactatacatcaaaagaaaaccaggtctgggaaggtggggaaggcaggaaacttattcttgagctacagctggcatagaaaaaatatcactggttagaaaataaatagccatctctctttttgttaattggaaagtcatactgtgacaaaaaaacaaaacaaaacaaacaaacaaaaaaacaaatcagcatgaagctcctaatagtaatgaaaggtacatataatgttataattacagtaggtagaaagtaatgcatgctaaagtggttctataatattcagcattataccctaagtgaccctcaaacatgtgtattttcatggtactctatcccacttggcagaaaggcagcagttctgctgcacttactggaaagactatgtgctgtgtcataaaatctcacacagaaaataggatttttaaaaatcaattttattataaataaggggcaggctactttattttactatgacaagtggtgcttgtatttagcttcccaacagatgtaaaatcttttctagtatcatagattcttagaaaagatagtatctgcaagaaaaaggtgaaattgggtttagtaaagatgttaaaccttcagatacctcaaaatcagcacccattttctttaatttcctcattgtaaaagttgccactggtaacagagcagtcttgtaaaacatctctagatataatttcaagtgttgaaacatttctttcatagagttcagccagtttctggtttgcaaacagaaggctgtgtagactgcatatatctgtagacaatgctttagaaggagaaagaaaggagactgaacaattgctacacatgattcatttactttaaaaataagttatgtgattaaaataggcattttcacaggggactgtcactttgcatttgactgaaaacaccagtgacactaccccaggagagctgagagtcaattgtcctccacctattatctgcacctttatttgcctgtcttgatcttctttgattgtcttgtttcagaagatggaaataagggtgaaggtgagcaggtgcatcaaatatgaagaaaagcatgaaataccattgaccaatgaaacaaggcattttttaaaactactgaagaaggacctgagttactatcactgcaaaaatatacattcccaaatatataactctcctagatgatcagcactcagaacagcacagagaaagagaacacaaactctatgccagtccttagcaaagcacagttctgtggggtactgcattagtcaaggaatactacaggtggctctgtactccctcgtacccaccaaacagaagcagctaagagtctaaccatagaatcttgcccagatcttagcacagatgttaccttatgaaaacacattagaaaggaattgaagttggctaaaggattcaaacagttctatttagattttaaccagctgccttggtccaatttccaccccttgacctggtaaatgcaagcacaggcaaagttatgtatgatttaattagctaaatactaatcagcactttattattagaaatttaaaaataattagcatttcattattctgtcttagtgataatgctgccagtctctgatcctgtcattatagaactatatccagttgaatgggctacttaactatttactctcttgagtaggtagtccctagattttatctaattcattagtctccttcacttaaacagctgcaagctcagagaaaaagacatttcaatttgtcttatagccccctgaaaacaatccaactaagcctaaattttaaattcatattacttctaaatcattttggctactcattaggaatttatttatttatttatttattattatttttttgatatggagtctcgctctatctcccaggctggagtgcagtggcacgatctcagctcactgcagcctccgtctcccaggttcaagcgattctcctgtctcagcctccgaagtagatgggactgcaagcgcatgccacttcacctggctaatttttgyattttttaaagtagagacagggttttgccatgttggccaggctggtctcaaactcctggcctcaactgatccactcaccttggcctcccaaagtgctgggattacaggcatgagccactgcacccagccaggaatttatttcagatagtcctttaaaatctactaattaactcagcaagtatttgttgaatgtctacggtatgcaaggcatcagggagacacaaaaataatgaagactctttatctctttttcatagagatggtgggtaaatacataaatctaactaaatcccaaaagaaatctgtaagtgacctatcacacttcagagagtgcagtcaagccttcaagccatagcattcacaagcactttattaaagaagcatattctagaatattacagccagaaagaccctagaaaatatccatgccaagcctataattttatagataagaaaaaagaaaaggccctaattagaaggaataactatttactcagtatcacatatcagttgatatcacacatatcaatttactcactaacaatttactcaactatcacagagagttaaaaaatctgaaaaggaaggaaggtctttgggtacccagcttattacttttccatgatgccacattgccactctgaggttaagagaatgtgaatgggcaaaggtaagagaaagaagagagcatgctggcaaagattagaggttgaaatataacactgataagaaggtatgtttgggaaacagagtatttaatttgtctgaggaaaaaaagcatttacagggagaaaccagacaccaggctgaaagcagagcaggattagatcatggaggacatcaaatgacagtctaagagagttagactttttcactatataatataatgaacataggtagcagaatttacttccaaaaaaacattccttcaacattggtattataatataacactgatggtcttagaggtttataatcaaagaacagaaaactcttttgatatgaaaagggtcagctaaacatagcaaattacactgaatacaatctccctttgtaatttcttctttctccaaagtggagagtggcaggataagagtacaagatggcaagacagtgtgatctgctgaccacagatggcttttgcaaaataactgataaatgaaagtttgtgccaacccgtggctcctgccttgctcttcgtggggatcttcaacttgaaggctctatctagctgaatcctgaaccagtcctagacaggcttgaaaatcagtgggcttgaccatccttatcagatgctggagtccaaccatctacctatggagctgtagctgcccttccctccaccccgctgcctagctctttgctctaatgccttgttcctttctttaggactggaaacaaaagagagatagcatattagattttatgccaaggtttgtatagcaccctaggacaattccaaaacactttcacagtctctgcttcattcatcataaagcagaggcaaacctctgttctacttcacccttcactctgaatagctctccccaatcctccagaggttaaaacattcttcctgtctctctggttactggctaggcattaacttcaaccttttaaactagaagaccctcctgaaactctaatctattacctgctcaattgcaagtgctacctttgccaagaaaccaactgcatctaacccaccaaaccctcaggatagcaataccatgacagagatttcaaaaccacttggactccataccttgacctctagggatcttccttttaaaaacctgcaccttagaaaaattattcctcaagccccagttctgtatagtcttggtctattctcttctccatgctggtctgccgctgctgggatgccaaaagcctctgtgtctctggccattcaggtgatggcagaagttctgaaaaggacacactgagtgcaccaaggtttaacttataaagagtttgtgaaactcttataaaaaatttacaaagtactttgggctatatacaacctgaatgtccacagagccattgtttttcaaagtgtgatgagaatgtgacttcctgggtttcaatatcaagagccaaattctgactgttaactgatcttcatcttcccactctggtatataggttcatcttttactgttcagtgaagaaaaataggtaggacttttcaaayagtgggaattaaagggtcataaataatttattgttctagttttaattcttgttttaaaaaatgaaacaagagaatattacttttaaactatacagtgatacagaggtatttagctgacagaactgagcactgtgtgaagcacttcccacgcattatctcatgacatccttacgttagcccaaagggaccatactatttttattcccaggttagacatcaagaaactgagccttagtaagataagcaatttgcccaaagtcacacaaccatatgtggaagagttgctgttgagcctctagttatctaatttctaagcctatgcactcaaatcaataaagcacacaactggcccatttttacttttatttttaaatcagtacttcaaaatgataagtttgagaggctaaatatataaagaatatgtattatttttataaatacaaaaaagaagaaaaaatagaaaccaaactttagaagctttgttacccttaatttaagaccaatttaaaaaaccaaaagtgctgttcactgtgagcctgaaaattcaatagaggaaaattatcaggaccctgtaaacctaaaattttcatacgttcctccataaacatacattgagtgtctactatgtaacaggtaccatgctaggagctgagaacagagataaataagaaaaacacagtccctgctctcaagggacatatagacaagttgcaaagacagtcatatggtatgactagtatgacaaaagggagataaaagggagtagaagcaggaaaaacctattcagccagggacaagggaaggtctctcttccatgagttaaagggagggtatatgggaaggggacaggaagttctccctgcagaaggaagagcatgtactgaggaccagagcagagataagtaactgaatagataaggaactgcagagtgcctcaagccaacacagtgagagaaagaaggggccatggcttaggaatagagggrtgggcagagagtgaatcctgtacactgtactgaagactcagactatacctaacagaaatggggagccaatttcagcaaaaaagagaggctcaatcagattttagttttacaagtatcaatctgacaacagatactacagaatggagagtagataagaatgggcataaggtggggatggagctatcataggaaactactgctgcaatccaggtgacaggtgaagatcactggggctagagtgacagatgtggacaagaagagtagatacttataagacagaatgtacataacttgatgagggacagaatggagcatgatttaaaccttgaggtaattttgaagtttagaaggtagcagagtctcatcctttaattaaaccagtcatttaataggggaaaaaataactgattccaacaagaagaaacttactgcttttaaattgttactatcattttttcattggtacctagattttagccataactcacctggttgccaaccaataataagtgttctccaaggagaaagtctttcagcatatcttccatcactatcacatgctagagaaaaaggaactaggggttaactgttttgtacaatcaaggttaaataagaaagttaactataaagatatctttatagaatataaatayctattataataaacaattatcaatcgatttgatataacccaaaattaaatctgtggttataagtaaattatataaccatttaggtcactgatactgaaaacttgaaatagtccacctgagcaaaactaagcaactgaccaacatttcagagtttttaataattcaactcaaatatttttttacctattatactatgtagagttggcttataatttaatatttaaattgatacttgctaatgtaaatatacaaaggcttcctaaaataactgtacacttctagggaacattttacattgacttgttcttaaccattacctttaaagctatggatagcttcagaattaaaaatatattatttaccttccacactttttaatttgaattatgacacaatataataacagaacaagattaaggttgttcacaatagccacagaggaaattacattgctcttttgtatcttgaaaaataagacacctgtaagtaggtcatgcgggttctttagggctgggaagagatctacactccagcacaattaatattcctattactttctcttggttttctgtatcaaatagcagctaaataagtactaaagttattgacgttccctatttgtaaaaaggcaaattaaccttttgcatccaacacatgctgcagatatttttccagtacgtcactctttttttttttttttttttttttgaggcggagtcttactctatcgcccaggctggagtgcagtggcgcgatctcggctcactgcaagctccgcctcctgggttaacgccattctcttgcctcagcctcccgagtagctgggactacaggtgcctgccaccacgcccggctaattttttgcatttttggtagagacagggtttcaccgtgttagccaggatggtcttgatctcctgacctcgtgatctgcctgcctcggcctcccaaagtgctgggattacaggcgtgagccaccgcacstggctgctttcttttttcaatttcgtttatggtgctttatatctatattgtataatatacatataaattayatataatatatagatataaaaatatataaatatatatgatataaatattaaaatatacatatacatactcacagaaatttttctttttacttgtcaaatttaatagtattttctttcagtttcttccttagaagaaaaactgagaaagtgttttatctccttcaggaacaaatgagtattccctatgtttatcttggtcgtttttattttcaaaaatgctttcagatatgccatggagctagagttttaataaggcttgaagtgaggtgagtatataattgtctattcttgaatacttttaaatggatataaggtgtatgcttttaagaataaaaagagacactattaataattatgctgggacaacaagtataagcagaaactatgttaagcaaaccaagatatacatcattttaagctgagttctggtgggaatatagcatggagacctcttccttttcactaagatgaaaagtcagtgccaattccagaaaacactaagctcttccagtaataaatgggctaatctacgttgaaaagttggagtaagtacctgaatagccaaagaaaaaagcaatgtaaatatcgaaaaataatccaaactatatctgtgttcttctttacaattctcatgtccttctacttcatgccctcattatatctaactagattattcaagtcaacaaaccttagctaaggctaaagtcaccgccaatacaattctcttcttagcctcttgaccacttagtactgcagacaatttcttaaaagtctcctctcccagttacccatttcccctgattccttcctacctccctaacaatttctcccatagttttctgagctggatcttcctgtagcaattccttccttctaccttcttacatgcttccccttgtattcatggtatggggcaggttgtgactatctgtacccaggcacccacctgagggttgagggagggctgtgtgcagagttggatacccacatgtcagcattcaaagacccacttctgaccctgctctccttaaatcctctcatctatctcatggcttcaatgaccagctctacaccaatcttcaacagcaaaactcctcctcaactacagccctctatttctgagtgatcaaaccactttgttattccccagtcacctaaattcaacacatctaaaactcaacttattactttctcctgaacttcattctttatcctgtatctttttctccagttaatggcaycattttctaccagctgaccaaactcctattatcatcaccctgccctccttattcctctcttatcaacatccaactaaacagcacctgaattgttaagccaccaaaaatcaactgcatctaccctttcttttccatccccacagtttcaaggtttttatcatctctagcctagatttgtatcagctaattagcttctctaacttcagtctctccttgagccaatgtgttcttacagtactgacacttctttgttcaaaatcttgtcacctcatttctcaaaattccttaaatgactcctaatactttaggaacaaaggtcattgcttacattcttgatctagtctcagcctcatctcctaccactctccttttatactgtgtttccaaccatgggcacgatttagaataatgttctgtttactcttctgtttactttttcaccagacattgtgctccctgagaaagaatctctgctgttcatctaacacaaagttccactgacttgatctccttaatagccctggaatgtgtcctctccactctgtccccactgtcacctctttagttcagatccttcataaatttcatctggactaccrcaataaccacctaactagtttctctttgccttagttctaactcctagacaatactaaagagtaaaagctaagttagccaaagtacaaatgtgcttaaaatctttcaataacttcctcattcttctgaacagaatccaaattccttaactaccaagactgaaaagatctcactctttcctaattcaccagcctcttctcttggcactcttccacttgcaacctcagcttcataccagtgacaacaatttatatatagctccctaaatgagctattgtctcatataactaagtctctgctaatgctagtctcgttgcctgagagactcttctaattgggtctggttgaccaattttctatgatcattccaatctgggtcaatcgacctcatcaatgccaccataagtaaactgcacatacttccaccacactgtgtagtaactatgtgtacttacttgcagattaagaacaacttgagccctagagctgcgtatacttgtgtgtgtattttaatctctgtatcccaataccttaggacaaggccagactcataatgggtatttttaaattcttacccatctaaaactccttaggcttattaagaggctattatttctctttcctccaacttctcctccttactgctgcaaatgtaatattccttaatggaaggcttaatgaagtaatactctttatcaagaacattcaaaatcttactcattcttttattaatccactaaacacatatttacttggcagttactatgtgccaggcactttactatttgctggaaatattaaataaagaaaacatagggctgtgccttagtgatatggaaaacrcgttttaaaagtccatttcaacacaatgtggtaaggacacaacagggcataggacaacaagatgatacagaagcacctaaatctgcaagaggcactgactacggcttcaaagatgaagtacagcataaaaggaagtaataatatacacaatggaagcaaatttaatcaagctactgtccgtacaattggtacagctaaaaagttttcattaatggctaattcataatgctttaagaagagaaggtacgtttggagacagcttaagaaaagtccctcagggccactgtgtaaagttcatggcagccctgagtcctaaatgtccatgtcacaaamaccatggcaacagacattgtgttcaagggcacaatggtctttgctgctactgtatttcctacattcttatatcctgtgaagtcttttcaatctttgccaccatggagtttttcaaattgtcttttgttctttgtctctttgtctctttgttctttgtctctttgttcctttccactatatgaatagagtgtaatactatcagtgcttggaaatagtatgttttcctcataatcatgtttttgcctttgacaggcaagttttytttctacttttgtgtcttataagtagctttattttctgttcatttgtttactgattgtgcaagagcattaatgctccagaagaaaaataaaacattagttaattggctataaaatgaataaaaatcaaatcaaggttatgctcttttctacgacataaaaaatatagttttgacagatttcagaatttttaaccaagatttttattaagaataatatgtctagatacctataaagttaatataacttaaaatatattatagaaaattttaagtagttgttttactataaaagtaatacacagccacttgacagaaaagttggaagagaaaacatttttatattataggtaattttctctaaaaaaattcttattaaagtaaacatctacaataaagctttctagatacaaacttatatgtcttagtggaaggtccataattattggctagtttacaaggagagaattctctaccctcctcctttaaaaaagaaaggaaaaggaaagaaaagaaaaatactagaaacttgcaggaaaaagaagagtatgagaaaaaggatgcataggacatatccctctgaactactgaaatctttaacaagcaagtaaaagaggatgatagctctgctttgtttttaaaatgtttaatttaaaaattgcatataaaattacatatataattatatgtgtgtatgtgtatatattttatatatatgtacttatatatatacttaatatacttaatatatgtacttatatatatacttaatatatataaaatttattaccctaatcatagcaaccattcctccaatttttaagtacctttggaaaaaattttctgttttctgtcttatgtcttaataaaagttgttyggccagacatggtggctcacgcctgtaatactagcactttgggaggctgaagcaggtggatcacgaggtcaggagtttgaggccagcctggccaatatggtgaaaccctgtctctactgaaaatacaaaaattagccaggcatggtggcacatgcctctagtctcagctactcgggaggctkaggtagaagaatcgcttgaacctgggaggtggaggttgcagtgagccgagatcgtgctactgcactccagcctgagtgacaaagtgagactgcatcacagaaaaaaaaaaaaaaaagatgttcaacacttcattttgcatcatctaaattaaatttaggaaatcacaaaaataattacatgtcaatttcacttgaattggagtgtactaccacaatttaagtgatttatccaagaacacaaagcaatactcttacctgaatgttgtcatagaaaagaacatcaggcactttcattttctcatgtgcattatagatcggtgcactaacagcaccaatcctcagagttccagatgttacttcacctaaacatttcacacaggacggataattattcatagcactgtcctcagagatgccaagccacccaacacagaatgcaatacagcttcagtaatatctgtggattttaatttaacatctaaagaaataagctggagagyagtaataaaacaccacagctctagatacaaaatgcttcaaaaggtaacaaattttctttaaaacaatgtagatagaaaacagtatatatataattgtgagaaactaaaaaaaaaaacaaaacaaaaaaccagaatacagtcaagccaccttcacaagcttgtttggtcagaaactataacacatacataagttaaatacacctaaattcaaaagctccaaagtaccttgaatattatcttttagtgtgcaccaatttagaaaccccttaagataatctcctatagctctagtcaaaaatacagatgaactaacctaccacagaactcttaaattactattttcagccaagtgcagtggcacatgcctgtcaccagcatttcaggaggccaaggcagaaggatcacttgagcctaggggttcaagaccagcctgggtaacacagagagaccctgtctctacaaaaaattttaaaaattatccaggcctgatggcatacgcctgtagtcccagctattcaggaggctgaggcaggaggattgcttgagcctgggaggttgaggctacagtgagccatgattgcaccactgtactccagcctgggtaacagagtgtaaccttgtctctctctctctctctctctttatacatatacatatacatatatatatatatatatatatatatatacacacacacacacatatatatatatatatatatatatacacacacacactaaaacataacaaaataaatattttaaaattactattttcgaggttggtccaggaggcctatattttcaaataatcacccaggtgattttcatacccagccagattgggaaactgtcttatgcaattattttgtaataataattattatattgttccttatttgctttaaataggttgacctagaatacattattagttcctggaagccagaaaactaagtaataaagctcttgaaatcagggaacatatctgctatgtattccctacagtaaccagatatgcatgacatgttcactgacatgttccaagttcaataatattaataacattaatagtagtaggtattttagtaatactaatgattacaatgatagaagctatcatttattaaggaccttctatgtgccagatcccaagctaaagcttcacctcatttttttctcatatgacttcatgcaattcaaagaggaaagaataatgagaatactaagaacatacactatgtaatttgctcaaaatcacccagctaatatgagtagagcttaaaacaatttagtctagtctgacattctttctaccatatgggatatatttaatattttgactccaaataacattgcaacctgtggaaataccttagcaagcaaatatacaacgccttaaacaattcacccatctttttttttttctacttcaagtaagaaaattacagtttgtttctccactagaatgcgacttttgtgctaagcgttttggaagacaatggagaaaagcaacttttgcttctatggagtgctgtgaacaaatctgagctaaaaataattgtcatcctgtttaatcactgtggagtgctacacatttgacacagcacagtagatcttaacagtaacttcgcccytcaatagatccttgccattttccttttgtttacaagttctacagggaaggaaaaccatgagctgtaacactgagagtttactatttatttaccaccattaggtctctgaaatagacccagtataaaactgtaaagggaaagaaagagcagggatatggcagtgaatctactatctagttgcatgttgagatgacacacataatttcagattcaaacagcatctgatgctatctatggtttagtttacggaatacatccactcagcagatttacggcttaaggacaagtttattcactcatccaatgtttattgttaaaatgtcaacctcaaaaagggaaatgcactcagagaatggtgatgctagcacttctgtgggagaaagttggctagctatcttctaagaaacccacagaatggcattattttggtacatttgtcaagtttctcagcctagtaggctgtaaacctgattttgtcatcacaactaagggcaaatctaactttcaggagaatattaaagatacatattctggtttctctatatatataatgatgtaaaatcagaattgcaaaatattatatgacaactgtaactttcacatggactatgatatactggttgccataaccagcatattaattgaagggaacctgcatggaaagccagtacctcatcagaagattgttgtgtgaacacggagagttaattaaatgaattcttcataagagagatggccttaaagatgaatggaaccagacaagtaaaaagtctcttcacttaggctccttatcccctacatgaggcttagatgggcactgctaacactagccagtaaccaagaccaaacaatcggyagtctgaatgacagtcgttctttggatatttaatagactcactcaaataatattgagaatacratattattccttctctttgagttgactctgcgtatctgtattcagatccctcagtatgctgagtttataatttgactctaaaaaaaatcttatttcctcaataccaaattcttgtctcagtgcagccctaatgattaaaagcatctgctacaaagaaagccacaacagtcccttttaaagagtagtcacacattggctgcttcaataaaataggtatttacatttttaaaaaattgaaaatctttcattgtgttctaattgaagaatagaaagcttttaaatgaagaactaaatctccccgaaactgaaaattatatttatggctatccagaagaaaagtaccacaaaagacaatacaggtggaaatggaatgaataagagggcatgcatattctgattattattttagtttgtatcaacctaggaaagtttctccaacatatcttataggacatcgctgaccctcaaaatgtaaacatgcaaagaaaacagcattctagattcactggtgaaatacatttggaaaaagtacatttctcaaaattagacaagttgatttacagcaggaattctcagagtatcaattagtatcaattgtgagtcttaagggtgaggggaattgtatctagtatgtactgaaatgaagtaaatattctaagattttacttgtgtttttcaaacttaaaaaaatcagattcattycttcaaactaatatataaaacaaagtagatgaaaaccaaaaactgtttaactgtttattttaactggaattaaaataaacagcatcaaatgtttgttaattattatttcacttaaaaaaaagagccaaatcaaatacttacatttgtaatccttcagttctggctccaaattgtcatcagtatttatttctattgtagcatctgccagatttttttctaatgctgacctagcaagactgggtaaaamcctggaggatgaagagggaggaagggggaaatggcttaagtcaaagctttctgcgattcttaaatacacacacacacacacacacacacacacacacactccttactaattacaactaattaaggaagatcagtctggatctgtaaaatctaaatcaaacaaaattttagaataaatataaacttaatgtacgtgtgaattatatgtttgtggaatctcctttaataagtaaaacttatttgtaattagcagtactgatttatgtacaacactttgcaaaataaaatttaaaatttgctttcttaagtacaattagtatactggcttatcaaattttcttaagtagattaaacaacaacacttggctgttctaggttggcaatcataaattcaaaccagtggagatggattaatgagattttctttagtttctaacataaacttctgaatgaatttaacattatctagcttcgttcttcctattaaaaaatatatctgcttatctattctatgtgtatgttgtcaaaacaaccatctagtgagtgacagttattcttcaaacaaacggattatgagcatcatgtgcctgaggcatgaaacatagtttcccacctacacaaataaagctatagctagaatttatggtcccaagtgagccaacggatatgacttttaatccatggtacccatggtttaactataccactttaaattaaccactatgtgatataacgttccaaataaacatactaagaacataccacttttaaacaatttgggtttttcacagctctaaatctttggtggtgattcctacagtcttgagtataatctctaatagtggaaagattggagagcatgaggcagcaaatagacaagcatgtaaagaactgtcagatttcctgtccctgtaaaattccagtccatatatctgacattattatctcttacctcctgcctcattttgggcctaggctatgatagaggaaattacatagctctatgctagtaactcctcagttcagcatgaagtcagactttgctgctcatctctgaactttcgtcatagttcttagatcactgcctcgttcaaaaaccaagccctcaccttatctcccagtccaatagctggcttttgtcctgtttcctgagcccttgtcttggcaccctgcttaaccttcctcttaccactatcccacaaaccagaggctggcttggtaacattaggccctgcagctgcatccctattacttcctgtcagaacaccctgactggcattgactattttcaggcttagacttgttggctattcccaggcttccccaacacgtatatagtctgcgtgtcaacacatcttaatgttggccctgtgtggaaacatttctagattacactccaaagcctgcagagaatagcaaatatggcacggatgccttcccttcaccaatattggcaggcattgcttgctaatagggcattctttccttctgagactgaacacacttcaccattattctcaatctagcacccagacagcaatatcaatcaaggtaccaaggaagttgaaatatatttacatctagaacattctaagatactggcccatccaacaaatgaggaraatggaacatatcaggcggtgtaaggccaatcctaatttttttcctggattttaagggatttgttaactgtttcctttcccattgctcactgatattttttacttattttttccctctcctcccttggccttggtaaaataagcaaataaatgaatgaatgaaatattactctttactatcctagcttcccaaaaccaaagcaagcacataccctgttgcaaattttccaagtgtacttataactattatgaacagcctggtgtcttttaaaagtaattattacatttatcatatttattcattttaccaacaaaaaaaaattggaaaagctctagtctcattaggttttggttataagaaaaactaaagaaagattcagctacactctgggaaagtcaaaaagagaagtatagtagttacactaagctaacgcaaataactgtctttgtcacaggagtgggataggatctttagattaaggaataagataggacttctcaggatggtagcaaagaagtctgttaagggtcggggtattctcamatcaccagcgctaggaaggaggggtgttacttgcaagagtgaaagaaaaagactgaggggttctgtggatactaggcagtctttgacttctattcagaatgtaattgattaattaatttgtacttgtgattttaaatcttaaatttccaaatagtattggaatatttaagataatttatggtacagcctatttataaatttaattgactatatttgtgccttaattactcaggaaggttttgtttgttcattgagacatccaaagtatgtaaaaggaaacaatatataaaatttattaaccatttcaaatgtttgaaggtattttatttagccgagttttataaatggaaccagacatttttcaaaggcttttcaaagtgatggttaatatctgctagacttacatagttaactgaatgaatgaacagaaaagcctaaagaaggtctcaattttttaaattataacaccataaaactgaatgccagcttctaaaaccaaaaataaatccccaaatagtctttcctgcaagcaaaacgattcttccagacaacaaaaaattcacaccaacaataatcttctagttttaacactgtgtatgattagttcgatcagacttgtgatttttaaaattaattactaacagcttaaacagtgaaaattttatatagatgttactcactttgcttatttatttatttatccataggtgttgatcccaaatattttatatccaaagggaatttctgacaactgcatgcaaattgagtttttgacaaatagaataatttcctcattacttcaatatcagaaacagttaatcttcatttctgattaaactcttacaactgtgtctaaaatttctgtgctaaaggatcagcatagaattgaattttgaggatcacctcaaaattttccagaagtaaataaattaatgaaataccaaacacttgagtgaagtagaactcttattacagagacctctaattaatttttctacaataaaagtatttttggaatgcaaattacttgagaatttcctaatcttctaaattcttccctgtagttcctcaggtttacaaatgtctagaaaatgaattatgcatcaagctctgaattgatgttcactttatagggtatgaggatgaggtacttagggaattcatcagataaaaattgttgcaatcttaatgccattggcataaatatatgagtgatattttaaaaattacattaacaaaaaaaagcccaactaatatttataaactcaatgtttaataaatttaggttagataatttatcttgatttttgtctgcttcataaagttctttgtgaaaataagttatatcaatgtttgttttaaaattttccacaaaatccaattccttttcactgattcaatataaaatgagttttttttttaaaaaaacaataaaatactttatgaatcaataattttgggttccttcctgccactgtgttattctaaagagaaggttagtaagaaggcttttgagtctgcagccttgctaaactcaacagatgatgcataaacaaaatagctgttttctattcatttctagttgaaagggtcatggagtgattacaaaataagaattttttgtggtcagttgataacactggaaaaattagtcaactatttgattcagtgaatatgtatgagaatgaaaagtaaccaatttttgtttttcagtttttttaattatgaaatatttcagtatttcagaaaattaaagagattatagaaaattatgaagactattaaacattctattcatctctctccatctctagagagaactctaaccttgaaactggtgtgtatttgttgtccatatttttatattttgctacgtaagtgtgtatgaataaaaaatatattgtactgtttatcacatttaacattttgtacaaatcacatcatatactgaatctccttttgcaacttttttactcaatattaaggtgttatgatagataactgtaaatgcatgcaacttacttcattttgactgttgtaaattattttatcatacaaatatatcaatttatatattcatttcctactgatggacagatgggctgtttccaattcttcattattacaatgatacagtgaacattcctgtatatacctccttatatacacatgtaagtctatctttaaagcagatatcgagaagtggaattgtcaaatcatagagtaataatatatttaggcaaaaaaaaactgttgaaacttccatcccaacagcagtgatgaaattacattcctctccattcataaaaaatgttactacaagtaaaaaatttaaagtataaaatgatagctgattattattttaaatttcatttcactgattattaatgaggctgagcatgttttcaaatgtttattggtcatttgaattatttaaactttgcataaatatctattcattctttgcccatttggagttaattctttttccttattaatttgtagttactttatagtccctgaatgccagtgctttcttaatcaaaaatcatccaaaacatctttcctagtttgtgggttataacttataaagtagtttatagtgtcatataactggattttaccttttgtgtgggataaattggaaaatctttatttataaccatgtattgacaagccaacattgatttacaatgctacatcttatatactaagttctcacaaatatgtaggtttgtttctgtgctctgtatctattctaatagtctatttgtttttccctgtaccaacacatactattataatgaatacagatttagaattaatattgatatctaataggttaagtataccctcattaatcttatcaaaatttcttggctattagtagcctattatacttccatgccaattttgagaccagcttgtcaaattcactataatcttgtgggattttgactaattatatctaaatatcaacttggagggaaacagttttacaatactaaatcttccatttatttgtcttcttttataactttgaataaagatgtatacttttctccwttaaagcattacatgatatttattagattattcttagttgtgcaaagctttctactattattttgaatgaaatttttaaaaattatatttccttattgattgttactggagtataggaaatgtcattgatttgggagtataaataacctcactaaactctatttgttctaaataatttatttgtattttctcttgtatttttaatgtagctaatcatataacctagggcaaatgtacttgctaaaagtgctgaaagatattcttgttttggtcctaactctaaagaaaatgtgacaagtattttgccttaagaatatttgctgtaaatttctggtagatattctttatgagattaaagaatttcctttctgcttgtagtttactaagaatattccagatttactaagttatatttgtttttgctttggtttgtttttagggctggctattgaattttatcaaacactttttctccatttagtagaataatttttcctcaactaataagaagatgaattaaaaaacagaatatcaaaccttgacattcttgaggtaattccaaattgctcatgaacctttaaatataatatacctacatttgagataaataagaaagatatgttttaatagatggaagtgaaaagaggaaatctcagaaataaacattacctttttctgactgattgaatgtgtcctccctaagattcataggttgaaatccttttgcccatagtaaaattgtcaattaaaaatacaaatttaggtcgggcacggtggctcacacttgtaatcccagcactttgggaggacaaggcgggtggatcacgaggtcaagagatcgagaccatcctggccaacatggtgaaaccccatctgtaccgaaaatacaaaaaacaattagctgggcctggtggtgcacgcctgtagctccagctactcagaaggctgaggcaggagacttgcttgaacctgagaggtggaggttgcagtgagccgagatcgtgccactgcactgcagcctggcgacagagcaagactccatctcaaaaaaaataaataaataaattgaaaagaatatttgctgcatgtggctagccagttctcccagcagcatttattaaatagggaatcctttccccattgttttcgtcaggtttgtcaaagatcaggtggttgtagatgtgtgatcttagaatttctgagttctctattctgttccattggtctacgtgtctgttcttgtactagcactgtgttgttttggttactgtagccttgtaatatagtttgaagtcaggtagtgtgttgtctccagcttttttttttcttaagattgtcttggctatacaggctcttttttagttttttatgaattttaacatagtttttcctaattctgtgaagaaagtcaatggtagtttaatgggaataacattgaatctataaattactttgggaagtatggtcattttcatactaattcttcttatccatgagtatggaatgtttttccatttgtttgtgtcctctctaatttccatgagcagtggtttgtagttctccttgaagaggtccttcaattcccttgttagctgtattcctaggtgttttgttctctttgcagcaattgtgaatgggagttcattcatgatttggctcactgcatgcctgttgttggtgtatagaaatgctagtgattttacacattgattttgtatcctgagactttgctgaagttgcttatcagcttaagaaacttttgggctgagacaatgggattttctagaaataggatcatgtcatctgtaaacaaagataatttgacctcctctcttcctatttggatgtgctttatttctttctcttgcctgattgccctggccagaacttccaatactgtgttgaataaaagtggtgaaagaggacatccttgtcttgtgccagttttcaaggggaatgcttccagattttgcccattcagtatgatattggctgtggaccccatccttatgccttatacaaaaattaactaaagatggattaacaacttaaatgtaaaacccaaaaccatagaaaccctggaagagaatctaggcaataccattcaggacataggcacaggcaaagatttcatgaggaaaacccaaaagcaattgcatcaaaagaaaaaaattaacaaaagagatctaattaaactaaagagcttctgcacagcaaaagaaactatcatcggagtgaacagataacatccagaatgggaaaaaaattttgcaatctatccatctgacaaaagtctaatatccagaatccacaagaaacttaaacaaacttacaagaaaaaaacccaccccattaaaaagtgagcaaaggacatgaacagacacttttcaaaagaatacatttaggcagccaacgaacatgaaaaaaagctcaacatcactgatcattagagaaatgcaaatcaaaaccacaatgaggtaccatctcatgccagaaaaatagcaattagtaaaaagtcaataaacaatatatgttggctaggctgtggagaaataggaatgcttttacactgttggtcagagtgtaaattagttcaaccattgtggaagacaatgtgatgattcctcaaagatctagaggcagaaatgctattttacccagcaatcccattattgggtacatgcccaaaggaatataaatcattctgttataaagttatatgcatgcttatgttcattgcagcactattcacaatagcaaagacatggaatcaacccaaatgcccatcaatgataaactggacaaacaaaatgtggtacatatacaccatagaatactatgtagccataaaggaatgagataatgtcctttgcagggacatggatggaactggaagccgttatcctccacaaaataacacaggaacagagatccaaacaccacatgttctcacttataagtgggagctgaatgttgagaacacatggacacataatggggaataacacacactggagcctcttgaggtgggcgggtagggggagagcatcaggaagaatagctaatatagatcctgggcttaatacctaggtgatgggttgatctgtgcagcaaaccaccatggcacacctatgtaacaaacctgcacctcctgcacatgtacctcagaactcagaagttgatggaaagaaaaataaagaaaaaaataaataaaatgcatctaaaaatgattcattctaggatcacaataatgttaccttgatagtaaaaggtatgattactataaaattgttcataatttgaaattactcataattgctcatgatttgttaatattttactcagaatgtttgcatccactccatgagcatttgtaattgcataatttataattttcctttcataaattattcttatctgctttaggtgtctaggttatactagactcaaagtgaatttctatgttttcaccatttctctattctttggaagtttatttaaggcagggattctaaatttcttgacaatttggtacaatttgacaataaaaccactcaggaatggtcttttttaatgaaattttttaactaccaactttattcctttaatggttatgggtcgatttgaattttctattcattcttgaccaatttaggtaatacacatgattccagaaaattgtcttttttagtacagttttcataaatattgactttattttcagttatgctttttcctttccaaaatthaattacttatttgttcttcctctcttttacactaattaaatttaccaaggctttatctattaatattttcaaagaactaccttttggttggactaatcttttctatgattattttgtttgttagttcatgaatttatgccgttaacttcattattccattccatctactttctttgggtttagtctgtaactttttactaacttaagttgaatgcctggctcacaaattttctttctctattattttcaagtgtgtgagtttaaaacttaaaaaaaaaaaaaagttaccttaggtgtatcattaaagtactgaaattcagttttggtcatagagttgttaatatttcacaattttcattctaatttcttcttttgatgtctgatttaaattttccaactaaataggcttttaagtgtattttttgttattgctatgaattctgttgcttcttggttggagaatgtgatcttcatgacaaatattctttgctatttactgaaaaaccratttttttctttttttcttttttgagacagagtcttgctctgtcatccaggctagagtgtaatggtgtgatcttggctcactgcaacctccactgcccgggttcaagtgattctcctgcatcagcctcccaggcagctgggattacaggcacgtgccaccacacccaagyatttttttttttttttttggtatttttagtagacacagggtttcaccgtcttggccaagctggtcttgaacttctgacctcatgatccacccacctcggcctcccaaagtgctgggattacaggcataagccaccacacctggacaaaactgattttttatctagtttatggtcagtttttgatacatggtacaaatgtctcatgtgtgcttgaaaagaatgcatattcattgtccactgggtataaagtccattatatcaagtttgttaatggttttggtaaatctctatctttactaactcttagaatatatgatctgtcastttctgaaaaaagtgagttttgaaaactctcattataactgttgatttgtcaatttctcctgtcttcaattctgattgtttctgtcatacagtgttccttcttaggtataaatggctaaggagtattaaatctactaaatgaattttttgttcatcttcttcatccccaatcatgcttttggccttgaagtatattaatagtaatatatttcttcccttttggttagtatttgcctgttcttctttttacaccttcacctctgatctttctatattatcttttaaatgtgactcttgtagcaacatataattggtttttgtcttttaaaatcttaatcagaatctctaactgttatctggaaagtttaatcttgtgtaatatttgtgctcacttctaacattatttcatgtttactctttattttttctttcatttccacctatgttgtgctgacaggtataacattcctatttgcttatctctaccaccactggatttattgatttatttccttttttatttgtggttactcaaaatttacacacacatacttgaactaatgaagtctaaaattattcaatacttctattctcttcttaaacaacagaacctaagaatgcattaatctctttttccagtttctataagtttttagcttcaccctgttgttaaatacttccctatattggtattcatttttattgctttgtttttcacaatacatttaaatttaacaatatatttgcctatttcctttctcaccgtagtttcctgcatgccagtctttttctctgcattcagtctcctgcttactgaaatatatcctttagtagttctttaagtagtgctgaaaaaactactaaatgtagtaagctcagtctttagctgaaaatgtattccgctaggcaaagacttctggcattgatagttattttctctcaacactttcaggatactatccaatcctggaatctactattgctgatgtaaagttgtcggcttgatattttttctcttgtatctttttccgttataagtttttctctttgtctttaatgctgtgcagtatcatcacaatgtatgtaggtgttgatttgtttttatttgtcctacttgggaactgatatatttcttcaatctgtagactcatgtctttctgctttctgttctggaattctcctaaccattgcctctttgaacaattattctccctcagtctctttattctctcctcttaaattcctattagacatatgttggattttcttatcttattctacatgtctattaacaaccctttcaggtttcctatctcttcactttgctgtgctgcatcccaggctattttccctccacttcattctcttttcaatagtctaatttactaattaagtgcttattgaattttgtttgatggtttgcccatttgtttgttttctttcaatgactatattcttcaattgaaaaagttctgtttgtttgatttttctttcagatctatcagttcattttctcctctatcacagtcatccagtttttaattcctcgtaagttttaataaccttaaacatacttatttgatagtctcaaattgttctattatttttagttcttgaagttctatttcttctaaatgttgtatctgccaaatctcttatggttttttccccctagatatggtttattactttttacaatgaccaaatattcagataggatatttagtgtactgatcttgtaaaagtatttgccacagattggttttcaaggttggtgttttctactaagcctccaagtaactaaatgatcccggataagtttttcatgttaacttagtactttttggttactacctttacagacggcatcaacatggaccctcacacctgcacctgagcaatgtggggcatttgattcctcatggtgacagtttctttcccaccccaagctccagggagacagtaagctttctcatcatttctctgggcttgtgggcaaacattttttagtctatgggaacagggagcacttccagactctattcttcatgcaggaatcttaattaaaacctctccacctcacatatgcctgcagccacgtccgttgtccccaaacagatattaaaatccagcattagaccacttagccctattcctatttgaaagcctctttggcagccatgatatcattattattctccttattctggtattgctttttacttcatttcttcttctttttaagtattagctctattgagatataattcagatatcacacaattcacctatttaaagtatacaattcaatggtttctagtatattcacagagctgtgcaaccatcaccacaagcaattttagaacatttttcttacctaaaaaagatcccccgtacccactagcagtcaccctccctttctacccccaagtctacctggcttcaggctactaccaatctactttctgtctctatggatttgctctattctggatatttcatgtaaatagagccaaacaatatgtggtcctatgtatctggcttctttcacttaacatattttcagggttcatccacgttataacatgtatcaatacttcatttctttttgttgctaacatttcattgtatggataaaacacactttatctgttgagcagttgatagtcatttgtttccagtttttcactattatgaatattattgctatgaacawtcatgtagaagtttttgtgtggacctgtttttgtttctcttggatagattcctaggagtggaactgtaaccctagtcctgtttcatttctgatacctctgatatgctcttccttttgagtttggataagagttaacaattacttattatattttattcagaatttccaggttgagtagtgtatggggaggacatctagctcattctattttgttcatgtatatcactagcttttctatggcctttattttcacacatttaaaaaatatttgtggccaggcatgctggctcacacctgtaattctagcactttgggaggctgaggcaggaggatcatgaagtcaggagattgaaaccatcctggctaacacagtgaaacaccgtctctactaaaaatacaaaaaaaaaatcagccgggtgtggtgatgggtgcctgtagtcccagctactcgggaggctgaggcaggagaatggcatgaacctgggaggcagagcttgtagtgagctgagatggcgccactgcactccagtctgggtgacagagcgagactccatctccaaaaaaaaaaaaaaaamcaccgtgttttagaagagatccattaaatttcccactccaaatagcagaggaaatataaaatcacacaaaaattatttcttgtcaatattgtcttaaaaatctatcctagggagataataaaatatatgacagaaatgcgtcccttaatttttctgacctttattaaaaatgttctcatgttttctttgtagactgaattagtaataaattgtaactgaattggtaataaacactgctagctttcaatattctcatatgctttatatttctccaaactttggtatttttaatttcttagatcaactcttattatttatttttagtttttcaatttatttttatttatttttttaataaaggaaattaaaagttgattcaactaccagggcatatctaacagtctgcagaatgctttggaagtccaaaatttttatatttaataaaagaatcaatattcttatttcctatacttattcattcttcaaataattactctgaagacactaaagaggaatttcattttagctggatacacacaagaacaaattcaagttgcaacacaaggagcttaatttaactacaagaaaaactgtccactaaactgagaggttatagagggtaataaagattctgctaaactgaaaatagattctcctttaattccttttatcaagaaatgaatggacaacaagcatagtcaccataaaaataattactagatcatatgaaaagagacgaaatctttgggcttactggaaattgttcttaatcttttcttactattctttaaaatagcttcatgtaaatttaattctgtaagaaaattttacaagccaatgttttataatcactaaccaactggtatgaaaacaattagtacagactgaaaaaatgttagttttgtcgaatttagatattgagcagtgctgtcaaaaatgaaaagttccaatgcaaattttagaggcaataagtgtaatagtgctaaagagccctagctcagaagacatatgaaccagtattcaaatcccaaacccactttttataattatgtgacttgagtgacttaaacaattttctcatttataaaatacctctgaaaattattgaatgtctaaataagataatatattaatggaatgaaagtagaccaagatggctgaatagaaccctccagtaattgtcctcccctccacaggaacaccaaattaacaactatccacataagaaagcaccttcataagaaccaaaaaccaggtgagcaatcacagtacctggtttcaacatcatatgaaggaaggaggcactgaagggagtaggaaagacagtcttgaattgcctacaccacctcttccccatcccctagtggtgctacatagcttggagaaagaatctgtgtgcttgggagagaaagagcatattgattgtggtattttgcattggaattcagtgctaccctgtcacagtggagagcaacagggtagcattttgatcagccctagctagaggggaataatcattcatcccagkggtcagaacctgaattctaactagccccaccaccacaggctaaagtgctctgtgttctaaataaacttgaaaggctgtctaggccacaggaatacaattcctgggcaagtcctggtgctatgctgagtcggtagagttggagtgcatgtgacccagtcagacaccagtgcggacagccaaggcagtgcttgcactgtcccttcctcaactccaggcagcacagcttgcagctctggcagagattccttccactgaaggaaaggagaggggagagcaaagaggactttgtcttacaatttgggtaccagctcagccaaagtaaaataaagcactaarcaaattgctaaagtccccaattccaggacttagctcctggatgacattttgacacccaccctgggccagaagggaacccactgccctgaagggagattcccaggcctagcaggatgaatcacaacctgactaaagaatagttgggccatgaataaacataagtggtagccagacaatactcaccacaagccttgggcaagaccctgtattgtgctggtttcaagtctgacccagcacaatcccagtggtgatggccatccctctcccaactccagacagctgagcatggagagagagattccatttgtttgagggaaagtaagtgaagagagcaagagtctctgtctagcagtccaaggaattctcctggttacccaagaccaccaatgtggtatctctatgagtctgcaagaatcacagcattacagggcatggagtgttccctaatgcaggtatggctgcagtgaccagaattagatcacacactcaattctctttgaatacttggaaatctttcccaagaaggacatgtacaaacaagcccaggcaaggaagactacaataaatactcaactcttcaatgcccagacaacaatgaacatccacaggcatcaagaccatccaggaaaacatgaccttaccaaacaatcaaataaggcaccggtgaccaatctcagagagacagagatatatgactgtattagtccattttcacactgttgataaagacatacctgagactgggaaatttacaaaagaaagaggtttaatggactcacagttccatgtgggtggggaggcctcacaatcatggcagaaagtgaaagcacgtctcacatggcagcagacaaaagaagagaacttgtgcagggaaactcccctttataaaaccaccagttctcatgagacttattcactattacaagaattgcatgggaaagatccgcccccgtgattaattatctcctaccaggtctctcccacaatttgtgggaattatgggagctacaattcaagatgagatttgggtggggacacagccaaaccacatcagtgaccttaaagaaagaatggaaaatagctattttgaggaagctcaatgaaattcaagataacacagagaaggaattcagaattctatcagataaatgtaacaaagaaattgaaataatttttaaaaatcaagtaaaaattctggagctgaaaaattcaattgaaatactgaagaatacatcagtctgtcaacagcaaaattgatcaagcaaaagaaacaattagtaagcttgaagacaggctatttgaaaacacacagtcagaggagacaaaagaataaaacaatcaaaaagaataaaacatgactacaagatctagaaaatggcctaaaaagggcaaatctaatagtaaatggccttaaagaggaggtagagagagatcagggtagaagacttattcaaaggcataataacagagaacttcccaaacctagagaaagacatcaatattccagtacaacaaggttatagaacaccaggcaaatttaactcaaaaaagacaacctcaagatatctgaggtacctaaaagcaggaagagaaaagaaacaaacaacatataatggagcttcactaggtttggcagctgacttctgagtggaaactttacaggccagtagagagtagcatgatacatttaaagtgctgaaggaaaaagcttttatcctaaaatagaataaccagcaaaaatatccttcaaacatgaaggagaaatrtagactttcccagacaaacaaaagtggacggatttaataaatgtcacacttgtcctacaagggaaaaaaaaaggaattaaaaarttaatttaaaaattaaaaaaaaattaatgagcagtaagaaatatctgaagcctcaaaattcactggtaatagtaagtatacagaaaaagacagaatgtcataacatttatttgtagtatgtaaactacttataacttgagtataaagattaaagatgactgaacaaaaataataactacaacagcttctcaagacatagatagtacaataagatataagcagtaacaacaaaaagtgaaaaagtgggtggacaaagttagagtgtagagtttttattagttttctctttatttacacaatcagtattaagttgtcatcagtttaaaataacgagttataaggcattatatgcaagcctcatggtaacctcgaaccaaaaaatccaaatatacagcaaatgaaaagcaagaaattaaaacacaccacctgagaaaatcactttcactaaaggaagacagaaagtaaggcaagaagaaagagaagaccataaagcaacctaaaaacaaacaacaaaatggcaagaataattccttactcatcaataacatggaatgtaaatggactaaactttccagtcaaaagacagagtagcaaaatggatttttaaaaatgagactcaatgatctgttgtcttcaagaaacacacttcacatatgaagatacacagactgaaaataaagggacagaaaaaaatattccatgccaaatgaaacaaacaaacaaaagaaaaaccaggagtcactataattatatcagacaaaatagacttcaagacaaaaactataagaagagactaagaagactgctatacaatgataaaagggtcaattcagcaagagcatataacaattttaaatatatatgcacccaatactagagcacccaaatatataaaagcaaatatttttgagcaaaagagagagataaaccccaatacaataatagctggagacttcaacattggacagatcacccagacagaaaatcaacgaagaaatattggacatggctgggtgcggtggctcatgcctgtaatcccagcactttgggaggctgagatgggcagatcacctgaggttgggagtttgaaactagtctgaccaacatggagaaaccccatctctactaaaaatacaaaaattagctggtcatggtggtgcacgcctgtaatcccaactacttgggaggctgaggcaggagaatcgcttgaacctgggaggcggaggttgcagtgagccaagattgcgccattgcactccagcctaggtaataagagcaaaacttcatctcaaaaaaaaagaaaaagaaaaaaagaaatgttggacttaatctgcactacagaccaaactgacctgccggtatttacagaacatgtgatccaacggctgcagaatacacattcttctcagcacatggatcattctcaaggagagaccatatattaggccacaaaacaagtcttaaaaaattcaaaaawaaawaaaaaaaaaaaagaaatgatgtcaagtatcttctgtgaccacaatggaataaaactagaaatcagtaactggaggaattttggaaactacacaaatacatggaaactaaacaataggctcctgaatgaccagtgagtcaatgaagaaattaagaagaaaactgaaaaatttattgaaacaaatgaaaatggaaacacaccaatcctataggatatagcraaaacagtataataaaagaaaagtctatagccataaaagcctacatcaaaaaagtagaaaaacttcaaataacctaacaatgtatcttggaaaactagaaatrcaggagcaaaccaaacccaaaattagtmcaagaaaagagataataaacatcagagcagaaacaaataaaatttaaattaaacatgcaaaggataggctgggcgcagtggctcacgcctgtaatcccagcactttgggaggctgaggccagcggatcacaaggtcaggagatcgagaccatcctggccaatatggtgaaaccccatctctactaaaaatgcaaaaaattagctgggcatggtggcacgtgcctgtagtcccagctgcttgggaggctgaggcagaagaacagcttaaatctgggaggcagaggttgcagtgagccaagatcatgccactgcactccagcctgggcaacagagcaagcctctgtctcaaaaaaaagaaaaaaaactacaaaaattagctgagtgtggtggcacatgcctgaaatcccagctactcaggaggcagaggcaggagaattgcttgatccctggaaggggagattgcagtgagctgaggtcgtgccactgcactccagtctggcaacagagtgagactccatctcaaaaaaaaaaaaaaggaaaagattaatgaaatgaaaagttagttttttgcaaagataaaattgacaaacctttactccaactaagaaaaaggaagattcaaataaataaaatcagagatgaaaaaggagacgttagaactgttaccacagaaatacaaaggatcattagaagctaccatgagaaactatatgccaacacatcggaacaccaagaagaaacggagaaattcttaaacacacacaacctctcaagattgaactacgaagaaatagaaaatgtgaacaaaccaataacaagtaacgagattgacaccataacaaaaagtcttcagcaaagaaaagcctgggccctgatcgcttgcctgctgaatttgaccaaacatttatagaagaactaataccaatcctactgaaaccattctgaaaaatagaggaggagggaatatttccaaacttgttctacaaggccactattaccctgataccaaaaccagagaagacacatcaaaaaaaaagaaaactacaggccaatatccttgacaaatgttgatgcaaaaatcctcaataaaatagtagcaagccaaactcaacaacacattataaagatcattcatcatgaccaagcgggatttatgccagggatgccagcatggttaaacacatgcatatcagtcaatgtgatgcatcatatcaacagaaggtaaaacaaaaaccatgtgatcacttcaattgatgctgaaaaagaattttataaaattcaacatcccttcatgatgaaaaccctccaaatgatgaggatagctgggcacagtggtgcatgcctgtagtcccagctactcaggacactgaggcaagagaatggctcgagcccaggcgytctgggttgtaatgcactatactgactgggtatctgcactaagttcagcatcaatatggtaatctcccaggagcggggaaccaccaggttgcctaaggaagagtgaactggctcaggtcagaaaaagagccagtcaaaactcctgtgtcgatcagcagggagatcgcgcctgtgaatagccactgcactacgatccgttgtctacaacaagcacacttcacatatgatgatacatagactgaaaataaagggacagaaaaaaatattccatgtcaaatgaaacaaaccaacaaacaaaaaacaggagtcactatacttatatcagacaaaatagacttcaagacaaaaactatacagcctggcaacaaagtgagactccatatttaaaatcactaacaaaataaaaataaacttttttaaaaaaacactgagtatagaaggaacatacctcaacacaatgaaagccatatatgacagacctacagctagtatcatacttgtgttagtccgtttttgtacgactataaagaaatatctgagactgagtaattcataaagaaaagaactttaattggctcatggtgctgtacaggacacatgacgctggcattttcttgtcttatggggaggctttaggaaacttaaaatcatggcagaaggcaacgggggaacaagcacttcacattgtcagagcaggagaaagagagagaggcagggaggtaccacaaacttttaaacaaccagatctcatgagaactcactcactgtcatgagaccatcaccaaggggaaatccacccccatgatccagtcatctcccaccaggccccacctccaacactggggattagaattagacacaagatttgggcagggacacagatccaacccatatcaatactgaatcggaaaaactggaagcctttcctctaagatctgaaacaaggcaaggatacacactttcacctctgttatccaacacagtagtggaaaacctacctagagcaactggatacaagagagaaatgaaaagtactcaaactggaaaggaaaaaattacattatccttgtttgcagatgatatgagcttatacttgaaaaaaaaaacctaaagactccaacagaaacctattagaattgatcaacaaattcattaaagttgcaggacacaaaatcaacatacaaaaatcagtagcgcttctgtatgtcaaaagtgaacaatgtgaaaaagaaataaaaaaagtaatccaatttacaacagctacaaataaaataatatatataagaataaacttaaccaaagaagggaaagacccctacaatgaaaactataaaacactgatggaggaaattgaagaggatgctaaaaaatggaaagatattccatatttatggattggaacaatcaatgctgttaaaatgtccatactaccacaaacaatctacagattaaatgcaatccctatcaaaatattaatgacattctttacagaaatagaaaaataatcctaaaatttatatgaaaccacaaagacccagaatagccaaagccatcttgagcaaaaagaacaaaactgaaccaatcatattacctgacttcaaattatactatagagctatgtaaccaaaacagcatagtactagcataacagatacatagaccaatggaacagaatagagaacccagaaacaaatccatacacctacagtgaactcattcttgacaaatgtgtcaagaccatacattggggaaaggagagtttcttcaataaatggtgctgggaaaactggatatccataagcagaagaatgaaagtagaccctatctcttgccatatacaaaaatcaaatcaaaatggattaagaattaaatctaagacctcaaactatgaaactactaaaagaaagcattggaaaaactctccaagacattggtcaggacaaatatttcttaagtaattccccacaagcataggcaaccaaagcaaaaatgggacaaataggatcacattgagttaaaaagcttcttgggcagcaaaggaaattgtcaatgaagtgaagagacaacccacagaatgggaaaaaatatttgcaaatcatccatctgacaagggattgataaaatatatgaatttaaacaactcagtaggaaaaagcctaataatctgattatacaatgcatgaaagatctgaatagaaatttctcaaaagaagagatacaaatggcacacaggtatatgaaaaggtactcaacatcactgatgactagagaaatgcaaatcaaaactataatgaggtatcacctcaccccaattaaaatggcttttatccaaaagataggcaataacaaataccagcaagtaagtgaagaaaagggaacccttgtacactgtgggtggaaatgtaaattagtataaccactatagagaactatatggagttcctcaaaaaaagaagaaaaaaaaataactagaacaaccatatgacacaccaatcctaggtataggctaggtatatgcccggtatatgcccaacagaaagaaaatccatatattgaagagaggtctgtgctaccatgtttattgaagcactattcacaatagctaagattcggaggcaacctaagtgttcatcaacagacaaatggataatgttgtacacacacacaatagagtactgttcagccataaaaaagaatgaatgaagttctgtcatttgcaacaacatggatggaactacagcacattatttaaactgaaataagccatgcatagaaagacaaacttcacatgttttcactcatttctaaaagctaaaaattaaaacaatagaattcacaaagagagactagaaggatggttaccagaggtgggaagggtagtgagaattggggaagggaatggttaatgggtacaaaaacatagatagaatgaagatctagtatttgatagcataacaaggtgactatagtcaacaatttattgttcatttttaagtaactaaaagtataattggaacgttcataatgcaaagaaatgataaatgcttagggtgatagatatggcattcaccctgttgtgattattacatattctatgcctgtatcaaagtatctcatgtaccccataaatatatactgaccatgtacccatacaaattaaggataaaaatttattttattttattttatttttaataaataaaagaggttttattttggctcatggttctgcaggctgtacaggaagcatagtaccaacatctgcttctggtgatgctgggaccaaaaattaattttaaaagataatatgttgtattaaataagttctaatcagtgaaggcaaggctgaaatagctctacattcagaccaatatattttgaagaattgggaatatgcaccatcagttaaacttatcttatagttttagtgaagatccagaaacttacacgcagtgagaaagaatatgtttacctggaaaggcaggctttagtaacagcactgtgaagattttcattaggatactgtgacagccgacgagaaattcgcaacagttgtcyggtagaaagtgatgccgctaatgaytgtgcctatcaaaagacaaatacattgtgttaagagtcttgtttcaacttgctaaagtccctttagatggatatcacagcagaattcattattactgaaggggtaaggccaaacttaaagtatgtgctrttaattaattacaaatcaaaataaacagaaaccaatttacacttaaaacatccttgaagatagtttttaaaaaatctaaagtatttatcaattaaatttaattaatgtattttaattgtgctaagttggagatgggaggggcaatgggggaaggatgttacataacaaaggtcacactggacttaggctgtatgattgactgttcactttttctccttacacaaagccaaggtgttaagataccacggaaatgtttaaagctttaagcaaatcggtggtttctaaaatagccaaaaagagttgtaaacaatttaggctgttggccacagaggtgtcaaccaatttgtcacttgtgctgcagcttgctgttttgaatccttcccctatgctgtcagaatactttcactttgctatattacatttcccaaaattccacgaatagagttgctagtacagaactcaggacatggtcagtactcaataaatatttgttgaaattcttttggcaggcagcataacataatggtaaagtttataggcttttgaatcagataagtcggtatcctatttattagctgtgttaccttggcaaattacttaacctttccaaggctcagttccctcaactttaaaatggcaatagtaatgccctcacctttaaggttgttatgaaggttaaattagaaaatgattctaaagtgcttagcacatgtcacacacatatgggtgctcaacgaatggcaacaactgttatttaaaaatcagcctcttcaaaatgaaaacaaaaaacccagcagagaaaggtgatgggacctacatattagcatatatttagtaaatgagattattactggcctaattcctaacttagatcagcagcattagaagacagtgattatcactgaaaaccacaggacagaagcacttttgaagcaactggacctttgggagggcaaggcaggtcagtatgaaatgtcacagagggtgataagggcagtaaagtggccctgagaactcaagggcctagaaaagaggactctatgaaattaacaaagggttcagaatggatgaggggagaatgtcaaagacacactgcacatttgcttgttttaatgttccacctaaggtcatctccgtatgtcccaaagaagaaaaaaataatttatttatccttccttgtgtatttcacatctccataagatattggtttgctgttagtattctatctcagctacaacattagtattatatttcctttgggaattaggttggaagcatgaccaccacatatcctttcttctattaaaaaacacattctaagtttcaaagaactcaattacaagcagacattggtccattcttgttttcaattaatttgcattccagatatggagacaatattcaaatataataaatcataaattacaattcaaaatagtatatacttcaatgctaaaataagtggaacagtagacagctgttataggcagttaaaatattcaaatgggcatgagaaatcctctcatcaaaggcatgaaagcaaaagtaatggaaccacaagtagaacatgaggaaatgagaccagctttactagaaggtcctgctggaaggcttgctctcaaacaacaaagacctatgaatgacactctgacgggtttggctttattcttaaaggcactaggattctgctatgtgtaaagtcgtaacatgattttcaaatcaggttattactagcctacttcctaatttaaatcagcagcagcatagaaagtggatgaaggacagagagaactgagacaggaaacagaaagctacttcaataatctgcctataaaaggaaaaagtcctacagtaaggttatggcaacaagaatggagaggtaggatacaacaaacttggcaactgacttgctatgagaaagaaacatgtattgaggataaaattcaggcaatgtgactgatatcaaaagtcaaatataactcagaaattcccatttttaatacctaggaccatgaaaaattcatattttaatcataaaaaatatttgacaaatgactctaaccagaggattcttataagagtcctgttaaaccatagggtataacattctaatctcattctaagcatgacactgaattcaggcttcacatttcattccagtcatcaataaggaatgctcatatatttgaacaccaattctccagttcttctagttgaaagcaccaaaatgctttgcagtaataaccagggttgagaaaatgagagataagctttgtgttgagccatttaagtgttgaataaagggtttggtaatctctgctctcacattattatcaattaaaaattgagagtatactttaaaaattcctaatktatttaacatttatatcaaatttctaactgcagttttatcttgcaaaaaaaaaggggggcggtgaagayatgaagcacattcccctagttaccatggttatacagtttaagagtacacctcgaaggggttgttcatattaacatgattagtaatacttcagcttaaaaacataaaggttctcatcagaaattattaaacattatttttctattcttcatttttataaaagaatgaaaatgtagcatgttctaaaggagagaaaactctagggacaatctgttaataaaattttaattaatcaatttattcattaattcaccaaagatttaagtgtctattatgtgccaggccgcaggctgggaaatgggacttagtctcaaggagctcaaatagcaactggggaaataaaagtaaattataatacaactgcaataggtcaacaatatataatacaacttgcaaatatatgtcaagtgtcatgaaagcagattggagatattagttactgctgcctaarggggctgagagagacttaagagaagagagaaactaagggacaactggatgtagggaaagcacattctaggcattatctaaggcagagacatttgagtataagcggtattagaaaatagcaagaagctaagtgtgggaagagctgaggatgcttcaagagagtttgtagaaactgaggcctgatgagcagcttagggtcagagggaactcagcaggcatgtttagcaggctgtcttcagtctacaggcaaagagagtcaatcccttaacggttttaaacaaggggaagaacttaggaaatggatttgggaaagatcattccagggacaatatggaagattcatccatccatttatttaacagatacttgtggaatacattactaatctctaactttgttctctgtagtattgccaacatttgcaactttgcacagtaggaacactgtgcaaatcaggaatagctactgtgcaaagttccagatgctggggagactacagggaacaaagaaaaaacccctgcaatcctggaactgaaatccgagagaaggaagatagacaacaaaaaattagtgagtaaaacatacattatgtcaaagagtaagaagccctataaagaatcttaaagcagaaagagggatagaaataaaatggaatagaaatttgactctagagagcttcaggaaggcctcacagaaaaggtgaccacctgagcaaatcccaaaaaggaaagtgagtaaacatgcagctatccagggaagaataatctaggtagaggaaaacaccaagtggcaaaggccctgaggcaggcactagtaagttcaaggaaaaacaaagacaccactgtagctaaaaacaatgggtaaaggagaaagtatttggaatgaggccccagagggggattaagtatttggaatgaggccccagaggggacctgtgacagccagaaagtgaccacccttatccycccaaaaatccacatcctaatctctggaaactgtcaatgttactttctatggcaaaattgactttgcaaataagattaagataaggattttgagatgtggagattatgttgcactatgtgtgtggaccctaaatgtaatcctccttgtaggagggagaaagagggagatttgacacaaacacaggggagaaggtaatgtaaagatgaaggcaggattgatatggtgagtccactagtcaaggaatgctggcagccaccaaaacccagaaggggcaaggaatagattctcccctggagcctccgatggagtgcagccttgctgacactttgattctggctcagtcatactgatttcagacttttgttgtccagacaaagaaaaaataaatttctattatcttaagccatcaatttatggtaacttgttacaatagcaacaggaaattactagagagtcatatgatgaatgaattattggtaaagaaggcagtcaagaggatataatattccaggagaaagattatgaaatccactactaggacagttactgacaatagataagagaacagatgagacatcaagatgcttaactggtgagatttgttttcagattaagtaaagacagcaggaaagcaaggaatcaacaatgatgtctaggtttctaatttaggtaatttggcagctagattatcaacaaagtcaagaaattaaatcaagaataggaacagatttaaaatggaaagacagtttagttgtacaagatatgtgaatttacaatgatctcggtgtatccagggggaaagtgaaagaaattaacatttagtaagcagttactaagaaggagattctttacacacatttttatgtttaatcattgagaccattttatgcggtagatggtactgttcccgttcccattttacagatgagaacactgagacttacagagttaaacagtgacagccctctatctttctaacatgccatctgggaatggaaatacaagtcaatcagaaatgagaagttagaagstgaacataaagatgtaggcattaacttgtgataggtacttgaagccataagaatagataacactgctcagcataggagacagaggggacagagcagaacccccatgaacatgaagtactctggagctacaagtttctttctataacatcagcgaggaggagctggaagagatgttaaaatcactgaaatcggagtaaaccatatgcatagaacaaaggcatagcataagggattccaaaaaataaaataccascttaaaaaatagattttaagyactgaattctaagaaaagaaaaccagcagcatgtcaacaatagaaaatcctgtggaaaaagcctagacttaccgttggatcctgtgtttctctgagtttgtgtgtaaatgataataacttatccagagcttcctgaggtacatttgggacctattttttgaaagagttgaggacaaacagaaggaataaatcgggatatctgatcaatcaatcagaaattatgactacttagcaaataatattagaattacatttttagaaaagtcattcattgttggctaaatgtttaacttatggataaagttgcttattcaacctcttaggaaacactgaaacccctgctttctctttaagaatcaggtaacttaaaccaagacactcttctccatatacaattctatcaccacgataaaactgaagggagcctttaactcaatttaaaactggcccatagtgtacccataaagaacttttcatgtatcatcatttcctattttgttagcttcagcatgacattttaagtactaattaggtgttgtcttactgaaaccaagttcccttatttagcagcaatcttacatacatatctaagtgacataaggtacatttatttacagaatggatacttaaggtgtccatttttccaaaaacatgtaaaacacatatttgaggggtatgatcaacatatcaatgaactcggaagagcaattgcccaaataacacatatcgattgcttttaactataacaaacttcaattaagtacttaattaagctataagcaatttttgtttaagcaataacaaatttaaggttttaattttaaaagatcaaaaaaagatactaaaacaatgactaggacagtgtcacaattttagaagaatactgcttagggtttcattggtcatttaagtaattagaatttttttaaatgctaagtcctagtccacatatactttgtttcatttattctttaaatcaatcctatgatgtaataaatagtattatccccatttttagatgaggaaactatgactgagtaatttactcaagatctggaagctaataagtagtggatttcacattgagagccaagtcattaaactctaaaacctatgcctttatttacaaccatgcttacaagacctacaattaataagttcattcagatgtttcaaagggaataaatgtatttaaatagaaagttaataattagtgatctagaacagtactgtccaatagaaccttctatgatgatgagcattgtatatatgctgtttaatgtggtagccaaaagctcccatgtggatactgagtacttgaaaagtgactgagaagcggaatttttttttttttcgagacggagtctcactctgtcactcaggctggagtgcagtggtgtgatctcggctcactgcaacctccatctcccaggttcaagcagttctcctgtgtcaccctcctgagtagctgggaatacaggtgtgcaccaataagcccagctagttttttgtattttaatagagacgaggtttcaccatgttggccagcctggtctcgaactcctgacctcaggtgatctgcccgccttggcctcccaaagtgctgggattacaggcatgagccaccgcacctggccgaatttttaaaaaattaatttaacatggtcaggtgtggtggctcatgcctgtaatcccagcactttgggaggccaagggggggtggatcaattgaggccaggagttcaagaccagcctggccaacatggtgaaaccccgtctctactaaaaatagaaaaattagccaggtgtggtggtgcgcacctgtagtctcagctacttgagaggctgaggcaggagtcttgaacccaggaagcagaagtttcagtgagccgagatcacaccactccagcgtgggcaatagagcaagacttagtttcaaacaaataataataataatagtaataatttaacatggctagtgctactgcattgaagcgtgcagttctaaaactccaaaagtgctaaccacaatgcttaaggcacacattaaaacaatggatcacacacactagttgtcatcaaaggactaatcaggcaagtacaggatatgttacagtcttgagagaccaggactacttactatttacgtgtctggcctccttttatagtaggaacttaaaatagtcacttttcactaaacagaaaaataaaaaggattcgaaaatggcctccacctgaggaaagaggagagacaggccacattcatggttcttagagtgtggttcccagaccagcagcatcagtatcacctgagaacttgttagaaatacaaattttaatatagcatcccagatctactagctcaaaaactatggagatggagcccagaaacctgttttaccaagtcctccagatgatgctgaaaaatgtgaaagtttaagatccactgaccttcaccactgtatgaagaaatttgggagtaaatgggaagaaaaaactaaaaatgtctaactctactttggcatgtatcagagtgccttaaaaagagatcagctttttaagaaaatagactaasattggctttcttcttaccttttccttaatcacttggatttcttcacttttcacaagtggtttcatgtaatggaaaaagaacatggttaagaattctggtcccagccactggtgtgctgtgcttccaataacagggggttctgccaaggcaatgattctgaaggagggatggataggaaaaatggatctaaaataggaaaaaaaatgaaaaaaaataacatatctttcatgtaagaaatcagatcatggtaactaaagtctaggcaacgttagggctatcatrctgttaataatgtcaatgttatcatccaaaggattagctttgaaaaaaacaaagtcaggacattctaagaacctaagatcaaaacaaacaatcacctactaccactgctagtaaatgctgtacaataaccactcatgaaactccagccctgacacgaaccactgcttttgatatactgttatgcctacaacatattttctccatagtgtcttgaaataaaatcccatccagttcacattcattatatagaccatctttattcatttaaaacccctcagaatctcctgtctcacaaggaacccactctatgtcaatcaaaaagaccaagaggcacaattcaggataaggagactttacagtacagaaaatgtaagaaacataaagggttagattgaatttaaaatttagattgggaataagaacacttaagtcttaaaaaggcagagaaaataaaacctttatagaatgcattctttggtcattcttataggaaatgttatgattttaaagtgatctctcttaaaactctctggtagggaaactgaggaagcatgtaaattttctagtacacacagaggagtaagataagacttcctttggtttgtgaaatgacttgaattatttttggaaaacctagaaaccctgtatcagaatcttaatcatgtggataatattgtccrtttttatcaattctactaaaaaacccagcagaaatatgctttttgagggtaatatagttcttgctaagagaaaggagagataaaacataaacacttgccaagagcttcagaaaaacaaaaatataggtacataactgccatttcaccattaactataacattatattacaacccaaaagttaagtgactaagcaactagaataccaggaggtaggacacaagtggaaagaatcagatgagtactctgaagagttaagaccaagtgccatcaatacaacaggcaggtctaccaagtccctgacggcatgatctgtaattttaaaggccacatcatcatttgaaaacaaggggaaaccaatttttagaaactggtcacatgaaaggcctagatgaaatgaattcacaaatactaccagatgtcatttcatttctctaggtagaaagaaaaagacttatttgcaggtgttttagcagggcctgggggagtgatctgtccaagagttgttctggaaaaagagggaaggataacaacatggacagtgcctgaaagtccagaggatagcacaattacttaagattgctagtaattagatagccacgtgacagaaactggacacagaaaatcctgtgagggaaagccaaagagggaggttattccattttccacttctgctaagtggtttgctataatccagaaaactgccataaagcccagcaacagatgttggatgtatccttgatcctcttctctcctagttaggacaaaaaaaggtaggagagaaagagcctggtttgrctacccaaaattaaagctgcagatgtagtttctcacttaagatagtgaaggataccaaatcagggaataaacaaagtcaaaatacaacaggcaagccaaaaggggaagtctaatttatatccttaaaccagtagatcaggaagccaggtaccacagtggagctgtaaaattagaactaaaagaacaactaaaatgagagcatgctaaatggtttacatttaaaggtgatgataatttactggcccatatattgtcaatagtttgctttttagtattgactccagcagcgttcttaagtaagctggccaaatttgaagaaggcagtttctaagacagctgatatgttaggcagagaaatgtataatgattataaaaacagtcaccgaactactgaataacaggatgagaagggcctttttgtttgctaggttctccctaaagscttccttacatacaaataggttacatgggaagtcatttcctgatgatgctagctaggttccacaagccagaaagttagagagcagaggatctgctgtgtacttaaggtgatctgataaactggtgggtaatacaaagaccaaagaagtgatagataatgaaaaaattatgagataagtgccattaaaatttaaaattaaggttaggtttaattttactaaaattttagcaacaagaaaaaaataaatgaaactacagatacggcttaatttcagacaaaaagatattatttcctaaagattacagatttagagagcaaaaagatcatttaaaacaatttttaaaataaaaatattgaagtcactatgtttgtctgtgggcataagtgtgagtttttataaagtactttctgatgcttctcaccagtaaaaaggaacaaactatcaatgtacgtaacaacatggatgatctcaaaacacttaagctatgtgaaagaagccagacaaaaaagagcacacactgtgtgattccgtttatataaaactctagaaaatatgagctctatataatgaccagaagcagagccctggggatgagagaggagggtaaaaggtgcaggagttggggatgtcaacgggtctgaggatactttgaggattatagatagattcattatcttgatattggtgatggtttcatgggtatttataaatattaaaaattatcaaactgtgcattttaaatatgcatagtttattatatgtcaatcatacctcaacagagcttttaataaaacaaaaaaagacttcaaaaatctccagtttttaaagggaatcctatggtacattttcattgaatttgtacattggggaacttgaaagaataatatggaaggattctataaatacatcaatcatgagctagaacagatttcatcattagttttccatactacaatactaatgttccaatttagaacccagagttatacagttctgtacacagaccatatttcccctttttcctatgcagtgtagcaaactgcatgaacacattccttatgcatctttttatcacccaggktctagtgtaatacttggggaagaaagcagacgctaaataagtaagtgtatacggctattgttaatgaccatcattgctattaactttttgaagatctttggtgggaaggacaaacaaaggtaagtaataagaactgaacttatggtgtcccagccaaaagctagtcaaacttggtcctgaataaatatgtaagaagaggtacactctctgaatcaaaaagacaaactcaaaacatacaataataaatgattacatcacttataaagtactttctgatgcttctcaccagtaaaagggaacaaactatcaatgtacataacaacatggatgatctcaaaacacttaagctatgtgaaagaaaccagacaaaaaagagcacacactatgtgattccatttatataaaactctagaaaatatgagctctatataatgaccagaagcagaaccctggggatgagagaggagggtaaaaggggcaggagtcggggatgacaaggcaaagggtttcaaatggttccttgaccataaaaatgttcagaaaaaattattttcaaaatcagaatttccttaaggctttttgttttgaaaatcaaacacaaagacttgggcataaaatcctggatctatctagaatttttttaaaaaatttatatggtctgatttgcttgcaaagaaataccaagatttctaggaagctaggagatagtgcttggatcctgtcttcaaatacgggtaagagttaaagggttgagataatataaccgatcaaggattgtgctcaaatgtccagttatgttcaccgctaagattgagagattataaactgttttcagtgttcaatagcaacaaatataaataaaatatttaataaaaaatgcaaaaacactggagcatatataagtacatctaagactaggccactaatctttattgtttccccaagataaccagaagccctttcttggcaatataaactgttaataacagaaactctcaactccctcatttatggtctggccaacagcaggaaaagacatatttagcatcctatagtatttatactccccctttccctaaagaagtttttctcatcaaaggaaggagttctattttggtctctatttcctgagggaaatacaggcatagtatctggtgtatgtggccatcacactatttctaaccaccacgtccacagcattcctggtgtcttgtaatatgagaaaagaagactccaacccttctaagggtatgttaggcatgtgattacctgcagagaatataaaagcctgtagagcactccggagatcatcgagatgtatagtcttggtgaagaattactatacaatgaaggttggcaaagaagccaaatataattgtttagaaaccgggtttcacactataaagttgaaagggttggtagcccactgctagaagctgttaattatgagaccctcagttaatagactttgtcattaaaaggcatcaaagtattcctaattactaggttcacataaggaaacactgctagctcagaaggtcaactaaaactggattaatagagttacccttacctgagtttcctctctgaaagcaggacaggtatctaaatttaccaaytgggtctagaagcaaagaagctcttaaatctgtcttggtcttggaaagggctagaggaatgtcagagaaggtttcacagaggacatcacttttgaaggaatagcagaagtttgctgtgctggtcctgagaggtgaaagatgaggctggcaaggcaggcatgtgtagatactggccctaaacactgtaggcgatggaaaccactgaaggacttaaacagtgatgtgatcaaatttacagattagacactttaaacttctagcctatgtgtgcggagaggaaggggtttcattcactaacttaaggtaacttaagaggaatagcaggtttgtagaaatgagttcaaagtttctctaagacacctaaggagagatatctagtagtcagatggcacttaggagacaaaactagattggaaagtggttttaaagaatgctcagtatattggatgggtgcagtgtctcatgcctgtaatcccagcattttaggagggtgaggagggaggactgcttgaggctaggagttcaagagcagcctgggcaacatagagagaccaccatctctacaaaaataaatttttaattagtctagtgtggtggtgtgcacctgtagttccagctattcaaaaggaaagcttgagcccaggagtttgaggttgcagtgaactatgatagcactactgcacctcagcctgggtgaaagatgagaccctatcgaaaagaaaaagaaacagaaaaagaaaaaaaaaagaaaagaagggaaggggagaggagggaaggggaccggaggggaggggaggggatatactgagaatgctcagtatatcaatgacagataaggatataagagtgactgacattgcccaaggaaaagaaaaggccaaggagaaaaccctgggagctaccaatttaaacaatatctgaaaccttttccaacctctcaaggcacagttactagtcaattcatcttctgtgttcccacagcattttatacagacctgcagtctaacactaaaaaactgcattgtgtttatttatttacatatctgtcttcatgtgtggtacaccacagatggcaacaagtgtgtcatcttagagctggccctcaataaacatttaacctgaaggaaagaatgaagtaatgctaacactcaataacaaatacttatactcgccaaatcagttatctccaatcatcagtctatagatargatcatctgggtactattctgggagcctagagagtgaatgactccatggattaccgttataacattcatgttcaaaaacaccatccaattgctayagttggaacaagagctttaaagccaactctcaggaggcattattctacaaattagtagaagttgtcctaggagtactgattccctggaggtagatttatttatttgtacaagactgtagaagctgttctttctgttaggcagctgcaagtgataccccccgagcatcgaccatccccagcctccagaactcttcctcttaaaaaagcaaaacaaaaaccttccctgtctttctacctttgacctttttctctctctcaaaatcttccacaaaaaagcttaatataagtaaataaaataaaagctgagtttctttaaagactattagaaataatcactttgctaaaattcagttctgtgattaagtacagaaatgaaaggacagacaatgtgggtcataagtttctaatgtggagttcaaatgctactgccaaaagtgatgtattagctatgaccagcatataggatcaacacatgctagataatgggtcatattacttataagaacaactcatgaaataaagtaatttcctcattcagtacaaatttgctgcttttacactgtgctgtgtctttttagtcaagctgtcagtcttctactcaataaacacagtcctgaaagaagtactgccaagcagcttaagagaagaatctaacctattataaccctaaaaaagaacatatttattttcagaaagacaaaaataagttacaacattaaattaaggctaagtaaaggtaaaaaaatttaccaacaatccatactatcagagtgaagcagattctgtaacatgactgtgtttaacaacaaaattaagaaaatggtgtggttctcaggtaaaaagaaaaattacagataaggaaagggattaggctttcaactgttagaaatattcagacaacaaagaagaatcattgttaggacatctcacctctgaaaagttaaggacagaccaagatcctgacagaacataatagagaaaataaaataaaattagaagttcagcccaggaggctcaacatacatctaaataataaaaggtacaagaaaaaagaccagaggaaactgagtaagtgggagtggagagatctaagatgatgtaggagctacaagaataaagagccacaagcccagattagagttcatcagaatataccatgggagaaacatgaaactgacagaagggccaggagtggtggctcacacctatattgccagcactttgggaggccaaggcaggaggatcccttgaggccagcagtttaagacatgcctcagcaacacagtgagactgctccaaaaaaaaatgggaaaaacaaaacaaaacgggtgtggcgatgcgcaactgtagtctcagctactcgggaggctaaggcgggaggatggtttgagctcaggagttcaaggctgcagtgagccgagattgtgccactgcactccagtctggttgctagaacaagaccctatctcaaaaaaagataaaaaaagaaaaaaagaaattgatagaagatggaattgataaatatcatgtgtgcctgaatgtactgaggggagatttagacagtaagggaagtgtttgggattaaaaataaggcaatatatacatagaaacagtcactttctcctcaatgctcccatacagtattatacagacctttagtctaacatttaaaattacattgtaattacttatttacatatctgtctctcttcatatgtaagtaattattaacttgaggaaaaaacaagatatatgcaagaaaggaaaatgagtgttgtatagtaaactgcttaagtgggtacagctcttaggttatcataataatgtaagcattgaataaagttctaaacaaaattattatataactctttaggaagaataagggatagaagtgtgcatgtgtaatgagacaagaggtggtgaaagagctaaacattaattttccatgtagaaatcaacagattattcctaacactaaaaataaatcaaatatcaatgaaagtatactgtttagtgacatagaagtaaataccaaaagaaaaacctgaagtttgaaagtagtagcctctggggagtaagatgtgggaaatgggagactgtcaactgatcaatctatgacaggggatggtatttttcataaaatactttgaaaaactatctggctctagtttcgtgcatgtttaacagtggtaaaatttcaaatgaaaatttttaaaaagtaagtgaaggaaagaaagcattgctatgatctctctccactttctcccagtgacctctggaaatagagctaagcctagtttgtatttatgagagtgacataaatccatagtgatgaaggtggaaaactttgagaagaaagtactattaaccactctgagccaaattcctgaaagtattttcatttgtaaaactgcctgtgaccattagagaacttgggtacttttcatagaaaagggttgtcatttccttgacatttggagacaagtagaatgcttctgatgtcctaagagaaactgccaggcaggcatgctgtgaactattgcaaaattgctttgattcatccttctgaaaatataaactgttccatgacccgtgattcacatgcaaataatgtgccaaagccgactgctattaaccraagttatgatatgcgaaggatctctaacttgcctccctaaacactcaaccaaccatttaccagtctaaaagaatttgataatgtatacctcggaagtaaaagcagctgtgtaatcaagtgactttttagtgacttgtaaagagacaggaaggaatttaacatttcccctcttggaaaaaattccaagaaattttttaacaaatttcttcttaaaatataaacaataataaatacacttaattatcttttacgggatttaaatgttttaaatagggcagtaaaccctttgagtggtgatacagcttcaattaaacagagagattaagtgatgaggagttcctctgtatgccaatctctaattctgttaaaatatccatggaaatgtagcaagatagaaaataacatatttgtcaaacttcattctatatagtatgcagctgaaagaagtattttccttcaaactttttgttttgaaatttttttaactcacagaaaatgtcaaaaatagactacaaatatccatatatcattcacctagatattgctaactgttaagattttaccacatttgtgttctcactctgagaaagagagagaaaatgtctgtttatacacacacacatacatgtctttttttctgaaatatttggaagttgtagacttttttttactttatcccttaagtatctcaacatgcatctcataagaataggaatattctccttcataaccacaatatcattatcatacttaaggaaattagtaattcaataatatcatataacatagtccatatttaaacttttctaatttttttatagccgtttttattttgtttcctcctccaggattcagtcaagtctcaccattgcatttggttgttacatctccacaagaaatgtttaaataagctacaatgggtaatccgatatcagatggcatactccaacaatactgatgacctccttggaggatgagcccagttaattgtgggcccagctttagttttgttgagagaatacaaaatatgagatcaaaactgaattgacagggcaacagaggaaagattaccttcttaaaaccaatgttcttataaaacatttaaatgcttatttaaaagtaaggctgaaaagaaaaaccacaatgagataccaccttactcctgcaagaatggccataattaaaaagtcaaaaaataatacatgttggcatgcatgtggtgaaaaagtaacacttttacactgctggtggcaatgtaaattagtataaccactatggaaaacagtatggagagtccttaaagaactaaaagtagaactactgtttgatccagcaatcccactactgggtatctacccccaaaaaaagatgtcattatatgaaaaagatacatgcacattcatgtttatagcaacagaattcacaattgcaaagatatggaaccaacctaagtgcctataaccaacgagtggataaaggaaatgtgatacacacacacacacacacacacacacacacacatgcacacacacacacaccatggaatactactcagccataaaaaggaatgaaataatatcttttgcagcaacttggatggagctggaggccattattctaagtgaagtaactcaggaatggaaaaccaaatattgcatgtcatcacttacaagtgggagctaagctatgaggacacaaagcataagaatgatataatggacttttggaactcaggggcagggaagcttgtggggggcggtgagggataaaagactacatatcaggtacactgctcaggtgacaggtataccaaaatctcagaaatcgccactaaagaacttatccctgtaaccacaaaccatctgtgccccaaaaactattgaaataaaaaatttttttaaaaaaatcactgtcggccgggcacagtggctcacgcctgtaatcccagcactttgggaggccaaggcgggcggatcacgaggtcaggagatcgagaccatcctggctaacaaggtgaaaccctgtctctactaaaaaatacaaaaaattagctgggtgtggtggcrggcgcctgtgttcctggctacttgggaggctgaggcaggagaatggcatggacctgggaggcggagcttgcaatgagccgagattgcgccaccgcactccagcctgggtgacagagcgagactctgtctcaaaaaaaaaaaaaaaaatcactgtcatattaacaacaaaaaagcaaataaaacagttgattaggttttttttttwaaaaaaaaaaagtaaggctgagagtacagattacaccttggagagcaacctcaagttttaagaaatgccaaagtagtggcatatccaggacaccaaattattaaattgttcaaagttatcttggcattattctaggtttagaaaaatcataaaaagtattatttttaacttaacaataaattagcaatgggagtaatggaccccaaattacctcttctgtagctgttcatcagacagttgcagctcctcctttaaaygcatatacctgtcttctctcagcagcctagaaccatcatagaggcttagctctcgatcatggattaacctaacaagataagaaaaaagcccgaaaataaattaatgtgttttgaacactgaagttttcagaggcagaatcagtcagccaacagtctattattgctggcaattgagtctaataattttgttagatggacctttcaaaatttcaaattggctactgctgttacacttcgcawaactgttggtttctgtactggagggcagtagtcataaatatttgatagggatatgaaagagggggaggaggaggaaaaaagaaaagaggaggaggaaggagagcaaaagaaacagctgaatgagtatctcaagataaccacaaggtacatattaataaacaaggcaggtggcacttactctcttcggtctaaagtaactctgtaagggttggcataaaaatatttctatctttggaattacaagatttaaaaatacaaaaatcttataatgaaataactacattgctctacatatggcaactctgatggtgacctaaccatccacatcacacatagcatagtcttccagatgttgcaatggctgaaaagcactgttctatatctcacaccaacccctaagtctcctaatgcccacaatagagttagcctacatagcctccattctataagcactgaagggaggggatgctgtgtaatgcaggggataggagcatggccggtggaaccaatcagacctgggttcaactccagctgtgcaccttactagctgaatgagtggggagagggagaacgactctatctctctaaactctcgtcttccataacgttaaggcaacagtcacaacttcacaatattaatgtgaaaactaaacagctaatgtaaaatggatgcttatagctgttctcaatcttgactgtacgttagaatcttctgggaagtgtttaaaaatgccaatgttcagaccttggcctagaccaattatatcagaaaattctgatggtgaagcccaggcatgagttttttttttttttttttttttgagacagagtctccctctcgtcacccaggctgcagtgcagtggcgcgatctaggctcactgcaacctccgcctcctgggttcaagctattctcctgccttagcctcctgagtagctgggattacaggtgcatgcctccatgcccagataatttttgtacttttaatagagacggggtttcaccatgttgacgaggctggtctcaaacttctgacctcaggtgatccgcccacctcggtctcccaaaatgctgggactacaggtgtgagctactgcacctggcccgcatcagcattttttttttctttttttttgagacagagtctcgctctgtcaccaggctggagtgcagtggcgccatctcggctcactgcaacctccacctcccgggttcaagcaattctcctgcctcagcctcctgagtagctgggactacaggcacatgccaccactcccagtccatttttgtatttttagtagagaaaaggtttcaccatcttagccaggatgatctcaatctcttgacctcgtgatctgcccacctcggcctcccaaagcactgggatgataggcgtgagccactacacctggccggcatcagtattttttaattgccaccctgcaaggtgattccaaggttgagaacctgagaagcactggcttagcacaatgcacagagtaggtactcaattaatggtagtagctgcttctattattactacttgcaaacatgcaagagatagctaataaaatgggactattaccgtgtctgcagtggtctgggagaaaaaaatattgtaaatctatggaacgtttatggtaaatcactgaaagtttgtgactatttttaaatgttctaaaatctaatcaggattaacataacgtatttagaatttttaattacattcagtatctgcatcacatcaagaaaaaaaaaactctaagtggttagttggataatggcttattctacttatttaacctttcctaatgagtcacagttaaaaatcaaatgtctacaagttagagaaccaaaataaacagaaaatatcagtatcattaatctcctaaaatgatacaagatgggaatattttctacaaaagttacacacgaagagccttctcttaacattaaattctagagaagttttaggaatgtgtggaaatttttcccaactaaaccaaaataagaaaacaatagttatagaaatgttcaagtttataattaacaaagtgagcttttttagtctatataaaatataatttaaagctattatatattttacaaacaaaactacttttctctctctcaaaaaaaaaagattccaacaagaccaaccaataattaagatctatgattgataaggagtgtgtaaatactgaagctgtgactctgacaaattatagaaacttcagcaatgtgacatgctgcatatatagacctgtatatataaagtttttcaaacttactactgaagcactttctttttgcagtgcctacacacggaattctgctacaggagtggcttttcccaaaatgttcattatttggagttttactgcattgtgtttataacaataaaaaagtgccattctacttggtatagaatcatgatttttcaggatctacacaacccagtttaaaaaaaagaaaaagaatgagatagttcyatctttactgcttaagtcagagtggggtgtgtgtctgtgtgtgatttttgtgactcatacccacctttgcaatacagcaagcgtgcccgcattcacccggtgaatgccatccagcaggaccagcttgccttccagagcagcattcacaaggggtgaggaccgccaggcagtgtctccatttggaagggtgtatctctgctgtagcagatcacgcgctgtcatatcctaaaacaaatccccaccacccaacaaagaacatgacgaattaatttttaagacatgcaaggtagcttacrtggctttatagagtcacctcygtctgaacttaacattccatatagtaacagagaagtcatcttctccaattcctaaaacgaaagctcttcagaaagcttttttttggtcattttaggatttttttccattactcattacataatatagtaagagtgagaggtttttttccctactttatatttagcattttcttccgcttttaaaatgttcgtttacataatggcagtaatttccacctgaataacagaatttaactcaatcagctctattcctgtgttttcatatgccaacttttatggtgacctaaccatccatgtgttgactcaattttaaaatgagagatcatgcaaactcaacatgcagagatgtttatcaataatgtgcattttctagcagttgatgagttttcctgaaaagctatgctaggaccatcacaatgactcattttatttaaagaggcttgataatggaggaaattgaagaggacagtcatcagatgaggtacaggaattgggaaacaatagcatagcacttaaaagcaatttttaaaagcgcacacacaatgtgctaacaataaaatagtgtaacagacttaagcaaactattaatagttgtggcatataaaagtttatctactgtaaaaaactggagctatataatatgaacaattttttcttacatgtgctaatgtggatagtttcttttctatcaccttcagatacattttgtgcgacttatagcaaagaaaagttaaacacatttacagtcatttttatccaaatatttaaagtcttctgtaaattcttggctacacactcccaactttcagcagatagaaaactaatgaatttgctttatattcataatggcaatgaatctgtattgaaaccaagattaaaatttaagtcttaattgtttcaatcttctcactatcaagaaagtactgactaaatggctattactaaaaattcaaaaaaataacagatgctggcaaggttctgtagaaacaggaacatttttacactgttgggagtgtaaattagttcaaccattgtggaagacagtgtggcaattcctcaaagacctagaggcagaaataccattcaagccagcaatcccattactgagtatataccccaagggatataaatcattctattataaagatacatacatgcgtatgttcactgcagcactgttcacaagagcaaagacatggaatcaacctaaatgcccatcaatgatagactggataaagaaaatgtggtacatacacaccgtggaatactatgcagccataaaaaggaactagatcatgtcctttgcagggacatggatgcagctagaggccattattcttagcaaactaacccaggaacagaaaaccaaataccacgtgttctcacttataagtggaagttgaatgatgagaacacatgcacacatggtggggaacaacacacactggggcctgtcagagggtgagaggagggaggagggatagcatcaggaagaacagctaatggatgatgggcttaatacctgggtgatgggatgatctatgcagcaaaccaccatggcacacgtttacccatgtaacaaacctgcacatcctgcacatgtacctctgaactcaaaataaaagttggaaattttaaaaagagaaagtactgacttaggaagtatgaataggctcattttgaatcataaagacctttgaaaaacagtaacattcaaactcagcaacttcccataaacttaaaaggctggttttgacacattgtcaaaatttgttctttttaaataactttatttaattcttcaactatgaattctaaattatatgcaaattatatgagcaatatcactctcttgatgccaatgacagttataacaaccaagactaaattgatcaccatcatccgtgtttactgagacagtcacgacattcctcatttttcctgggcccaagcaaaagattcattcccactcatgcttatgctacagaacaccaaagggatcgctctctagaacaggacaaaatcaaaataagtgtctgtgggtcatttttatagtcaaactatgaaaaaaaatcaaatattayatatgcatatacatgtgcatataaatatatatgtgtctgtatatatatgtatgtatacaaatacatacaaacacacagaattttttaaagtaaatataaaaacagataaatttaaagaaaactcctggtatgaatcattccagaaaaatatttgccatagagttacatcacacattaccttggaaaagtaaaaaaagaaacagaaaacacagtttagygcagtggttcaaaattaaagatacattatcagaaacaggtggggaacttttgaaacatatataaacttaagctccactatcctgaagattctgattcatcagggccaacatggggcctaccatctgttttttattaaacattacatagatgattctgatatgcctcccacgtgggaaacactgcttaaaaagatattaaattaaaattcacttatctatacccttccttgttctaatatgatgtgagattgcaaaagatatacaaaatgcacaacaaaataacataaattaaaagtaaagttaaaaataagagaaaaaaagagtaggctttgtctattttaagcattcctattggaattcagagaggagatggcaggatgaaggcattcaactaatatcatactttcaaagaaactgatggatgttaattttgaaaatcacagcttcagactgaaaacagctgatatcctggcccaattaaggttaggagtcttttgcttgggcccaggaaaagatgaggaatgtcgtgacttcagcagacataagaggctcagactcctaaaaagctgaagctaaaaactggtaacattttttttttaatttcaatagaaagaattcctcattcttataccaacatatctgaatcaccattctgtgcatgatataaaaaagcactatttcatttggttatgattccaaagtattttttatcttattaattcacaggatgtgtacagtacttaccttattcaagtaagtaaacatttatactaacagagatgatgaaaaagacaactagtacatagggctcttcttttacaatctagtagttggagactcgcttacatttgctaaagtaaaatgaatgattattttttgctacacaatatgcagcagcagatcaatatagctcaccgctataaatgccaaccaaagctatagaccagaaatgttcttcctcttttcaatcttcggagggatagaacatgggaaatacttgatatttcttagaagactagctcagttaaattttatcacctaaactctgtataccatcatattagaaagagccattcttcatttttaataaacacacacgtgcagatagatgatagatagatagatagatagatagatagatagatagatagagatttttaaaaaatattttgtagagacaagttctcactctgttgtccagtctggtcttgaactcctggcctccagcaatcctcacacttcagcctcccaaagtggcaagattacaggtatgagccactgccaatttctaataaacctttgcatcaaaataaaaaccttcctaagagaaagaaaagcactccctttaatataagctattggttttcataattaacaacttctattgaaagacaaacatttcagcttttccttaaagagatagttggccctactttccccaatattagttattatcagaaggtattttcaattgtgtgaaagtgcaaggacaccaaagcaaaactaaactttcacagaacaactgaatctaatcaaatctaattaataaaactttttcagcataggctgaatggggaagtgatatgaactaatttcaggtaataagctaatgtttaaaccaaagtaacatcactttcaatggtttctgtctatagaatatttggtttgtagtaccatgaaattattgttttaatatctttaacagacactgcatcatggagttgtgaaaaatatatatcatttcctcattcttcccatctacatgcacattgctattagtaagcagaaatgcaaatttctttttaaaagtgtgcttattccatacgggcatttgggaaacaccctaataaaaatcaagaaaaatcaacatccttatttttgcatatatttttcttatcctgaaactcttgaacttaagagaataaaaatagcactaatgatatcatagagcctgatccacttcctctttctgcatttccttaacatttttaaaataacaggacatgaaatttaattcctttaggtctaccactgtctaaccttgaacacctcactttcattcagatccctggaaaacatccatgtatctcttacgattccatgtcaaytggaattatgttcttttgatttgtaactgagaaactctactgaaaataaaaacatcctgttaaaatgagaagcacaactcaagaaatggatcagagaacataaatttgagccttaaagcaatgatatgctttaaatgtttttagtacctttaaatgatctaagctaatttttttgagaattcccttgagaaatccagatacagtcaatactcaataaaataactgtacaaagtggttgtgtgtacagtatctagaatatcattagaattatttttccaaggcataatgtcattcagaaaaaaatctgaaaatattatagtacattgttagtgtgtaaagaaatttgagctacctctcttactgatactaaagtaaaattttacattataatgcacatataactgtcttataggaaattaaattgcttgtagcaaaagtagaatatcaaagtacatatagagtatgacttcaaccaggtttaaaaaatrcgcatttctaccacatatataaacccaacagtttcagaaagtatttaagttgagttgcaaaaatatgcttaatataatgtattataaaattaaacataagtggacaaggaaaactaaacaaggaaagatgaaactaaggaaaaaataatatgcaaaatatatctgaacagtctaaaatttgaatctaatctaatatccaacataaagagtgacactaaaaaaaagttacaggtgttcctgtattagtttgctgagaatgatggtttccagcttcatccatgtccctgcaaaggacatgaactcatcctttcttatggctgcagagtattccatggtgtttttgtgacaaattttctttatccagtctatcattgatgggcatttgggttgcttccaagtctttgctattgtgaatagtgctgcaataaatatatgtgcgcatgtgtctttatagtagaatgatttataatcctttggttatatactgagtaatgggattgctgggtcaaatggtatttctggtactagatccttgaggaattgccacactgtcttccacaatggttgaactaatttacactcccaccaacagtgttaaagcattcccatttctccacatcctctccagcatctgttgtttcctgactttttaatgatcaccattctaactggcatgagatagtatctcattgtggttttgatttgcatttctgtaatgaccggtgatgatgagctttttttcatatgtctgttggctgcataaatgtcttcttttgaaaagtgactgttcatatccttcgcccactgtttgatggggttttttcttgtaaatttgtttaagttccttgtagattctggatattagatctttgtcagatggatagattgcaaaaattttctcccattttgtaggttggctgctcactctgatgatagtttcttttgctgtgcagaagctctttagtttaattagatcccatttgtcaattttggcttttgttgccattccttttggtgttttagtcatgaagtctttgcccatgcctatgtcctgaatggtattactgaggttttcttctagggttttagtttctagttttcctagcaccatttattaaatagggaatcctttccctattgtttgtttttgtcaggtttgtcaaagatcagatggttgtacatgtstggtgttatatctgaggcatctgttctgttccattggtctatatctctgttttggttactgtagacttgtagtacagtttgaagtcaggtagcatgatgcctccagctttgttctttttccttagaattgtcttggctatacgggctcttttttggttccacatgaaatttaaagtagttttttctaattctgtgaagaaagacaatggtagcttgatggggatagcattgaatgtataaattactttgggcagtatggccattttcatgatattgatttttcctatccatgagcatggaatgttttcccatttgcttatgtcctctctgatttccttgagcagtggtttgtagctctccttgaagaggtccttcacatcctttgtaagttgtattcctaagtattttattatctttgtagcaattgtgaatgggagttcactcatgttttggctgtttgtctattattggtgtgttggaatgcttgtgatttttgcacattgactttgtatcccaaatactgcatgttctcagtcacaagggggagttgaatgagaccacatggacacagggaggagaacatcacacactggggcctgtctggggatggcggggctagaggagggatagcattaggaaaaatacctaacgtaggtgacgggttggttgatgggtgcagcaaaccaccatggtacatgtatacctatgtaacaaacctgcacgttctgcacatgtatcccagaacttaaagtattaaaaaaaaaaaagttacaggtggtagctcatgcttgtaattctagcactttgggaagctaaggtgggctgattgcttgagctcaggagttcaagaccagcctgggcaacaaggcaaaaccccatcgctacaaaaactacaaaaaatttgccagatatggtggtgcacacctgtagtcccagctacttggggagctgaggcacaaggatcacttgaggccaggaggtggaggctgcagtgagccaagattgcaccaccgcactctagcctgggtgacaaagtgagaccgtctcaaaaaaaaaaaaaaggtacataagtcatgatgatcacaacatcaacaccaaatcagaagcagcaccacaattcttgataataaaattgagaaaaatttgtttcatgggtcaggtcatcctatagagaacaacatgttaaagagttaaaaatagaagtaataataattattacagctaatccttatggaaagcctaacaagtgccaggtactttgcatatgttaactcatgtaatccttataacctgaagagccatgtacaattatgttcttcattttacagagaagaaaactgaggtatgagaaggtcaaacagtttacccaatcaaggacacacagctagcaggcagaggagccagattgtcctcaagtatattatgacaatgaacacagcaataaatttcactaaaagaaattcccataaggaaagagctggattggattaatgaacccatgaatagattgcagttaatataggaatataccaataacacacctctcaggctagcttcacaaattaacttctaataagtctcaatcatcttctttgagaagagttaaaaagtgtgactatgatgctaaccactccccaaacagaccccaaatacagctagtctttattgttgttttaaaatttatttcaaaacatataaaaaagattgaaataaaaatgctttagttaaaagtaagtacatctctaagtagatatgattcttcattctcatttctgaattaaaaatataaacagtaggccgggtgcggtggctcacgcctgtaatcccagcactttgggaggccgaggcaggtggatcacgaggtcaggagatcgagaccatcctggctaacacggtgaaaccccgtctctactaaaaatacaaaaaattagccgggcgtggtggcgggcgcctgtagtcccagctactcgggaggggaggcaggagaatggcgtgaaccaaggaggcggagcttgcagtgagccgagatcgcgccactgcactccaccctgggcgacagagcgagactctgtctcaaaaaaaaaaaaaaaaaaaaaaaaaaaaaaaaaaaaatatatatatatatatatatatatatatatatatatataaaaacagtagacatttaatattttttcaattggggtaaataagcactaataatgattttgttttccaaaggaaactagctgaatttctgtaggctttccaggtctacctcaaatgagttttacttattaagcaatacttattataccaggaaaataccataccagtagtataaacaagaagaaaatctgggattatgtgaataaaagaatataccaagaataagccattgactttgtaatacagtattaactatgcccacacctattagtggcagcagaatgctacataaatattgtataaacatacaatgttaataatttttaggtcctgaaatagaaatgaagccattatttctggaatctaagcatgctcagtgaacagaacgcaggcatgctgccaacattcctcagtgtcatttatgtttgatctcaaaaaggcctctcattttacatatattgtaaaattatttgtaaactcttccatccttctccctcaagttcctcttttaaagaactatttttaacctgtagcacataaaattaactcccttttatgtacaggatgcgatgttgacattacaagcctactatgttgatttcagttactctgctgtcaatggggaaaagttgattttgcagttgtatgtgtggtaagcactggaatctatttcaagatgatctgctttagttaaagatttatactatgaacacagaataaatttctctcattgaagayaaccagaagtcaaacccactatgttgctaacaactgattcaactaaaggacatcttaataaagatgcaaaattaaatataaatgtaaggtcagtataggtgcagataatacagttatgtactccatcaagatacacaaccaaataccctcattttatccttcctatactacaaaggctagaaaactagaaacatcatttcttaaagtctgtgcagctagagttctattcatgaaccaggttccaccaagcattctcatgtacaagagactgggaaaatggcagtcaacaatgggagtaagggagcagccagcacaaagaaaactgctcttctagggcatcaatggctaaattcctcctggtactaccattccttactgggtaaaatgtaaattgcattccctgtttctcccagaaattttgtaaattagctaacactctgtaaataatatcttttcattttagagactgagtactattgtttaccagaaagccagaacttaaggatgatgatatttaaaaagtaaatcaacttgttaaagattgtaaagaaaatgttgacaactaagtacattaagaaggacaagaagagtttcacaaggcaagaagcagagatgcaatagactaaaaccccagcatatacaaactaaagaatcatattttattcaaatagtactacaaactttgttgcattttatcacaaatgttagactcccttagaaaaacaggtgtgaaagtagcaataaattctagtttaagtatctgcaataagctaaacacttaaatcaagaagttagaaaaacttcaaatcaacaatctaatctaacatcacggctagaggaactagaaaaacaagaataacctaactccaaagctagcagaagaaaagaaataactaaaatcagagcacaactgaataaaactgagactgaaaaatccatacaaaggatcaactaacccaaaatttggttatctgaaaggataaacaagatagaccactagcgaaattaataaaaaaagggagaagatccaaatcagcacaatcagaaatgacaaaggtaacattacaaccgatcctacagaaatacagatcatcaatcaatgcctactatgaacacctctctgcacacaactagaaaatctagaggaaatggataaattcctggaaacacacaacctcccaagactgaattgggaagaaactgaaacccgaaacagaccaatatcaagttctgaaattgaatcagtaataaaaaacttaccaaaaaaacacaaccctggacgagatggattcacagctgaattctaccagacatcaaaaaagagctggtaccaattctactgaaactattcaacacaactgaggaataaggactcctctctaactcgttctacaaagctagcatcattctgataccaaaatctggcaaagacataacaaagaaagttaaatataggccaatacccttgaggaacatggacacaaaaatcctcaacaaaatactagcaaaacatatccagtagcaaataaaagttaattcaccatggtcaggcaggctttattcctgggacacagagttgattcaacatatgcaaatcaataaatatgatcaccacataaacagaattaaaagcaaaagccattttgatcatctcagtagacacagaaaaagcttccgataaaatccaacatccatttaagataaaaaccctcaacaacctaggcactgaaggaacatacatcaaaataatataataagagccagctatgacaaacccacaggcaacatcacactgaatgggcaaaagctggaagcattccccttaacaactgaacaagacaaggatgcccactctcataactcctatgcaacatagtactagaagtcctagccagagcaatcaggcaagacaaagaaataaaaggcatccaaataggaagataggaaatcaaactatttctcttcccacatgatatgattctatacctagaaaaccccacagactccctcaaaatgctgctagaacagatgtcagtaaaatttcagtatacaaaaccaatgaacaaaaatcagtagcattcctacataccagtaacattcaacattgaatggatacaccgataacattcaacatctaatgtatacaccaatacattcaagctgaatgtgtcaggaacacattcctatttacaatagctgccaaaaaaaaaaagttaaataaaatacctaggaatacatgtaaaaaaggaggtgaaagatctctacaaggagaactataaaacactgctgaaaaaaatcacggatgacaaaaactaacggaaaaacattgcatgctcatggattagaagaataaatattgttaaaatgaccatactgcccaaagcaatttacagattcaatgctattcctatcaaactctcaatgtcatttgccacacaaatagaaaaaattattttaaaattcatatggaaccaaaaaaggcccaaatagccacagcaatcctaagcaaaaagaacaaagccagaggcatcacattacatgacttcatgaaaagatacttctcagaagacatacaagtggccaaaaaacatacgaaaaaatgctcaacatcactaatcattagagaaatgccaatcaaaacaatgagataccctctcacatcagttagaatgcctattacctctcacatcagttagaatggctattatgaaaaagtcaaaaaataacaaatgctggcgagattgtggaaaaaagggaacacttacacactgtttgtgggaatgttagttcagccactgtggaaagcagtttgaagatttctcaaagaacttagaactatcttcattcgacccagcaatcctattactgggtatatgcccaaaggaaaataaatagttccaccaaaaagacacatgcacatgtatgtttactgcagtactattcacaacagcaaagacatggaagcaaactagatgcacatcaatggtgaattggataaagaaaatgtaatacatatacaccattaaataatatgcagccataaaatagaatgaaatcacatcctctgcagcaacatggatggagctggaagacattataagcaaactaacgtagaaacagaaaaccagataccacttgttctcactcactcatgttctcacccactcaagtgggatctaaacattgagtacacactgacatagagatgggaacaatagacaatggggactactgagtgggagggaagaagtgaagggtgagggctgaaaaataactgttgggtactatgctacctgggtgatacgaccattcataccccaaaccaacagcataacacaatatactcatgtaacaaacctgcacacgtacttcctgaatctaaaataaaagttggaattaaaaataaattaaatatctgcaataatatttgcctcataataagctttttagttcttttttttttttttaagagacaggtctccctacattgtcctggctaactattcataagcactaatagtgtaccacagtgttgaattcctgagctctagtgatccatccgcccaagtaggtgggaatacaggtgtgtgccactgtgctcagcttataataaattagtttctaaaagcaagtaacaaaatatgaaatcaagattggtgtaattatgaattacccgtttggtattcaataaagacacctggagcagatactgcatttgaccaccctcaacaccactcaaatccctgttagtcagccacatgaggggtaacacatgtgaaaggatggctacaaagtgaggaaggctgggattcaattccacttctgcaacttccttattatgtgataaatgagtgaaatgagtaaaatatctttagaattaaatgagataatgcctggcacctaatggttatttaataaatgacagctgaatctgaatcaagtgaagaaacaaactataaatatgttcaaattttaatataacaataagtctcagttcacaattcaggacagtaatagaagtgatatgacaatgctgcacacaattaaatgacagaaaattcctatcttagaatttaaaataaagttaatattaaagcaggtaaaaatagtaaagaaaagctgacaacagaggtcatttaaaaataatctaaaattttcaggctaggcacggtggctcaygcctgtaatcccagcactttgggaggccaaggtaggcggatcacctgaggccaggagttcaagaccagcccggccaacatggtgaaaccccatctctactaaaaattagccaggtgtggtggtgcacacctgtaatcccagctactcgggaggctgaagcagaattgcttgaactctgcaggcagaggttgcagtgagccgagatcatgccactgcactccagcctggatgacacagcaagattatgtctcaaaaaattaattaaataatctaaaatttccacaatttattcattcaaatatatattgaatatatatatgaagagagaaagagagagaaccagcctactgcttgcaaatcactgtttcaggtgctgagaattcagtagtgaaaaaaataaacatggatcttacactccagtgggaatgaacaaaaatagataaaggaaaggagacaggaggagaagaaaggaatagaaggacacaaataagaaaataccacatagtagttggtactacacagaaaatatcagatagtatgatggcaaatgactcagtgcatcaaaaacgctttctctacagatatttaagttgagatttcaaagtcaagaggccacgtgaagatcaggcaagaatattccagtctgatgacacagcctgtgaaaatgccccatagcagaaagaagccagacagatttaagggattaaaagtacccagtgagactgaaacatatcagtagagggtccagcaggaagggagaaggctgaagaggtaggcatggattgggtcacatagcgcagtggttctcaaccctggctgctggttataattgaaaaatactggtcccacctcccaccaattactttagactctctggtggtagagcctggacactggaagtttttcaaagatccttgagtggttctaatgggtaacctcgttaatggaagactcatatgccagggtaaagtgtctttattttattctaagtatgatgggaggccattgacagattctaatcagggaaatgaaaagatctgatttacattcttaagagatcactctacaactttagtgaatagaatatggaatgcaacatactctaactacatatctacaaatgttcaaatgacaaaactgatgagttcttaaaaactctataaagtaaaactccatatgccaaatgcattttccaccaaaggctcaataatgggcccaaggatagtgggttagaatttttggaaatgttcatggttacagtagatcctgcaaaaaacaaatgatggaatattgacaactggctatgaggggtgagggtgatggggagaaggctaagaaatgtgccatgttccagtacttgacaactcttttgattgacaatgcatcccttttggcaccttcctcacaaaactaaagctgccttttctgaattgctactccatggaagacactgtgcagcaggaagccaaacatttgttcactagctgggaaacagaaaagaatccaatggattcagggagagttactaaaaacaaatgaggagcctctcacttgaagcaacatagaaaaaggcttgctaagattaaagaaatgtgctggttgaactctcagggtaatatggcttggctgtgtccccacccaaatctcacctcgaattataatccccataatccccatgtgtcatgggcggaaccaggtggagatgactggatcatgggggtggtttcccctatgctgttcttgtgatagtgagtgagttctcatgagatatgatggttttataagcatctggcatttcccctgcttgcactcaactccctcctgccacctagtgaargtgcctgcttctcctttgccttctgccatgattgtaagttttctgaggcttccccagcaatgtagatctgtgagtcaattaaacctctttcctttaaaattaactagtcttgggtatttcttcatagcactgacagaacagactaatacacagggcagccttcccacctatgtgatagcatagtgactatcattcctctcctgcaggggctccctgtctgcagctacctaaatctsggagagcttaagggagctactagaaataaacatgaagcatcagaggtgctaggctggctaaggctcctctttaaattgttaaccttttaacagcagtcaatagagtgtaaaatcaggattttagcagcttctaccaactcaaatcccaagatacttcaactccacattcctggaggcatgagttgagctctgtaaaagattgccttttccttctctgttatttttggctctatctctatggttctgccaaatggcttccacttcaaacagccttgtttctaactatgagactggctttaaaatcagcaataaagttctacgcattcagaaagtgatgtggatcctgaaaaactggggttttctttaataggggaagaatacaaaactaagcatttaggaatcataaaaggcatctaggtcataaaactgaaaagcatatatttacttttcatttccaggggaaaaaatatgttcacaaaatatattctacttgcaaatatttgtaaattttaaaatcaaatcaaagttatacccttcattattttctttttcaatatatttcccacaaggatggatcataaggatatatagatatatctataagatatgtaacttcatcactaacgtcactaacctctggcaaactcctcacatttgcagtggtcttcaatgactataaaatcctgaggactctcaaaagatttccctaagactcctaatcaraattactgtaaagtacattgaaaacagaagtgcataggtcaggcacggtggctcgtgcctgtaatcccagcactttgggaggccgaggccggtggatcatgaggtcaggagttcaagaccagcctgaccgatatggtgaaaccctgtctctactaaaaatacaaaaagtagccgggcacgatggcaggtgcctgtaatcccagctacttgggaggctgaggcaggagaatcacttgaacctgggtggcagaggttgcagtgagccaagatcgcgccactgtactccagcctgggtgacagagtgagactctgtctcaaaaaaaaaaaagaaaagaaaaagaaaacagaagtgctgcctaatggagatgatcaaacacagcaatgtgttgctaccagcaggactatgacttcattacataatgtccttatgtctggagttactccatgcagagttcccaaatttgaagtttcttccctcttcaacttcaccgatcatcaagaatagtaaaagaaatacctttcagacaggagttccttatttggtgggattccttggtcattttacctttgttttctttcttggactaatggatttggctttactgtaatgtttatttttatacacatgcccaaaggcctcctagtgtgtctttataaatctaataaatacctcatgataattaagtttattaacacaaaagatgttatccattactaaaaaagtacactttaattaaataaggagccaagtacatactataatgtagttccctgtggacccagtcaccaggcccagcccagcaggccctggtatcaggcagccccctagactcagggaccaggacccagctcatacccatgtaccctggttccaggaccaccatagtgccacactggactctgaagactcagcctcaaggtctgccatagcactatgttaggtcccatcaacccaagttcaggctgttctccatgaactcaggcttcagagccaccctcagagacttagttgataggcccactcacctgcagagtcaggcaccaggccagtccacctaaggactccattagcaagccaaatgaaagaccccaccagatggtctgcccagaatgtctggctgggttggctggtaaaaagctttccctatcaaggccagtctataaagactggatgtccacttcttcaaatgcacagacaccaatgcaagcccatgaggatcactaacaatcagggaaccaaaaccaccagaagaacaaaataaagcaccaggaactgacactaaataaatggagacctacgaactacctgacaaagtattcaaaatgatggtcttaaaggaacagtgagctaaagagaacacaggctactaaatgatatcaggaaaacaatatacaaacaaagtgaaaagctcaacaaagagatagaaaccatagttacatattttttgtggtaagaacatttcaggtctactgtcttcgcaatttttaagtatacaatatggtattatcacctataatcattataatgtacattagatcttgagaacttattcattctgcttaactgaaactttgtaccctttgactaacactttcccctttttcccattccccagttcctgacaaccagcaccctattctctgcagagtcaggcaccaggccagtccacctaaggactccagcagcaagccaaatgaaagaccccaccagattctatgagtttgattttttagatttcacatttaagtgagataatgtagtatttgcttttcagtggctggcttatttcacttagcataatgtcctccaggtttatttacattattgcaaatgacagtgatatggtttggctatgtgcccttcaaatctcaacttgaattgtatctcccagaattcccacatgtagtgggagggacccagggggaagtaattgaatcatggagcctggtctttctcgtgctgttctcgtggtagtgaataagtctcataagatctgatggatttatcaggggtttccactttcacttcttcctcattttctcttgctccagtgatgtaagaagtgacttttgcctcccaccatgattctgagacctccctagtcatgtggaactataagttcaattaaacctttttcttcccagtctcgggtgtgtctttatcagcagtgtgaaaatggattaatacagacgggattttctgctttttaaaggctgaataataattcattctgtatatactgcatattttctttattcatttgtcaatgaaaacatgttaattacctatcttggctattatgaatatgccacaataaacatgggagcacagatattccttcaagatactgactttatttcctttgtatatacacccagaagtgggattgctggatcatgtggtagttctgtttttaatttttgaggaccctccatactattttctataatgtatgtactaatttacctttctaccaacaacgtacaagcatttcttctccacatgcttaccaacatttgttaccttttatcttttcgatattagccactctaacaggtgtaaagcaatatttaattgtggttttaatttgcatttatctgatgatgagtgatgttgaccactttttatatgtacctgttggccatttgtatgtccaacaagtatattttaaaatgcctgagaaatgtctattcaggttctttgcccattttaaaactgggttgttttattgctactaagttgagttccttttacagtttagaaattaactctttgtcagctgtcatttgcaaatattttctcccattttgtagactgactcttctctgttgattgttggctttgctgtgcagaagctttttaagtttgatgcatttatctcatttatctgcatttatctcatttatctatttttgctttggctgcctatgcttttggtatcatctccaaaatactgttacccagaccaatatctgcaagcttttcccccttcttttcttctagtagttttatagtttcagtcttacatttatgtatttaatccattcttagttgatttttgtatacggtatgagataaaggtctaatatcattgttctgcatgtggatatacaattttcccagtactatttattgaaaagactatcctttccccaatatgtgttctaggctcctttgttgaaaactaactagccattaatagtatattatttctgggctctctattctggttccatccatccatatgtttgtttttaatgccatgctatttttattactattcctttgtggaatattttgaaaccaggtagtgtggtgcctcaaatgttgtttctcaagattgctttggctatttgaggtattctgtgrttccatatgaattttagtattttttttccatttctgtgaaaaatgtcattggaattttggtagagattgattgcattgaatctgtattgctttgggtggtatcgttagtgttttctatatataagatcatgtcatttggaaacagaaaaaagttttactccatcttttgtgatttgggtacatttatttctttttcttgcctaattgctttagctaggactttcaatagtacattgaatagagtggtgacagtgggcatccttgacttgttccagatcttagaggaaaagctttcagctttttaccattgagcataatgttagctgtggccttgtcatatatggcctttattatgttttgtatctgtggtcaccagggatattggtctgtaattttcttttcttgtagtgtgcttgtctggctttggtatcagggtaataatggtttcacaaaacgagtctgaaagtattccctctttttctatttttttaaaaagtttgaaaaggtttggttttagttcttctttaaatgtttggtacaattcacaggttaagccatcacataataggattttctctggtggcaggtttttgattaccgattcaatctcctaactcattattgatttgttctcattttttcatttcttcatgattcagtcttggtaggttacatatttctaggaatttaccaatttcttttaagttattcagtttgttgatgtatagtagtctcatgagcctttgtatttctgtgctatcagttgtgatgtttgttcttttgtttataatcttgtctcttcacttattcatctagctacaagtctgtaaattttatcttttcaaaaaaatcaactcttagttacacggatcttttctgtggtttttctgttttctattctatttcattttttcaactagacatctattgtccatgaaggaaacagagttgaaaagcgtgttgtccatgccttcaaggagcttacaaacgataggagagacaaattgctgtttcatcaattccaagatatacatgttttatattttaatatctctgaaatcagggtgcagcttcaattgatagaatcttaacaacagttgctgaagagtcagttaccattgtgtacatatatgtgcacttgtttctgcttgtttgttagtatgtttgttagcttgtggcttaaagaaacaactgtaatccatccatgttttagtcaacaaattactcttttccatttgggaaaagaatatgagttctagttgttgcctaaaaacatttctgtcagtacctttggttaaaattttaaaaatatcagtatcaaaaccagcagaatggctgtcagtagcttggaagacaattggggaaacaatagaagagcattctgttcctgaccaaccaaaggaacacacagagaatatacgtgaaacaacatgaacatctgcaactgaatcataaagtgctttagaagagtcagactatgatggtgcataagttttaaaaatatttcaaaatattttttattgttatatttatttataaatttattatatttatttttattttatatatattttcctatttattatattcatattttcctttttctgcatgcacaggaggaatataatctaaattaagtctggaagagttctttaagacaaatatgaaaattctaagtgataaagtcttatatcgtaatttaatttgaagtactttttctttcttagtggtgcatcttacaattgagtgcctcttggagctaatgaaatacagtagttattacagtacagaatgataagtgccatgaaaaaggccattaagtgatgctgaaacaaagagggagtacatataaattaaattcaagatttacagaaattcagagcaggcagtggagctaagttttaaaggttagcaaattggcctacaggctctgaggggtggttcaggcagcatgaagagtgcaagaaagcatggagtggtaggcagcaagtcatgttggggaaactgcaagtcatcccttaaggctggagttataaggtaaatgttagttgcacagttgaggtcttacaggggccagataaaaaagagcactgtgtgctaaacagcataatttcaatattatcttgcaaactgtgagtcgtgattaaaaaatgtgaaatagggggaaaattagaaagaacaaaaatcagtattgtaaggatggattgggcagatcccaagctggaaatgagtggaaagcttagaaagctagtgttgacaaattcattgagaagggctgagcaccagaaataaagctactgtagcccatggcttggctgttggcggcagcaaggtacccacccaatggcccaccacgggtttaaatatatatatatttatttatatatatataatatataatatataaatatatattaatatatattaatattatataaaatatatttatatataaatatatatatgaagtagaagaaaaaagaaataaagctactgtagaagaaagagaaatactgatataaacataaattaaaatgtgataaggtagtcagcaattaaaaggaacaaactactgatacatgcaacaacatagatgactctcaaatgtattatataagtgaaagaaaccagatgtaaaaggcacataatgtataatcccattaatatgacattctggaaaggcaagactaatggggatagaaagcagtggttgccaggggctgggtttgggtggactacacaagggaasaagggaattgttcaaggtgatggaaatgccctatatctcaattgtggtactggccctactaccaaatgtgtttgtcaaaatggactgaattttactatgtatgaattatacctcagtaaacgtgactttaaaaaccccaccaaaaatgtgataagatggaacacagccacactcatacattgatgtactgcctttgtctgcttttctactataatagcagagttgagaagttttaacaaagactgcatgatccacaaagcttaaaaatattttctatctggcactttacagaaaaggtttgtcaaccctgatatatggtaatattaccaatttgttctgttctcattcaaaaatcttacttgttggccaggcatagtggctcaagcctatagtctcagcactttgggaggccaaggtgggcagatcacttgaggccaggagtttaagaccagcctggccaatatggtaaaaccccatcgctactaaaaatacaaaaattggccagcgggggtagcacacatctgtaatcccagctactcggatggctaagatatgaaaatcatttgaatccgggaggcagacactacagtgagctgagatcgcaccaccgcactctagtctgggtgatagagcgagactttgatcaaaacaaaacaaaacaaaacaaaacaaaatattcacaagaagactagaaaggcaataactgaatgtgcacaaactctctattcaaactatttggggtacagaatgagttgttttccaaatatgtcctgaattaagtttccaaatggaaagagtattcagttctcaataacagccatagatggtttttcttagaaactttcacaaggctaggcatagtggctaacgcctgtaatccgaacactttgggagaccaaggcgggaggactgcttgagcccaggagttcgagatcagcctgagcaacatggcaaaaccccatctctaccaaaaatacaaaaaaaattagccaagcctgctggtgtgcacctgtagtcccagctacttgggaggctgaggtgggaggatggtttgagcctggaaggcggaggttgcagcaagctaagattgtgccgttgcactccagcctgggtgacatagccaggccttgtctcaaaaaaatgaaaattaaaaaaaaaaaaaaaagaaagaaacttccacaaaaccttcccattataatagcatctcccaattcaatctattgtctaaatcatatatttgttggatatctttttttgttagaataatagacaggtgttttacttaagtgattagctacaatctgcaaaactgcttctttatatactactgtgtatttgagacttgaagtatatattaggtagacattatcaactagacattatcaagaggctttcaattctcttttgaagctggaaaatacggataacaaagtttctggcactttgacataaaaataaagtataagtgctaaaagattttttaaatgtgataagggaagaaattaagctaattgcctagataagatttcttcattatatactagttttacttatttcattatttatttttaaaaatgaagaattgttaagcgttaatatacatatgcatctgcaacagttacaatgatgacttacaattagctaggtataaatttgagttacattttccagaaatggcgatgtattacagagaagcatccatatcatattttttccaataaagtacacttgtgaagtaacttactaagataagggttgtaattttacaatttaatttataaaattccctgtgtaagcaattgccacctgcttattagtaccctgatgaaacttactaaagtaactattctatacaatgtataatatttataattttacaagtatgagtaacactaaaattcattgtaatttcattaatttattaaattatggcaaataatattacaaatacttatgatcctcttatagcattctcccactatataggcaaggaatttgaaatgacatttaatgaaaatgtcacttcaaattaraaatttcattctgctaactctttaggcactgtgatggttaattttatgtgtcaacttgactgggctgtgggatgctcagatatttggttaaatagtattctaggggtgtttgtgaaggtatttctggatgagattagcagttgaactggtagattgagtaaagcagatggccttcctcaatatgggtgggcttcatctaatcagttggaggcctgagtagaacaaaaaggagaaaggcagtatttgctttctctatgtgttattgagctgggatattagtcttccttactcagactggaacttatactattggctctattggttctcagcccttcaaggcttctcttagaactacaccaccacaccacctctttcctggctstccagcttgcagatggcagatcatgggagttctcagcctccataatctcacacatcaatttcttacaataaatctctataggttctgtttctctatgaaatcctaactaatacagacaytaaagtttatagtctgataggttggaatgtattttaaatttaaaatattctacataaaagaggcaggcgacaaagcaatatcattattaaagagaaactgggccaggagcagtggctcaggcctgtaatcccaccactttaggaggccaaggtggggggatcacctgaggtcaggagtttgagaccagcctggccaacatggcaaaaccctgtctctactaaaaatacaaaaattagccgggtgtggtggtgtgggcctataatcccagctactcgggaggctgaggcaggagaatcacttgaacccgggaggcggaggttgcagttaaccaatatcatgccactgcacttcagcctgggcaacagagtgagagtgagacttcatctcaaaaaaaaaaagagagagagaaactaaagaagatatgagacagaagccttggtaagcctgagatttgaaaaggattgctagagtcaaccattttaaagttctgatgtgatcaacagtatatacatggttcttgaaaaataaactttataattaaagaaatctgtaggagctgaagtaagtaaattcttagatagcattgtaagagctattctttgtggaaaaaaaaatactaagaagacaggaagggtgacagactgtagtaaaataaaaaagcaagaaaacaagatgagctacagactcatataaaaaatcagccccgcctgggcagggtgcttcacacttgtaatctcagagctttaggaggctgaggtgggaggatgactcaagaacatacgtttgaagctgcagtgagctgtgcctgcgccactgcactccagtctggtggacagagcaaaaacctgtctcttaaaaaaaaaaaatttaaaaagtcagcgtcaaaaaaaaaaaaagcctccaaggtccaacgttgcataaagaacacttaaatgaatacaaatgtcttgaaatcttcataagagaaaagcacgaagtcaaggcaaaaataagaggcacagcaatgaatccaagacacagaccaataaaaacaaaggagagagaataaaagaataaaaatatttccactatatttgcataaacaagaagtgaggactgcagattagatggaagagaggggaaaggatttggtctgagtttagctatagaaagaaaaacttagctaagaggtcagtgatgatactaagatttcaacatattttagaccacaattattttcactaaaagtcccataaacttacgtgcacttgaattttagattaaatttgacttggtgtttaatctaactagtaattgatcagaaggaaaagatctcagatctagtgtatttatgatgatgtagaaagaaatctggaaatatgcccttatctggttgtgaaggaaaagaataacttgtatttcttcaacactatgaaatcactggtttcaaccctaaaaaaagaataatcagttaaaagaatctgacctaacacttgagccaaatgatttatgacttttatagcctattataaaacttactttacgtactgcctcaaatctgtgttaaagctctgttttccttttacttcatatgaaatgcagtcctaaaaataatcaagtctaaaaataaggcaaaaaccacagattaagtgtagctttatacatgtacaaataacagggaagtctccacatcttctaggaaaacagatggtgtatctactttttcccactaaattctctatgttgcatcaaacctcyggaactttttcatcaatgtgcactatattattatacaaaccaaattcattctttaagtttattaattcctgtgtcccacagaggagtcttatatttgatctcaggggcttggtttctataataaaaagcaactgattatttacatggaaagaagctatatagcaaaagaaacaaattcacctccaaaacatattacagttattatatttctctatccctttccaaagtctatacttctaggaaactcttttctctaaaaattttctctaaaaattaatgagcagagaagcaaaatgggaaaaaagaaaaggagttttcagaaaatgtgcttagtttgcttatctctactgtttcccaatctttgcaggacatctaaaaggttgacaggatatgtacaaaggatgggtaaatgtttttacgggaaacttatgtgcctttcaattatcatcatctgtatttttcagagagaggactgataagacatgactaaatgaccttattctgtgacagaaactagaagacactgagtttgtaactcaaaagtgtatcaggaaatagaaagtcctgccattaactttaactgtagtatcttcccacccttattcatccatgcattaataaactgaacaggaaactgaaaaacattaaaataaaataatgttttggtgagtttattgtcactctctagaaatataggagaaaatctgttctcagactcttaaactaattcttttacataacaagatagcatactcaaaggcaggatactttgggaggccttccagtgtagctatgagatctgaattattagatatacacatactcttttgtttggttagtcttttaaaaaacagcagcatgaagtgaacataaatttcatagctcaaacatacagtataaaactaactatgaaaacctgacacagaaacagtactgtttggaaaaattgatgacaaattatttccagttttcattagaatgagagtttttattttaatgtgaagaaaatattcatgttatatataattatataaataatataatagcaaatgaagatggaatcaaaaaggaaattaatatttttttcttcaagaccttctccatatgatttcaaagcaatggcacatgaaatattactactcaggaggctgaggcaggagaatcgcgtgaacctgggaggcggaggttgccgtgagccgagactgcaccactgcactmcagcccgggtgacagtgcgagactccatctcaaaaaaagaaaatcatatatgtggagaatgaattctatacccagaatacattaaaagactcctataactcaacaacaaaaagtcaattaaaaaaataaaagctcaattaaaacatgggtaaggaccatagccaacatcatactgaacaggaaaatgctagaagcattctttttaacaactggaataagacaaggatgtccactctcaccattcctattcaacatagtactagaagtcctagccagagtaatcaggcaagaccaaaaaataaaaataggaaaaggggaagtcaagctatctttcttcacagattatatgattctacacctaaaaaaccctatagactccaccaaaaggctcctaaaagtgccaagtgactacagtaaagtttcaggatacaaagtcaaggtacaaaaataagtagcatttgtatacaccaataacatccaaactgaaagccaaatcaagaacacaatcccatttacaacagccacagaaagaataaaatacctaggaatgcagctacccaagaaagtaaaagatcttttctctgcaacaagaattacaaaacactgctgaaagaaatcagagattagacaaacaagtgaaaaaaacatgctgtgctcctaagaattacaattgttaaaatggccatactgcccaaagcaatttacagrttaaatgctattcctatcaaattaccaacatcatttttcacagaattagaaaaaactatcctaaaattcatatagactcaaaaaacagcctgaatcgccaatgtaatccttaacaaaaacaacaaaacctgaggcatcatgctacctgacttcaaactagactacaaagccacagtaaccaaagcagcatgatactggtacaaaaacagatacctagaccaatggaatgggaagtggaacccagaaataaagccacatacctacaaccaccagatctttgacagagtcaacaataacacacaacagggcaaggactccctattcaataagtggtgctgggataactggctagccataggcacaggattgaaactggaaccaatcctttcaccatatacaaaaattgcttcaaaataggttagagacttaaatctaagacctaaaacataaaaacctagaagaaaacytaggacatactgttctgaatatgggccttggcaaagaatttatgactaagaccacaaaagaacttgcaacaaaaccaaaaattgacaagtgagacctaattaaaccaaaaagcttctgtacagcaaaaggagctatcagcaaagtaagyagacaacctccagaatgggagaaaatattcacaaactatgcatatgacaagggtctaataacataaagaacaattcaacagagaaaaaacaaccccacttaaaaaattggcaaagggcatgaatagacatttctcaaaagacatacatgcagccaatgaatatattttaaaaaggctcatcaacactatcatcagagaaatgcaaatcaaaaccacaatgaataccatctcacaccagtcagaatggctattattaaaaagtcaaaaaataacagatattgatgaggttgtggagaaaagggaacacttacacaatgctggcagctatgtaaattagttcagccactgtggaaagcagtttggagactcctcaaacaacttaaaacagaactaccatttgacctagcaatccccttactaagtatatactcaaatgaaaataaactgttctacacatatgttcattgcagcactgtgatggttaatactgagtgtcaacttgattagattgaaggatgcaaagtattgatcctgggtgtgtctgtgrgggtgttgccaaaggagataaacacttgagtcagtgggctggggaagrmagacccacccttaatctggtgggcatcatctaatcagctgccagccaatataaagcaggcagaaaaacatgaaaaggcaagacgggtctagcctcccagcctacatctttctcgcgtgctggatgcttcctgccctcaaacatcagagtccacattctccagttttgagacttggagtggctctccttgctcctcaagcttgcagacagcctattgtgggaccttgtgatggtgtaagttagtacttaataaactcctctttatatatatatatgtgtgtgtgtgtatctcctatttgtgtgtgtgtgtgtgtgtgtgtgtgtgtgtgtgtgtgtatatatatatatatatatattcacacacacacacacactatatatattagttctgtctatatatattagttcagtccctctagggaaccctgactaatacaaacactacacacaacagcaaagacatggaatcaacctaggtgcccaccaacagtggactagatgaagaaaatgtggcatagatacactatggaaaaccatgcagccataaaaaggaagaaaatcatgtcctttgcagcaacatggatgtagctagaggacattatcctatgtgaactaacaggaacaaaaagtcaaaactgcatgttctcataagtgggagctaaacattgagtacacatggacataaagatgggaaaaacaaacaatagggactacttgagagggggctgtgggttgaaaaactatcagatactatgtttaactgcctgggtgacggaatcatttatacagcaaacttcagtgacatacaatttacccatgtaaattgtgacctgcacatgtacccacaaatctaaaataaaaatcaagagaaaaaataaataagacagacatgggtaagggtctcgaataggtatttctccaaagaagatatacaaatagccagtaagtacatgaaaaagatgcttagcatcagtagtcattagggaactgcaaatcaaaaccacagtgaattaccacttcgcagccattaggatgatgattataaaaaaaaaaraaaraaagaaagaaaartgttagggaggatgtagaataattggaaccattgtgcattgttggtgggaatgaaaatggtgcagctgctatggaaaacagtttattggctccttaaaaaattaaacgcagaattaccatatgatccaataattccattcctaggtatataccttaaaaactgaaagcagggactcaaatacatacttgtataccactgttcacagcagaattacttactatagccaaaaggttacaatagtctaaaggaaacaaccccaaggtccatcaacagaccaatggagaaacaaagagtggtatagacatacaacagaatatgactttgccctaaaaaggaatgaaattctgatatatgcaacaacatggataaatcttgaaaacattatggtaagtaaaataaactagacaagaaggacaaaaattatatgattccatttatatgaggtacctagaataggcaaatttatagggacagaaagtagagtttaccagggtctgagagggaaagaaaaactgagagctactgtttaatgagtacagagtttttgtttaggatgatgaaaaagctctggaaaaaggaagtggtaatggttacacaacattgtgaatgtacttattgccagtgaattgtacatggcgaaaccctgtctctactaaaatacaaaaaaattagctagtcatggtgacaggcgcctgtaatcccagctactcaggaggctgaggcagaagaattgcttgaacccggggtgggcagaggttgcagtgagccgagattgtgccattgcattgcagcctgggcaaaagagtgaaactccatctcaaaaaaaaaaaaaaaaaaaaggctaatgtggtaaactttatgttatatatattttgtcaccatttaaaaaataatctattcagtgaatatataattagctcccactgtagctgaaacctattttgtttagatttccaaattactagtaaatgtattctgtgtggggacatgcacataaaatgaatctcactttgtaattgacacataatatatgtacatattttcacagcacatgtgatattttgatacattcatataatgtgaaatttaaaaattagggtaattaaggtgtcaattaccttatacatttatcttttctttatgctggaacatttgaattattaactactagctattttaaaatatacaatagattattgtctactatagtcattctacttatttatcaaacagtaggtcttatttctcccacctacctgtatttttataactattaatcaacctctcttcactcctcctttccccctacccttccaggcctctggaaaataaatatctttgaaaaacagcccctggtatgttgtgcacatcagatatcctagaatgtactttcaaaagctccaaagaattataattgcactttaatttgaataattttattactattttggttctttacctatataaaaaaacacaggtcataacaagaagatatccataaattctgctgatggcctaagcatatatgcttatagtccaagtgcagctaaaaatgaacactgtacctgatagagcataataggttctatgttgtatcctaaggtatyggcaaagttcttagcratcactgtttttccacaaccctacaaatggaaaaaattattcaagaggtaagtcaaaataaccaaaagccaggaaactaaaagtctgcagtgagactgtcattcttacctttcctccaattaaacatatatctttaaccatgtgagactgcatcatttcagcctgtagctgcttatggctcaaagtctgtatgaaacggtctgacgcacaaggttgacttaatagcctggtcccggctggcacctataattaaagagaggtcaatataacatggccagatgtggtggctcacgcctataatcccaacactttgggaggccaaggcaggcagatcacttgaggttagtagttcgagaccagcctggccaatatggtgaaaccccatctctacaaaaatacaaaaaaattagctgggcatggtggtgcgcaactgtgatcccaactactcagggggctgaggtaggagaatcgcttgaacccaggaggcggaggttgcagtgagccaagattgcgccactgcactgcagcctgggcaacagagcgagactctgtcccaaaaaaaaaaawatatatatatatatrtgtgtgtgtgtgygcgcgtgtgtgtgtgtatatgtgtgtgtgtgtgtgtaaaacatgcatgtttttctcaaaatatcagtaacttaaagtatataactgccacttaaaagcctccaactaatagcttgctcaatttaattctttactgtttttgatatttcaatagagcagcaactattttttcatttaatagatctgatgatcattattacaaatcttccaaatcaattatttccctaaaattaaagtcccacattatcagatgtattcataaaaatcatgtcatcttaatgctatttataacttatagtaaagatattactactggagaataaatttttttcccaaaattctagttgtaagcacagaatttaatgttagtccactggaatctctaaagtcaccaatgacctcctgatttctaaaagtcaagtccacaaatccttttcaggtttatcttagtttaccastgagaggcatctgttcacatattctctcttcccatcttttacatctacttctcattttattttttgtcttccccttttattatttatcctccactattagttcccaaggagccatgttctgatgaggactctgggctggatcatgttatataccacacgaaccaaagaattctaagtttggaagtgacaggatcagatttgcatttaagaatttaacctggtatcaacatggaaagctaactggaagagactagaggcaatgaggttaaaaagccattaccaaagggaagcaaataatgaagtcttgttcatacctcatgcttctgaacatattgtttaaactgccaaaaatgttctatccactcctgagccactkgaaaaatcctatrttattcttgcaggcttagctcaagcttcatcttctctctgaagctttccctattccgtctcctgaatcccagtattactttcttctccatatccccagtcattccaatgcagtcttaactcgtctgcctctatcctaaactatcagctagatgaaccattcatctgaacaaaacagagagtatagtggggaactgtccctgtctagaaatcccagctgtgccatctcctagctgctgtctctgggtgaatcattaacctctttacatctcagttttctaatctacaaaatggagataataaaacttaccttaatggatcttgcgggatttaaatcgtgtaatatatgcagagacaaatacagtaaatagtacacagtaaactcataatatggaacctagctcatggtggatataatcaatattcagttcaatgaataagtacagtaacatgaattaatattaataatatcaaatattaaaacaaaaaagtttatcatgagctgggcacagtggcatgtgcctgtagtcccagctactcaggaggctaaggcaggagtattgtttgagctcaggaattcaaaacaagcctgggcaatatagtaagactccataaaatgtgtgtatatatacacatatagatatatatagaaggagctgatatatatataacatatatacatgcagatggagctctatgaccaaatattatttccctctctaaaaacaattcaaccagagcagatcctttttaaaccgtttcacatagctaagaaagattttacttgaaaataggtctctgtagcagctcaaatgtttgaaaacactatttcttaccaaggactcatagcacaaaatgctgtcagtaatcagcctgtgacttgattttcccacaggtcaactttgaatttttgatgaaaggctttccctatgtttctcctgaacttttccagtttataagcacacatgactctggagacatagacatatagataccgacagaagcagtactatcaagagagaagacttacaaggagatcataaacccaatttaggtcataaaaacaggcagaataaggtatatcatagaaagaataaacctgtgattaattaccttaatggtcacctctttatctgcaatccggatggtcacagaagcttgggacacatggttttccrtcatcttctctacttttacaatctctttaggaagtagagagcttcctgaatcttgaagttcaaagcgctgtaaaattacaagaaaatcatgcaatttacttttcattttagcattaacattggctatctgacagattacaccttaattacaagtgaaatccattttatattattatataaaagtagaggttaggccaagggcggtggctcagscctgttaatcccagaactttgggaggccaaggcgggcggatcagagggtcaggagatcgagaccatcctggctaacacggtgaaaccccgtctctactaaaaaatagaaaaaaaattagctgggcgtggtggcgggcacctgtagtaccagctactcgggaggctgaggcaagagaatggcgtgaacccgggaggtggagcttgcagtgagccgagatcgcgccactgcactccagcatgggcaaaacggcaagactccgtctcaaaaaaaaaaaaaaaaaaggaaaaaaaaaaagtagaggttaaaaaaagttaatgaaaatttttttctattcctactaataccattctacttacaataattattaaagatcatattaaaatagtccctaaaatttactaaatgacaagaaatggaatcactgaattcctgacctggtagaagttcatagtttacatttcttgacaatcaacttcctagaaggagatgatgagacccttcaaaatatgctgaaataggcccatattggtttattctttaaatcaatcgaagttaatgtgttacctgaaattcatgaaaacagaacttcttggacatcattctgctgtcagctatgtgaatagcttaactaaaattattataacaattttccacagcatatggtacagtgctttctacactataggggtctcaatatttgttgaactggatttaaaaggctagaaccaccaggcacagtagctcatgcctgtaatcccagcactttgggacgccaaggcaagcggatcacctgaggtcaggagttcgacacgagcctggccaacatggtgaaaccctgtctactaaaaatacaaaaattagctgggcatggtggcacgcacctgtagtcccagctacttgggaggctgaggcacgagaatcccttgaacccagagacagaggttgcagtgaactgagattgtgccactgcactccagcctgggcaacagagcgaaaactttgtctcaaaaaaaaaaaaaaaaaaaaaaaaaaaagggctagaaccattgattcttgatgtggcccaattatcaacgttctaacattgactacaccacttcattccagctagctatatcaaaactacacagaaagaatacaggtaagtatgtgaaagatgaaaataaattgaaaattaagttctatgccttatttataacagcatgctcaatataaaaaactgaatttatttttactattaaataggcagaaattaacccccaaaatcctacactagttttggaacattattactatagtgaaagagttgaaactcaatgaaagaacagatcatcatgtattcagcagaatgaaagaactccagaaaatagatttgggaggaagaaaatcatgtttaacctcaacattctaaacttaacatcccagttcaagtcttcattttgatgtcataagtactcaagacaatcactaactcctttccccaaacctaaaaaaaaacctgtgaatttatactgccattaaaaagttctatatttcatacaatttatatatgcaaatccccacagtatcacataatttgacaagaattgcttccatgttgtagacaaataacaactattgacaccttaatttcatgaaaaaaaaaaagttccactgtattttaaggagaactcaacaggaaaggagcaagacctacccaagtaattaaattcattagaatgtagaacaaatggctgggcgcaaaggctaatgcctataatcccagcactttgggaggcagagatgggtggatcacttgaggtcaggagttcaagaccagcctggccaacatggtgaaaccccgtctctactaaaaatacaaaaattagctgggcgtggtggcatgtgcctgtaatcccagctactcgggaggctgggtcaggagaatcgcttgaacccaggaagaggaggttgcagtgagccaagacgtgacactgcactctgcttggtgacagagcaagactccgtctcaaaaaaaaaaaaaaaaagaaaaaaaatttagaacraagattcattaaattctaggaaaacaaataaatgagcttaaatgtatgttttcccacagctagagtagtgtcaatctaacttgatacaggagtgacgtcagaggacacatattccagaaataaacactatgtcctgagccacttgctacactggttatgtccacacaaataattaaagctaaaatattttagtaaaataaaaatagtaggccagaatacactaagatagtaaaaacctcaaattgcaaggtgaattatcattttctggcatggaaaatttagaggattgttactcagaaaggtattaatcagaaaggtacccccatattctctatctccaactccatcatttaagtttctcagtccaaaagcttgaaatcacccttacctctgtctcaaccctgcatccaacccttcagcaaatcataatgattstaccttcaaactataacccaaatgcaactacttcttatcaacatcacagctggtcagaagaacaatagacatataattatttcaggttacttcctagcaagaagtagaaaataagagtttgttaacttacyactttctgagtatttcctatgaattcttgaatttcaattaaacagtattaacattttcttttttatttttttaaatttattattatactttaagttttagggtacatgtgcacaatgtgcaggttagttacatatgtatacatgtgccatgctggtgtgctgcacccactaactcgtcatctagcattaggtatatctcccaatgctatccctccccactccctccaccccacaacagtccccagagtgtgatgttccccttcctgtgtccatgtgttctcattgttccattcccacctatgagtgagaatatgcggtgtttggttttttgttcttgcaatagtttactgagaatgatgatttccaatttcatccatgtccctacaaaggacatgaactcatcattttttatggctgcatagtattccatggtgtatatgtgccacattttcttaatccagtctatcgttgttggacatttgggttggttccaagtctttgctattgtgaatagtgccgcaataaacatacatgtgcatgtgtctttatagcagcatgatttatagtcctttgggtatatacccagtaatgggatggctgggtcaaatgstatttctagctctagatccctgaraaatcgccacactgacttctacaatggttgaactagtttacagtcccaccaacagtgtagaagtgttcctatttctccacatcctctgcagcacctgttgtttcctgactttttaatgatygccattctaactggtgtgagatggtatctcattgtggttttgatctgcatttctctgatggccagtgatgatgagcattttttcatgtgtcttttggctgcataaatgtcttcttttgagaagtgtctgttcatgtccttcacccactttttgatggggttgtttgtttttttcttgtaaatttgtttgagttctttgtagattctggatattagccctttgtcagatgaataggttgtgaagattttctcccattttgtgggttgcctgttcactctgatggtagtttcttttgctgtgcagaagctctttagtttaattagatcccatttgtcaattttggcttttcttgccattgcttttggtgttttagacatgaagtccttgcccatgcctatgccctgaatggtaatgcctacgttttcttctagggtttttatggttttaggtctaacgtttaagtctttaattcatcttgaattgatttttgtataaggtgtaaggaagggatccagtttcagctttctacatatggctagccagttttcccagcaccatttattaaatagggaatcctttccccattgcttgtttttctcaggtttgtcaaagatcagacagttgtagatatatggcgttatttctgagggctctgttctgttccattgatctatatctctgttttggtaccagtaccatgctgttttggttactgtagccttgtagtatagtttgaagtcaggtagtgtgatgcctccagctttgttcttttggcttaggattgacttggcaatgtgggcccttttttggttccatatgaactttaaagtagttttttccaattctgtgaagaaagtcattggtagcttgatggggatggcattgaatctataaattaccttgggcagtatggccattttcacaatattgattcttcctacccatgagcatggaatgttcttccatttgtttgtatcctcttttatttcattgagcagtggtttgttgttctccttgaagaggtccttcacatcccttataaggtggattcctaggtattttattctctttgaagcaattgtgaatgactactgggtacataacgaaatgaaggcagaaataaagatgttctttgaaaccaacgagaacaaagacataacataccagaatctctgggacacattcaaagcagtgtgtagagggaaatttatagcactaaatgcccacaagagaaagcaggaaagatccaaaattgacaccctaacatcacaattaaaagaactagaaaagcaagagcaaatatattcaaaagctagcagaaggcaagaaataactaaaatcagagcagaactgaaggaaaytgagacacaaaaaaatccttcaaaaaattaatgaatccaggagctggttttttgaaaggatcaacaaaattgacagaccgctagcaagactaataaagaaaaaaagagagaagaatcaaatagacacaataaaaaatgataaaggggatatcaccaccaatcccacagaaatacaaactaccatcagagaatgctacaaacacctctacgcaaataaactagaaaatctagaagaaatggataaattcctcgacacatacactctcccaagactaaaccaggaagaagttgaatctctgaatagaccaataacaggagctgaaattgtggcaataaccaatagctcaccaaccaaaaagagtccaggaccagatggattcacagccaaattctaccagaggtacaaggaggaactggtatcattccttctgaaactattccaatcaatagaaaaagagggaatcctccctaactcattttatgaggccagcaccatcctgataccaaagccgggcagagacacaaccaaaaaagagaattttagaccaatatccttgatgaacattgatgcaaaaatcctcaataaaatactggcaaaccaaatccagcagcatatcaaaaagcttattcaccatgatcaagtgggcttcatccctgggatgcaaggctggttcaatatatgcaaatcaataaatgtaatccagcayataaacagagccaaagacaaaaaccacatgattatctcaatagatgcagaaaaggcctttgacaaaattcaacaaygcttcatgctaaaaactctcaataaattaggtattgatgggacgtatctcaaaataataagagctatctatgacaaacccacagccaatatcatactgaatgggcaaaaactggaagcattccctttgaaaactggcacaagacagggatgccctctctcaccactcctattcaacatagtgttggaagttctggccagggcaattaggcaggagaaggaaataaagggtattcaattaggaaaaaaggaagtcaaattgtctctgtttgcagatgacatgactgtatatctagaaaaccccattgtctcagcccaaaatctccttaagctgataagcaacttcagcaaagtctcaggatacaaaatcaatgtgcaaaaatcacaagcattcttatacaccaataacagacaaacagagagccaaatcatgagtgaactcccattttctaatacactttctttagaattaggttatttaaactgtgaattataattaaataaaatgaaayataaatcacattggatattggtctgtcaggcttccctattcatccttacaattcccaatcctgtcccatcaggccatctactttcttcatacctttttctagattgttaagtactgaaagtgaaattctgcataccatgttgcctgaacaaatatgttgccacaatctctcctgggctcttttctcatagcccctcagcaacaaatacaaaccattactgctctcctcagaagtaaatctgagcccatttaccaccctttcaagaggcaatctagctgcctcctccactcagaacagagctttcagacacatactcctccatactttactagaatgtaagccccattagggcaatattaaatgtatctatttggctcactccaaatttccagaacctagaatcacacatgggacggtcaatggtcaacaatggtttgttaaatgaacaaacaaaattatttttccttcatcctcaaaatcattgatgttttaatcaattcttgttattgttcccactgtttcagtagaaaggacttctgctttaactatgagtagacagaaacccctagaagacttactatgtcatattatggcagcttcatcattccagttcctgagtggaaagcatgttcttccatcatttcaaaacaagacacaagggtgctctgaaaatgtccttttccacctcagctagggcacattttccatgcactccacattttttgtcccttctgcctataaaaatgtttgtctccccattccagaaacagtcatttcttcattatacctcatccttaagtgatctatcatcttttggcttttgttcaccatcaaacttcattgatacatatgaattataatcactgggggttcagcttcatctccaatttaaaatgtaagccccttgatttttggcttacattcccaccactctactaacactgatcttggtargtccatcaataatatcctatttaccaaattaaataaattagttttcttcctattttgctgtttccttctcagtcttttttgcagtttcttcttcatcttcttgaccagtacacagtaaggtacttcaggagtggaactttttattttctatctacattcactttttaaataagctcatcacttgcatgactttacaaaccatcatgaccccgattttctctctccagtacagatctctctcctgaaatcttgacttgtatatgcaactgcctctttgacattttcagttggctaataggcatcttaaatcaaatatgtccaatactcaggtctgatattccctccacctccatattctctatctccaacttcatcattcacgtttctcagtccaaaagcttgaaatcatccttaactctgtatcaaccctacatctaacccttcagcaaatcaaaatgattctaccttcaaaacataacccaaatccaactacttcttatcaacatcacagctggtcaaagctacaatagtgtctcaactggattactacaacagtctaccaactattttttccctgttttcattcataccctccacagtctattcactactcagcaaccagaatgagcctgttaaaatgatcactcatacaacacattcctcaaaaccctctaatggtgttccacctcacacagactgaaagcagaagtcctttccatggattacagagccctacatgatctttctttaccttctgatttctctcctaatcacctctccttcactcactctgccccaatacattgtcctttgcttttcctacagttcccaggtgtgctcctgcctcagcgtttttatactggttatcccttctgtctgaaatactttctacccacaggacttctctccttcagaaatttattcaaatgtcatcttctcagtgacagcatccattcctcaattgatatattatatacttatttacttacttgactgacagtcgcccttcattgaaaaataagctccacgaaggtagaaacttctgttttgcatacatctccagcacaatagtgcctggctaattgattggatggaaggatggatggaatgaataatcttttttgagtgaatattataactcttcatttaacaaggcatctttgcagcatttgaaacagttgctattactttcttcttcaaacagttgttcccaatgctctctaagaatactctccgcagttctgcttctatctctaaccactcttcctctgcctaatatgaaggttctttccctacttatccaatcctgaaatgttcaatctgcagacagatttttcctctctttatacttgcattccttaagttgttacatccatccccatgaattcaactaacacccacacattaacgggttccaagtatttatctttaatatcaaaatacctctagaaccaggtccatattttcaagtctgctagataaaaccaccagaaaaacctcaaattcaaaagggttctagtatatggaattatttagcccccaccacaaatgtgatccttctcccactttatcatattaattaacagcaactatactcacgtgtccaaggtaggatttatggacatttytgatttctcactttctctcatatctcccttaacccacctcatatttcatcrgttagtaacatgtatcatccttcttctgaaacatttctcatatttgtttaattcttatttcactggcctacttcaggtcattactgctttgaccagagctagtcatcatgctacactgcttaaaaaaaaaacaaaacacatattaaaatagttatttattgaaatatctgatgctcctcagacattaatattgtaacttcctcaggagctgaaatcagattgtatccatttctgtatcactacctttctatatgcatataatttgccaaaaaatgaatgctcaattagtgtttgttgaactaaataaaaatactaaatgtaagatccaagtttcttagaaaaaaactatggctcagattacrttatcaatggataagtggcagtatatcctttctaaatcaccaagagaacttaccaatttaaccactgttatgatgcagtcttaactgagaccaagagccaagacacgttactagaagcctggatgtatttgttactaaactgtaagaaagcatactattctcaaagtatagcagattcagaatgagagggttttctttaagacatccttaactaaaagctagaaagtatttcatgactacagaaacatgtttttagagtatgaacatcacatgatgagcaccatctggggaatgaaagtcattccagccactttyatagcttgttcagaaaaaagaaaggtattgtgaattctatctgattgaattttcagtgactaataatttttccttaaaaatagtctaattaagtaattacactaaaatttaaatggatttctaatttgaatgcaactatacattaatttctatgataatctaggagaaaaaataattatcatttatcaaggaaaagttaatgtgtatatatacataccttcttaatttaccattataatacatacttctatttcttaagtaaacatttttttccaaattcaacaatattttattaatttttacctcttctaattcaaaactatttgagcacatatatttcacccacctataaatattagcttaaaataatgctttgaggtaaatgtagaaacttacaataacaaacagaccacatagacttcccagaacagatgataaagaattatatcaataaatactcttccactcttttttttttttgactcttccactcttaagaaaagctatttaagatgctaatctggttgtatacatcattgtgtaatgatcttacaaaaagaaagtacttcattaagatcagacaaatgaacttaagccctcccacttgacagtttactgagttacaactgtccattaactagctcttcacataattaaggtgagaagacagccatactttctcctcttatctaataccaatccctttttcctttttaaaacactctacattcaaatttgaaatcatttctgttccaatataaacgcaatcatttttctacgttccccttaattatggttaaaataaagaccaaaaaatgaagcaacactagctactttattaagaaaattcaactctttaaagatattctataactttataataaatttgtatgactagttttgaaattacagaccaaaaaatacatcaaagtggtttcttggtaaagataaagacctttgttcataactgactttattagacactgaatatcttctctcagtttttttcacaaaaaacattacattgcttcattttatcagaacttctcatgagtttcttcctccctgaggatgtgcccttgttcccaaggcactgcacattgggctgaggggcattaaagttcatctggagtcacgacctttgatcttaaacactaggtactctacttcgatgaccaatggccaatttagcttaggtgttgattaaatcaaagataagttccggttctctttttccccagcacctggaataaaccttgaagtgaactatattgtcagaagatggtaatttcctgactccttgagcctatgaattaatctccccatttccacatggttcttaatatccaccctcctcctctttctgctgctgttcctcctcctccttctcctcctactcttcctctctctctcatacatacacacatacacacacacacacacacacacacacacacacctttcttctctttcatcattggttatttcactgcttccatcctctgctgtctcttccctcctttgtctctttattgaccattattttccccttgcttctttttgcttctcttatagattccgtctctaactacacctctcttctcattatctattaggaacagctgtatattaattttatcttattattattattgacataaccagtcaatgaaaatactgtttctttgggttctttggctaactgctctgaaaaaaaaaaaataccacttaagtaattagaatccaatgttccaytcttctaaggtcttctcattattaatagatacacagagggtgttgtgtatcccaaagaccctgggtagatttgaagataagggagagagaaataccattccatatgcttaamgttgtcaaatcctggcctccagaaactgaaggttctatacagaaagccatacagcttagtggtcacattctatttcttagaaatccacaccttgagscaaaccatgtaagaaaaacaaaaaccatctttcataaggaggaattaattttggtgagccaataagtctctgccaagggtcaacactttaaacatatagttataagacattttagagtgtgactggccttttggaaaacaccactgttaactatacaatgaggaaattatgccacacatattttaaaagaaaaccatgccccacgtattataaaccacttatgacaaaaaatgagaccttcattagtttaaatgaaagctctatagcaatttccatagttttatataaaatacttgcttttcaagttaataaccttcacccagtttcctcaatggttaacatttttttagcacatttccccctccctcctactccccctgcctattttatcagttatctttatctgaacaatttgagagtaagctgcagatatgatgcccctatacccctaaacactccagttggtatttcctgaaaacaagaactgtggccagtataatcaccacataagcctccaaatgaggaaatccacttaatataacactattatccaatccacagaccctactcaagttttaccaacagtgccaatattgtcacttgcttctaatggtccaggatttaattcaggaacatatgatgcatttagctatccaatctcttcagtctcctttagcctggaacatttctatgtttttccctgtctttcatgtctgaacagttttaaagaatagaggcctatgttctatacaatgaccctcaacctagaaatctacaatatttcctcatggccaaacatacatcatgaactctcagcaaaaattccccagaaatggggaatttgggaggcatacaatgtcaatttgtcccacctggtcaagttgaagtttactgtaaaaataccactttcttgttttgtagtcaactgagtcttttggagggagatattcagagattatgtcaataccctgtgtctcatagaggctccacctgccagctttaacatcctttgatgactcctgtctaaattaactgccactctgatggttgccaaatggtgttttttctatttatgtaattccttctagattcacaagtaggcattttacactttaaaagagaactcccatctccatattttttgttcatttctatcagtatggactcatggattcctattttatgtaacaggttaaaaccaattaccatcatcatttatttttatgctcaaattgtcccagatttcagccacttcaacctgggaactccatcattttgacatatcgacatcatttgttgaatatttccttactctctggcacaaaaagatggtccaggctcatcttctgcattccctgacctaatccttttagagagcatggtatttagaaaccaatgtccaggtacttggtatgatcactgctactagaacatcatagtttttttttgccgggggggggggggggggggtaaggtcacagatcaacaggataagaatttttcttagtacagaacaaaatgaaaagtctcccatgtctacctctttctacacagacacggcaaccatccgatttctcaatcttttccccacctttcccccctttctgttccacaaaaccgccattgtcatcatggcccgttctcaatgagctgttgggtacacctcccagacggggtggtggccaggcagaggggctcctcacttcccagtaggggcggctgggcagagggctcctcacttcccagtaggggcggccgggcagaggcgcccctcacctcccggacggggcggctggccgggckgggggctgacccccccacctccctcctggacggggcgactggctgggcagaggagctcctcacttcccagtaggggcggccgggcagaggtgcccctcacctcccggacggggcggctggccgggcggggggctgacccccccacctccctcccggacggggcggctggcctggcgggggctgacccccacctccctcccggacggggtggctgctgggcggagacgctcctcacttcccagacagggtgactgccgggacggaggggctcctcacttctcagatggggcggcttccgggcggaggggctcctcacttctcagacgggcggttgccaggcggagggtctcctcacttctcagacggggcggccgggcagagacgctcctcacctcccagacggggtcgcggccgggtggaggtgctcctcacatcccagacggggcggcagggcagaggctctccccacatctcagacgatgggcggccgggcagagacgctcctcacttcctagatgggatggcgacygggaagaggcgctcgtcacttcctagatgggatggcggccgggcagagacgctcctcactttccagactgggcagccaggcagaggggctcctcacgtcccagacgatgggcggccaggcagagacgctcctcacttcccagacggggtggcggccaggcagaggctgcaatctcggcactttgggaggccaaggcaggcagctgggaggtggaggttgtagcgagccgagatcacaccactgcactccagcctgggcaccattgagcactgagtgaaccagactccgtctgcaatcccagcaccccgggaggccaaggctggcggatcactcgcggttaggagctggagaccagcccggccaacacagcgaaaccccgtctccaccaaaaaaatacgaaaaccagtcaggcgtggcgtcgcgcgcctgcaatcgcaggcactcggcaggctgaggcaggagaatcaggcagggaggttgcagtgagccgagatggcagcagtacagtccagcttcggctgggcatcagagggagaccgtggaaagagagggagagggagaccgtggggagagggagagggagagggagagcaatcctatttttttaactaaatatgagaacatcatagtttttaggctgccttaggagacagctagaaaatatgtgtatgtatacatatacacatactatctctatctatttgttcatatatattgtttaaaaaaagtcatgattcataataacaccaattccaatccaataccttagagttttttcttgccttccccctttccatggttataaatccctcatccaacagtgagaagcataactcttattatccttaatatattcattcatttgctcaatctatttacttatttgctcaacataaccaatctcccaatcacaccagcccctgtgtgtttgctgccctatttatcacagctgtcttcttgttggaatgctgatacctccatgcctggtaaagaatggaggggaagggaaaggaaagaaataaggatggggagagaaaaataggaaaggtggggaaaggagtgaggggaagatgggaaaaggcaagggaagggaaaatgggaaaagaaaggaaagaaagggaagcagacactcacctttaaaacaccttccacagccatcttcccttcatgacctagtaaaatactatatggataaagccactggattgcatgtttgattggcatcataggaaaggaatcctatgtaggagcaaaaatacataggaatgagcaaaattcaaaataatcacagaaaacatctgaaatgtacatatgacattaaaattgacttataaaagtaaccaataggtgtctggtattttctgtaagtctacaaaagcaaatattcattattttctcttctcattccttgccctttcyctgggtaagcttacccattcccatctttcatttatcttctatgtattgatggctcccacacttctatgtctggtcttgacttctttcttgagctctaaacctgaaccctcaattgttcattacatgtgactatatgaatatcccatagacccccatttgaaacagaatacatgtctctaccttattcatcccaaagtacctgatccctttttattcctaagttaatctcatccacattcacttagcttcacagttataactacaaaattagaaagtattcattatcctcaaatccttcctcacattatctgcactgtcaattctgttcaccccactttaaaagtctgttgacaagaaagattagtgaaatttcaatatgaactatctattagatgatactatggattactgttaacatgatatgaagtgtgataatgttgttctggttatgtagaagaatgtcctaattcttagaagttgcatactgatatggtttggctgtgtccccacccaaatctcatcttgaattgtagctcccacaatccccacgtgtcatgggagggacccagtgggagacaactgaatcatggaggcagttaacctccatgctgttctcatgatagtgagttctcatgagatctgatggctttataaagggcttttcccctccttcactctgcacttttctctcctgccaccatgtraaggacgtgtttgcttcctcttccaccacgattgtaagtttcctgaggcctccatagccttgcagaactgtgagtcaattaaacctcttttctttataaattacccagtctcaggtatttcttcatagcagcgggagaacgaactgatacacacactgaagtatttaagagtactgactgcaatttacttccaaatggttcaggaaaaaaaaaaaagaaaaaagcacatgcaaacaaatgtggcaatatattaataatgggtgattgtaggtgaggggattatgaatgttttactgtttttcaacttttttttacatttgagaattttcaaagtaaaatgttctaagcaaaaacaaaagatttcataagaattttcaaaataaaatgttctaagcaaaaacaaaaagatttgataaaagtataagatttgataaacaggaggagaaattctgttctggatgtatagaacaatgtcaacaatacctaggctccctgactcacatgaaacatacatatatacatacatacatacatacatacatacatacatacaagtttaaaaataagtctcttgcctaagatagtattcccactatcttggatggtgccctcctccacagggtctcactgagtgttacaaaagcttcctagtcattccctcacttccaacaaaggtgtcttcctccaacataagtctggtcacattcatagcccaccaacttaatattgtctgataagccactttttccatatcataaaatccaggaaacttcattcatcatgcaaaacatttcacaatagcggtctgacttctccctctaccacacacacttgctttagggatacaacttattctcattctccaaagatactaggcccttttgtgattaaacacatttgcctgtgctttgacttcctgggccttttatcactccagacatgaccgccatgccctttgtgaaactgtagtggacaatgtctgtactctatcagatcccctcagatctgtttgcattctctcttgtgcctcctagctttctcttccaacagcaattgctgtaggtctttctaagaagacgatccttgggctcttgaagccacccttgcacacatgctgggagagcagttagtgtctgggaatttgtgtcccctgagacaaccatgacacagagactgatggaagctagaacagtgtgaaagccctagctcccctaactcaggtaaggacagctctgaggcctaactcacactgcagcacacctcttacttgatcaggctaaagccttccttccctctgtagaactttactgagattgcatgtctagctcctactccaaagctgaaagctctttaggggctcagaacatgtccttggtctctgtacagtttactgcactgcacaacaaattaatctcaggccttacaatatttatagaagagtatgacaaaagcaaactgaagtcattaatccctaatgattaactttcaaaatttttaacatatttgggtatgccagtcattaatttattttacttaccaagatttgaaccgcagctgctaaactatctaaaggaaagtctggaagtccaagagtagaagattcttgggaacmcagagttgtggcaaaggacaagagctgagaaactctaagggaaaaatgatattaaattttaatagttttaaaatataaaatgtrtaagttgttaaatataaaatacaggggccaatttaattaatctaaaaaagatccctaatattaattcttaaggaacaatggttccgcatcataatatcctacttaaaactcagaagctgattagatgcaaatatattcctaaattcatcacaatatttgakgtttttcaccacctggtccaaatctaccctgccagcctcatctctcacatttcgtaatcccaaacctaaactctagcctccaagagttttttatggccctaaaaacaaggcataaactctcacattccatgcttttaaaacaaacaaacaaacaaaacaaaaaaaaaacacttgttgtgttcgaatttcttgattccactctctatctggcaaaaacttgctcattatttaggacccatttcaaacaccaatgcttttatgaagcccttataaagtctcaactaatgcccccaaatattttcaaattatggcacttactataccatgttaaccaaagctattcacatatctttcaactctattagatcttgagtttcctgccaaagatatcttattaattttatcaccaaacatcctaatactgaaaaattcttataagaattctagttgttgaatgactgaattaattaatcaatcaatcaatgaacaggcaaaacaaattcaatattcagtgtccagacatttataaaaatatacttacttctcagcagaaacattggctccaattgaatataacaacttaagttggtcctaaagtaatacagaaacatattaaattaattaacaagaaatgtaacagattaaatgcaaatgttttgtagatacaatccaaccttttaattaagcagacactaaatatttaacagcaaaaaatcatttattgatmcatttcattttctaaaagaaaagccagccttttaaaaaaaatccttcaaataatgccataataatttttcttyctagtttccagagmttttctttactctttattctcatatctttccatgacctactcaggaagacattcaaaactgcagtaacatttttatagcattgaagttcttgttataaatagaaaaactgtttaacaaataaattatccttggtcttacttaccttgaagggtaaataataaatatccctggcttgaaatcgagaacgaagaggggggtctaatggattcccagaataccttggcactggcaagcccaaggcaatcactcggaaattttcactaactcggacaattttccaagaatccaactcttttttggtatgatcctataaaagtaagagatccggaagctatagcataaatgatacaaatcacaactgtaagagctgccaagtccagggacttaggacttgactgttgagaaaactgtattggagaacactctcaaatycatactgtcaaggaaggcagcaaagtgaaatcaggttcaggatgccagggcaggctcacaacatgaagactggggtgtttgaaaggaaaagcagttaacacaccaaggaataaaggagacttgggtcagatctccaagccttagtcagtaacacagaggaaaacagtcagggggtaaggaaaatacatgactagaggttgtaacaaaggtagtccccgacgggcagatcaccagcaaagctgtgattgattaccagtggaccttaaatagataattatgtttatggttattcctagcaaagcatattactagcaataactaacatgttttggaaacttactatgtggtaagcacattccatggatttttctcatttaactttcaccagaatccaatatagactatctcctttttatatgaatgaatgaatcaaagttcaaaggagttatataacttgcccatcgtcctgcaactagcatacagtggagcttagagaatggaaacagtatgggttttagagtcacaaatcctggctcaactgcttgatgtacacttttactaaatgttagcgtatgcatggtattatacctttggaaccttagccttcttagtaggaaaaatatcacctacattattgtgactgctaggaaaactaaatgtgtaaatgtatgtgcaaacaagtggcccaaaggaggcacctgttaaatctcatttccttccttctctgcctaactcttatcaatggctcttcacattcttcagcagcaggatctacagtattgactaaatttgtgtgaatgcacatttgtacactctgagagaaacgtccacggctttcagcaattcttcacagcccaaatgacaatatasaaactcttaagatggcacttaaggcctttcctggcagaagccctgattctctcagtctcagcaaccagtacacgcccgtccccttgaccctccttccgtgaccctgtgctccaatccatctcccaaytgcagctctccaaacacatgatgctgcttcaccaacactactccatcttcttggaacaacacccttttcactcgcacaccgtaaacacaagggtcagtcaaagctcagcacaaaaaacatcttcatatcttcataaaactcagatccccttccctcatcagaaccatttttgtacccttttactttatcttatgcaagcttctatcattatttatttgtgcatttgcttctatacatgactgtctcatgctagctccacactcttgaaaggacttattacctctagtgtataacaggacaaatgtctgttgactgattgcatgaactaattttaaaaataataattatttcaatcatattttggtatgaatcaaaatcagaaatcatacatctaattaacacactgacactatgtcatatacactagaaagtgaaaatctggatctagccctgtctgagaaaccaaaagtagaatcttcagagagctgactaaatatttctctttttcatttactcaaaaatgttaaataaaatataaagttcatacaaactgaactttgtatctctttccatagtaacagaattctactataatcacctttatgaaaccaataacatttttgagatattaaatttagaatatcaaagctacctagaaataaatggggcttaagttatggtgttagaatctttttaccataaaagttgtcttaagatgatagtgctttgtgaagggatcttatctatatgctgtgaggttctcatgagacagattctatgaacacagaaataacatttaccgataaaaacttatgtgtttatactgatatttactttgggagaaaaatgtagtagacccttctcacttaataataagcattctttgcgtactaagcctattttttttttttttccgacagagtctcgctccctcacccaggctggagtgcagtggtgcaatcctggctcaccacaatctcagcctccygggttcaagcgattctcctgcctcagcctcccgagtagctgggattacaggcgcatgccaccacgcccagctaatttttgtatttttagtagaaacgaggttttaccatgttggccaggctgatcttgaactcctgacctcaggtgatctgcctgccttagcctcccaaagtgctagggttacaggtgtgagccactgcacccagccactaaacctcttttgactcgcatatcctgaattcctatccaaagtaatatgttcaataactttgcacagaattctactataaagaatatatcaaactttttgttgtgaagtaactcctatacttaaaaaaaatgattccatattctgagtattttttttccaaattatttactaaaaatggttaacactaatgtaatctctagtggcaagtagttattttgtaattagaaagcatctaaagagaaaacgttctgcataatagccttttaaaaaataaagttaaaagctttcattttgataaattaacaacatgaatcaatgaatttaactttttctacttgattaaatccttgattatctccytctgattatatcagaacaagatgttccatgaatagatctagaggaaaatgactgtacttcacagtaaagcatcatctagaaactcccacaaacagtaaagaaacagactgcttctggccctgccggccatgcagcatcagttcaatcagaccctctggcattcattatttagggcctagtgtgttctgggctcatattagcaccctgggagcaagatcaagaagtatgagacacagatcttgctcgtgatcaatttgcaaccaacctggggtagtaagattagcacatatgtatctctacagaacaggtatgagactctaggtcctagaatgtacaggcagagcagtcagtcacagaaggctgggttagccacagagagatccagcatggtacagcttgagctggatgaacaagggctaaatgtcttcttgtcatttgtgacattacatgaacccatctcccaagcctctgaagagtccccacattccctagttgttgccctctttatatgcatgtttctcacagcatttaatcattccacggtacttattcattcattcaacaaatagtttttaagcacctaccatgtgccagccattgatctaggaacttgagataataccagttacaaaaatccctgcccttgtgaaacttatattctagtagagggaagcagacaacaaagggcactgtattgcattgtaaaaacttttgaattttactctgagtggaacaagaagctatcagggttagagcataggaatgcccccaaatggatgcactgttaaggcgatcactgactgctgtgttgagaccagtgtcaggaaggaaggatggaagcagggagtgcagttaggaggttcctacagcaacctcggcatgtgatgctggtggcttgggtcatcaraacaggatatcctttaaatattttattcatttctgtcaatacctactggacctttagcttcctgaagctaaaaactggactttcttcagctttgtatccctggtgaccagcactatctagaagtcattagccttttattaaatagttgttaagagaaagaaaggggggaaaaaaggagatgggaaaagaggaagaaagagaagaagaaaaaataggaaaaaaaatggaaaagagaatagttattagactgaccaaaaaaaaaaaagacagtaaaaatctgggaggtgttttgacaaagtctaaaacagaagagtgttgtaaagctgtaaattcatgactctagcaatttacccaagataagggccatctgaacatctgtcctgattccaacagagccatgtcttayacaataaaatggcactgcccatagcttgacagcaaagacaaagcaacaggattttcttttcttactcggagaagtttgtcgtaacgctcagcagacatcaggaagcgtccatcttcaagctgcatctctctgttttccagcaagttgttcaaaacaggcaaaacattcctctctgccttttccaaaccttccaaaatgagagttctgccttctgtggctgcaygaactgcacactatttccaagaaacgtaaaagcaaaatgagaatactgaagttgcagagcttggcctaacattacttgtaattcaaatttaagttgcagttcttgttatagggaccagaaatcaataaagctgagttccagatcttgttttgctttttctgcctatatgatcttaggaaagtgattttacctctttgggcctgtttattcgtttgtaaaataaagggattgaaaaaagaggatcgctgaagttcctttcagccttgatattttagattatatacccaatgaaataaaaaactaacagctatctatgaacaaggaacataattaaacaagggcacagattccacaactggaaaagaaaaatgaagacagttatctgccctacctatcccacaagcttcttgtaaggatcaaaaaagctaggtgagaaggcttggagactgtaacatttgtaaacataagtcatcatccaaataaattgaggttttgtgtgatgatgctgacaacattacacacttagaaacagaaaaagaatcagattttacattggccaatagcagactgacttaaccagtactacaagtcttccaataaattttaagaaaattagtaatggagaaaattaggaaataaagtaaactgtaatacaaaaaaattactatagatatgaaaaaaatattttcctttaactataggtccttaataacatagaaaactactttttgtcaaaatccttcatgttctgctaaaaaaggaaaacctgtcatgtttcttctgcacattcaaccacagacagaggattaatggtgctaaatttatactgttattccctcccttaaaactcgccttcattagtctccatggcactgcattgtcctaggaaaattgttttgtcttctgtgcctgtccattaaatgtagatgatggccagaattacatccttaacacacagctcttcttaccctactaggacctccctgaaaatcttattcaatcacatagttccaactaccacctttatgctaatgaccccccagaatcttggggttctgaaactccccctcattagtacctcatatggggtccctcagaccccatgagcacctcaggtcccttgtacaaaactgaaaatatcctattttctccaaacctgcttctcttctttattttctatctggggtgtgagcaccattgacccaggtcagagcccttgatgtttcttgaactcatccctttctaccccttccctagttcaagctctccttacctctcagatcacctcccaatagtccaagctccttaatttggcatattagcctatcacaatgcagcatctacctacctctccaacaccatctcctgatattagttgcctcacatgtggtatttctgtgacaataaactggttatctccttctacacatgtacataccatactgctttaccagaaaaatgtctttacttatactgacccctcacttaaaatttaattttcyctatagtaattgtccaaaaaaaggatctaaatgtttgatgaggggaaaacatatctctatttttttaagacttaatatccaaataaatttctggagtagcaatgtactgattttccaagtgtagaaaagaggcattgcttaatcaagcttgcatactatcctcttttaatacactgttgaattttgcactgtatagtagagcttagtttatttcaagtgtctacataatgttgtaaaatgataaactttatgaaagccatattagactcaagagaatcatccattttaagatcatttcatgaataatccctcaaatatatcattactgcaatattttaattctcttctaccagagtagccatcttgttctagaagctttatttaaaaaaaaaaaaaaaagcatgggtagaagtgacttagtagtttctaaagaacaacaacaaaaaaaagaatctcatttttgctagctgtataaaggacaaagtcgtagaaatagattctgggatattaaaagtcaaaatattggccgggctcagtggctcatgcctataatctcagcattttgggaggctgaggagggtggatcacaaggtcagaagttcaagaccagcctggccaatattgtgaaaccccgtctctactagaaatacaaaaattagccaagtgtggtggcgggcgcctgtaatcctagctacgtgggaggctgaggcaggagaatgacttgaacccaggaggcagaggttgcaatgagccaagatcgcacccctacactccagcctgggcgacagagcaagaatacaaactacttcttataaaaattcacatttcagttaaggtttcaattaagcttttgctcgcaaaaatatatttacttcaagaaagcacagctcagaacaaaaaagaaattaattgttatcataatctagggtaatattattttaagaaatctaaaacttttagcaatctttcttatacgacagactaaatattgcatttgactttttaaaaactccatagggatgaaaacccacattctttgagataaaactagaaatatacagatcaaaatgtaatggttcaccatctatgggccacaaaaagcaaagtcttgacaacataggacaacaacaaacactgcagctccactttcattcacctcaggtgtactgtggtctgctatgcattgaatctcttcaaaggaattcagaacaagctatgcagagagatcaaaaacagaagctaaatacacaaggttttttttccatctactctaatggcagtactgtgaccacaaagttgaaaaagtagggatagatggaaaaargataacacaatttaatgatctcttgaaaatctggtcaatgctgcaacttttctccacagtcaaatgcatgcaggtatatgtatagagcagagacctcaatttaagaatctctactactaacgaatgatagaaatagaaaatgatcaatttcgcaaacaccacagtagtaactgctgcagtcaagaatccaaaatggatggtaaaattagtggctaagtatattatgagaaacaggtatttgtatatactcaaatatctcctcacaaaatattttaaaatgacaaagtgaaaaataatacaacactggagaaacctagcagataccaccttaattaaccaagtgatcaaagtcaatgtgaccagtaatgagctatatcaatctcacataccagacttctaatatgataccctgagatgggcacaacatcacttttatattattcttgctaaaaatgcatcatttcaatcaaatcataaggaaacatcagacaaatctaaattgagcaacattttgcaaaataattggccatgaggaggaaaaaggagatggctgctgcagggacttggttggggaccgtgtgggagataacagtctttttttttaatgattcaaaaacttgagcatgtttaaatgatgaagaggagctagtagaggaatacagaaaagagaacgtataattattgaaataaaactaaaagagttgctactagatgttggagatagtttggtctgtttactgagtgggaacatggtagggcctacaagtttataactgatacatatcaggcgcttccaagtatactatttaatttaaccctatgacagtcctctgaggtacacaatattttacccaatttactggaagagaggttatataatttgaaaattgcatggctaaaattttagcctgtccttaaattgaaagaaaacgagtagagtaagaactaaaaaaagtcattaaataatcacatctagaggttactagtaatctcagagagtctggttttactaggcataggaatttgctgtgttacctatgcagagaaacgaaaccaaacacacacaaaacatctctacacacacaaaatactcagttcaacatagagcatacatggtcatacagcagtgcaatctgcctcaaagtcttctacagataactacaattacatttccccaaatcaacattgtttttcaaatcatcatcaactcagcaatgaaactaaccacctgcctaaaaatatctgaaaagagaggtagttaacagaaaaggctcattagtcttttaaatcaacctaacccactaattgtgctattatcctcatgtgacttaattaagaactgtgatacgtcctgtttgctaaattgttttcaagatataacaaacttcagtttaagcctcttttcatttgttttacttgcaaattttcttttttttttttttttttttagtttttcttacaaaaacatttaccaaagctctttctttctcccaaaaaatcttaatgtaaaaaaaaccaattaggcaaagatccagtttctgacagtggcttctaaatgtctctaactttcctttaataatccattagacaaattgccaggaaaattctgtaaaagaagagcaattaggagtgagtttaatttaggaatacaaagaaccatgactagataggcaaatcaataaaacagaatttaagaaggtatgctagtctctctagaaatgtaatgtatgaacaagaaactcttgtaaatgaaagaggttagagagatttgatataactctctcgcactgttggaaaaaaattttttttgctattattacatgtwttacctttcctatgtaaggaaactagttaataaaaatgattaaacattttaaaatataagaaaagtacacttcaaattagtagaaattaggaatttggaaaagaaatccaaatgaatttaaaaatttaatgatacaagtaaaatcatgtaattactggataatcatatgtgactttttgaaaataatcttgaattgggaaaaatccaataactcaaaggcagataccattaagaaaaagattaatagatatgactacattcaaattggtctatacagcaaaaaatatctcaaactaaaagactgaaaacttggaagatgtttgtaacatatacaataaagaccacataaatatctttagtataaattgaatttttatagattattaagaaaattaacaatacccctataaaatgcaaattagcaccacaaaaatatatattcaacttcactggttattagagagctaaaggtaaaacatgatatttttagactttcaaattggcaaggattaaaaaagaatgataatatccagtgtcagtaagattaagatgaaaccaaaactctcattcatggttggtcagagtgcaaaatgataagcttatggagagtaacttagaaagatatataaaaatgtaaatggctatgttattaacccagaaattctacttcaataaatttatctaaaggaaatgataagtgtacaatgatgtgtattatccagtcatcaaaacactgttttataattacaaatgaacccaaaaaccgtaaatgccaatctgtgaaggattggcaaaaaattgtggtaattcaatatgatggacttctacacagatattaaaaataatgatatagctccatctttacctgtgaaaaggcccacaatatgttgtttactcaaaaagctataactccctttccaggactaagcgaataaggaaagagaataagaggacaaatattgagaacatacaaggaactcaaatcaattgcaaaaaaaaaagataagatttaaaaatgggtaaaggatctgaacagacatttctcaaaagaagacgtacagatggccagtaaggaaatgcccaacatcactaatcaccagagaaatgcaatgaaaaccacaatgagacctctcaccccagttagaatggccactgtgaaaaagagaaaaaagtaatggatgttgatgaggatgtggagaaaagagaagttttacacactgttgatggaaatgtaaattagtacagccattataaaaaacaatatggaggttcttcaaaagtttaaaagaggagctatcatctgatccagcaatatatggactgaatagatgtattaaagtattgtgtccgaaattggtaggttcttggtctcactgacttcaagaatgaagccgcagaccctcgcggtgtgtgttacagctcttaaggctgcgcgtctggagttgtttgttcctcccggtgggctcrtggtctcgctggcttcaggagtgaagctgcagaccttcgctgtgagtgttacagctcataaaagcagtgtggacccaaatagtgggcagtagcaagatttattgcaaagagcgaaaaaacaaagcttccacactgtggaaggggacccgagcgggttgccactgctggctccggcagcctgcttttattctgytagctggcccccacccacatcctgctgattggtagagccgagtggtctgttttgacagggcgctgactggtgcgtttacaatccctgagctagacacaaaggttctccacatccccaccagattagctagatacagtgttgacacaaaggttctccaaggccccaccagaatagctagatacagagtgtcgattggtgcattcacaaaccctgagctagacacagggtgctgattggtgtgtttacaaaccttgaggtagatactgagtgccgattggtgtatttacaatccctgagctagacataaaggttctccaaggccccaccagagcaggtagatacagagtgtcgattggtgcactcacaaaccctgagctagacacagggtgctgattggtgtgtttacaaaccttgagctagatacagagtgccaattggtgtatttacaatccctgagctagacacagggtgctccaaggccccaccagagcagctagatacagagtgtcgattggtgcactcacaaaccctgagctagacacccggtgctgattggtgtgtttacaatccctgagctagacataaagactctccacatccccaccagactcaggagcccagctggcttcacccagtggatcccgcaccagggctgcaggtggagctgcctgccagtcctgcgccatgcgctggcactcctcagcccttgggtggtcgatgggactgggcgccgtggagcagggggcggcattcgtccgggaggctcgggctgcacaggaacccacggaggcgggggaaggctcaggcatggcgggctgcagtcccgaggcctgccccgcgggaaggcagctaaggcccggcgagaaatcgagcgcagcgccggtggsctggcactgctrggggacccagtacaccctccacagccgctggcccgggtgctaagtccctcattgcccggggcctgcagggccggccggctgctccgagtgtggggcccgccaagcccacgcccacccggaactccagctggcccgcaagcgccgcgcgcagccccgattcccgctcgcgcctcttcctccacacctccctgcaagctgagggagccggctctggccttggccagcccagaaaggggctcccacagtgcagcggtgggctgaaggactcctcaagtgccgccaaagtgggagcccaggcagaggaggtgccgagagcaagcgagggctctgaggactgccagcaccctgtcacctctcagtatcactctatatcctgtgaaaatggactattgtcaactaaaaaggaaaattaataaatgaaaaatcttcccaaccttttttctgattaattcaatataaattatttattaattttacacactatctaaatggcaacaagaatggatgttttatagtgcaactgaatccagaggcaagaatattataaggggattgcaaatgtgtaaggctggtataatttttagaaaacaaaagacaaaaatgaatcgcccaagattttaaaattttctccctatttgccctttggttacacagttgtagacccagaacatatgaaaactaaactttaaaaatataaataagaatactagccaaaaggagaaaatcttgagaagatgctctttggaaacaaaatctgaaacgctcaattttcagaactaatactagttagttactatttcaggatcactttgcttcctggttcttccttaaaatagcctataaaatcattaaaatacttaatcagtactatcaaaaagtactatcaaactttataaatatgactacatttgtaaagaataaattttaaaaataagcaactgaatagaacaaatggcaagtccattaagtaatatagcaacaacgtactgtgccataccatatatctcagactcaactggagagaaaaaagtaaatgttacaagttttctgcccaatagaggcccaagcatcttaacctccttacatcaatacccactttgcctcatttgcatagcatgtaagtgtgggggtacaatctcgaagtattcttgttctttcatacctacgtttcatctccccagtggattcttagctctacraaggatgagaaccctgtcttttatggcatactggtacaaaactggctcacagcaggctattagcatttatggaataaacatgcaaccactcagttaaaagatgctgttatgtaaggttaggaagaatttttgtaggaaggatgatagttatctatgcctacacttgttatgaaaacagaatagaacaagtttatcagcatgagagatttaggctagatagttggaagatttttctatacaggttgtaacataaaataattgtagtataatttttttgaaatctttcttaaaaaggagcaatatatgtatttttttaatgtggaatgactagttgtaatcattcctcaaagtagaaattagaccatctataaggagctcttcttgtccttcaagctacagaacttccagagacctaattttctcaaatagaattcagaaaaaaatgcagcaggatccttctggcccagccatctcctatcacagctttaaccactcaacacatggacatgaaagatttcaagataaaagtaggtgtgtgacctaaaatcaaaaagtatctaagtccctgttctagatttgcttctgatttgatataagaccttaggcaaacaattaatctggatgtctttgtcctcatttacaaaattagaatatcctcaaggggtattatacagtgtaacagtttaagagtcaaagcagtactgcaaaaaaaaatttaaagtaactgaacctactaaaatataaactattattaatgtagtcattatttaataaaaatagagtccataaagcttcaaatttactcaaaatagctacggtgtaaaagtactgaggaagctaaagaaaaattttttaaattacatttcaagttcttcattttaacacatcagaatagaatcggattgatttttggttgctctaccatttacttattataggtgacttagattactcactgagcctccatttctctctaaaactaggctcattttggtgcttatctcatagactgtgttgcagattaaatcagataactttgggcacacagtaaaccttaaaaaacaattagttgctgttactgttatgaatacaatcatcattgtcactgtcatcatgatcatcatttttttttttttttttttttacaagcagagtctcactttgttacccaggctggattgcaatgactcaatcatagctcactgtaaccttgaactcctggcctcaagtgatccacccacctggcctcctcaagggttggaattacaggcatgagccactgcactcagctcatcatcacttttttagagaagtagcataatatggtaaaagaacttgagctttgtaattggacagagcctggttcaaattttacctctgctatttatcagttgtacaaccatcaccttctaagcccctgttacttaatctgtaagatggaaaagtcatcttcctcctaaggatgttctgagaattaaatgcaataatacgaagcacctagcacaacgtaggtctcccaataaaagtttccttttcatctctctcttttctttcaaaacaaattatatgcatctgtcaaacagttaacattatacaagtaggccagtcgcagtggctcacgcctgttataccagcacggtgggaggccgaggtatgcggatcacctgaggtcagttcgaaaccagcctggccaacatggcaaaaccatgtctccatgaaaaaatacaaaaattacccaaatgtgatggtgcgcacctgtagtcccagttactcgggaggctgaggcacgagaattgcttgtacccaggaggcagaggttgcagtgagccgagatcatgccactgcactcyagcctgggtgacagaacaagactccatctcaaaaaaaaaaaaaaaaaaaawawawatatatatatatatatatayacacacatatatatttgcatacatatatatgcaaatagaaaggagttcttctgagtatgatagcaacataacaacgagcaaacacttgagttctaacacagaggccacagtaaacagagagagatcttccccgactgtccaagtgcaaattaggatgtatttttaaataatgatgtggttatttgtactagtgaaaagtgagaaagaacctgaataaccaataatataaaaaggtagaaaaaataggaatgttaaataaataacagcatacctatctgatgaaatattgtacggatactaaaaatcatatctttgagtaacatctaatgtcaaaaggagatgctcctgataaaatgccaggtttttaaaaaacactataaactttatatacatggcataccatttttgtaaaaattatacattatacattataaacatatgcacatagaaagaaatacagaaaatattcatgctgctcgtcttgaagaagaatacagcaagtaatttttcagttctttcgtatgctttttagtatttactcaattatgctacccttctttactgtttggtttccccaactaaaacataagctctataacaacagagatttttggtttatttgttcactgcatctggataatgccttgcacatatcaatcattcaatatatatttgttaataaatacaaatattatatgcatttatatcaaatgagcatttatgacttgcataatcagaaaaaataaactttactttgaaaacaatataaattccctattacatattattattaacctaattctcgccttcaaaggtagcagttgagtttaaacctcttgctttatcatcaatcatccttagttttaggtgagaattagtgaagagcttaatggccatgaccaacaactcaggatttgggtgtttccagctgatatgtcaattcgtaataacctggataccagtcataggtgcgtacaatgggaatgatactgaaaatcccaaactttctcccaatacccaccagagagccacaggtactttttcacctatattgggccatcaagttacagggatcacctaacagtgaataaaaatactgcccgtcccttcagcccaaacatcaaattcaatggttaagaacactgaataaataaaaaggaatttttaaataaaataaatgcaaaggcctttcggtgtaacaaatatacgtctagctggtagtcaactggcaaattcatctatctagaattcaaatggaaattatccattgtgatgactcaaaatagatgtcaaaaaggcaaacatccatagaaaaccccacctggtgttttcatgaataaattaaggccagaacccacttattcttaatttagttaaaattgtaataaagttgattacccaaagaagaaatctaccatcaatatatgtgtcacttatgttccagacagtttttaggtgcctgagatgagcaagatagacagttatattctagcgggggaggagagccaacaaacatgggagcagggaaataggtaagttcagagagtgctaagtgctctggagataatatcatgtacgatgacagcctggtgcggcatggtatatttggaaagggggtaggcatggccagtggctactttagctaagaaatttataacctgaattacaaggaggcaagaatataaagtacaaagagaaactcacaccaagcagaggaaacaccaagtacaaaggaaggcaactgcagctgcagcctgcaaggcaaggagtaaaaggaaaggtggtagacaaacattcgatcctatagagtgatgtaggccatattacagggtttggatctgacggtggatgtaatgggacattactgcatggctttaagcagcaaggaactggtaggatctgattatgaacagcacagtaaggaatactaactgcaaggaaataagataaaataaaaatatgaaaatcagataagacctcaaaacgtcatctgaagcaataaagaaaggactaacattcctgcacctcagtcacgggctccgaaggtatcagtgggattagagcacagtaaataacagatgctcatcagaatgagcaggattcaccaacaaaacataagagtgtaaaatgctgccaaggtaagacacttaaaatatttataaactttataaactaaaatatatatcatctaaaaatattctttttagaaggaccaaaggactgtataacttcagaaagtttcatctaaataatttactataatggtccaacaaataaatctttagataatcgataaatttagtttcctaaaacaatttctaaaaagctaaagtgttaagctctccttaaaataataaacacatttaaaaatccattttctcttccttactatttgcaaattataaaattcattttaaaaatatatttttaaatccatactctaccaaacaaagccagttctttcaccattatttaaatatattcctgactcctcacctctacttaggtcattgttccagcttctaatccctttacccagctcctcactattccagctcaaatcccatccctcactcttatcttctctgagtatagaaaagaggcaaatttttttaaaaccttgtcaattgggggtggtgtggggtttacagcacctttatgtgtaactatcatgggaacagaaatgtaagcaatcaaaagctgtatgcttaaaaaatatcctgaattttaaattttattatttgtattaactgcaatattccagatttactgtttagtagcctaaatcttcacataagttttaaatgtattaaaattttagggattaccagaccatatattttagaaaattaacccaatatgaaatttaaaaaattaaacacccttaatcaaataactctatccactattccaaacagcttgcaaagaagttcagtggaaatgatcctgtgaattaatatctaccctttctaaaagataaccaactggaaaaagaaattaggactttcctgttacctttcttaccacgtgaaaaatgcaggttgttcattctaaaaataaatataagcttttgaataaaaatatatttttataatgtggatattatgtgaatcactaggtttggaataaataccattaaattgagagtcgaagtcaacaagatagaaatataaattcaaattcatatttcaaaaggcacttagtgcttgcttcggcagcacatatactaaaattggaatgatacaaagaagattagcatgacccctcctcaaggatgacatgcaaattcataaagcattccatttttttttaagggacttcttcacaaagaaaacacagcaggggtcttaaaaatgtttaaaatgatgaatacaagaacctcttggctacaagagagaatttttcattacaaaactggacagttagatataaaattattagtaatggttgttacctattaccatttataggtaatgtacatgagcacaaagagctctttaaaaattccctggtaaaattatactataaaattatatctgataattctattctttgttttaaaatttgactataaattatttaaaatttttaatttgcattttaatgtaagaactttgaatctaaaagacaaacataaaaatggctatctatactacagtgcaataaagaaactaaatcatcttccctccccaaccttttaatctggaaccattccttacctgttttgacttttaggacattgaacattttttaggagtccaagttgttgtcttacagactatcacacattctagatcagtctgattgttaatgttaaacgtttttagtaagagtactacattggtaatgctgtagtactcttagtaaacctgttggagtgctcttaccctgtagaggtaaaccctcattgaatcacatcagcattcacatcatgataattctgttgtatgagttggttaatggagccaatgccagatctcatcattgtaaaggtacattattttttcccatttgtaatcagaagtaatctatgaagtgaacttttggcattatgtaaacaaaatgggttcctttaaaatttgtttatgtgctctgtctgtgaaggattactttttgattatgggaaatctgaacttctcagacattcccactagatgatgctaaatttttttgaaagccatcatttaaggtagtgtctgccaaatctctccattttaagtgcatttttttcttttgtaattaataagtaacacatgaggccatgtgaatatcctattcctcaaaaactttccactcagtgattttttacaattacagtcttttaattataacgtaacagtgtgcccatgctaaagtttcaaatgtaaagaactacgaaagtctcttccttatcctactccagactccaactcacacttctgtaacatactttatgtacactctgttaactgctccttgtgcatccttctggaagttttcaatgtataaacaaacatatatgcatttcttgtcttctttttaccacaaatgggatcacagtatacatactgtcttataaatttatttttttcacttaatttatcctgcacatctttcctatcagtacgtacacattcatctcattctttttaataactaaagagtattctacttaccattatttcattagtctctttaagtatacatcactctgttcattcacagttttatacaatttcaaacaatgttacattaaacatccttgtacatataacttttcatgttttatgtgaatatacttgactaaaatttctagaaacataactgttgagtccaaatgcatgtgtaatttcttttcttttgataaatattgccaaactttctttttaaattgcattaatttctgctgccatcaacagcaatgctgttttctcatctcttcttcctcattaatactggacattagcaaattctttaatctttgccaatctgagaggtaaaagaaaaatagcagctgacagtcttttaatttttatttttgtaaataagaaagtcaagcatcttttcatgaaattattgaatatttgaaatattttctctatgaattgcttatttataggctctatcctttttctattaaatactcctaagaacaatattttaaacaatgtatttgaagaagtgtaaaacaagtttcattataatgttcataaaacattatgttagttggtaatctgtacctaagatactctcccaccagagaaaaagctatagtttctggaagtgtatactctcactacctttaatamccctttacccaagtgacctatagattgaaaatactttaataaatatgctagagaatctcctatatcaaatctccttaattcattttttaataaatcaaatttctatagscaagtagtaggaaacaatttaaaattatgaaatcagcacattgatctttaacgttttagaaccattaatttcatctaggatttctcatttagtacaaaaccaagaagacatttccaagaacagtgaaactaaaaatctaaattaaatctgtctagagagagcacaatacaactaccttttactgttatatgagctactctctttctactttaaaaatcaatcttgtatagacctggagtacacagtcatgggctagagtgtgayagaacttgcctgatcaatgtaaaaggctgtgcctgcacggatctctcgtcgctgtttgagatcagtttcagtggtgtcccttgacagggcaatgtattcgacctcccgtttggtcagctcctgtagagaagagaatgaaattattccaaaaataaaatcaaatttccagcatatgatttggaactagttatctgacaatgccattgcccatgagaagtgcattgttaaacctaattttgggttgaaacttgttgaatctaagtttgagaaaaaagaaataaattgaactttaatcaaaatatctatatatctcctcagagctcttcttctatggcactcaatcctactacttaagcaataataatcaaaatccaattttacaaaccttaatttttcctgtagaattatttccaaatataatgagcaataatttgacagtattactatttggtttgcccacaaactatagccatttctgtaagtaatgttcatcttttataaaggggtgatttagattaatttattccatggatcaatgtttgccaagtgtatacagtatgttaggtactttaccaaatgtgaaaacaaggtaaaaatcccaataatcagctgggcgctgtggctcacacctgtaatcccagcactttgggaggccgaagtgggcagatcacttgaggtcagaagttcgagaccagcctggccaatgtggtgaaaccctgtctctattaaaaatacaaaaattagccaggtatggtggcgcatgcctgtagtccctgctactcgggaggctgaggcaggagaattgcttgaacccaggaggtggaggttgaggttgcagtaagccgagatcacaccattgcactccagcctgggcaacaaagcaagactccatctsaagggaaaaaaaacaaacaaacccaataatcaggtaaacagaagataaatacacatgcatagttgtaggagaagtagaaggaggattttaaaaaggagaggaaggaggtgatgaaaaaggaggaggaaaaggaaggaggaggagtagaaggaacagaaagaggacaaaaaaataatcaaaaaaatcatgagatttgaagaggaaacgatgcagaattcacctgtttcaagataatttatccatccttaaaagtcttttgccctataatcatgtacaaaaagtttttaacattatctttggttttacaatgttgaagtaaaaacaatgacattctccaatcaaataaggcacacaataagtttttactaaacatgaggaacaaactgagttacttaagtataatggaaaatgggaatgaacatgccattaatggcaaaaagggatactgccatacaaggggattttttctccatcctatctccatatgctactgataaaaacatattattgttgtaatttaggyctcctttaatgtgcctgtccccatgttacataactttatgtacgtaaaggaggaaaaaaattttttttttttttttttgagatagtctcactctgtcacccaggctgttgtacagtggtgcgatctcagctcactgcaacctctgcttcccaggttcaagcaattcttgtgcctcagcctccagagtggctgtggctgggactataggcatatgccaccatgcctggctaatgtttgtattttttagtacagacgggatttcaccatgtcggccagactgatctcraactcttgacttcaagtgatctgcccacctgggcctcccaaagtgttgggatcataggcatgagccaccgcacccagtctaaaaggaggaaaaatttttaaatagagaaaacaccgactagtggcaaagatgtggtgatacctaaggatgtttccctaaaaacaaatgaattggctgagagagcacaattttggagtaaagtggcaatttctcttgttggcaggtattacttcttgcttctggaacacatcactagtatcttcatgtctgcttcattgactggctggaagtgatctccctcaatgaaaaaccctgtcattacaataggcttccattagttgacaaagttatatatgcctcttattgttaaactgcacagagttacaccctgaactgctacatgatcattatcctcagcttcctttgttcttcattggccgtgacaagcaccaaagtctccccaggtgctgattcacgaaagaggcatgagtacattcacaaacagccccaggagcagcagatggaggaggcagcagtggtatgatttttttgaacaaactacaaaagtccttttatataagtataaaataaacacaactatgaaattattcctatttattttctcatggtttaccatgcttgccccagattttctgcctttaaagatctcatccactctggctatcactatacataggctgttattcttaggggcaatagtactcactgcaaggaggcttaagctagtattaagttttcttatgtatatccacagcctatggttgcctcagctccattccacaatttaaagttgggggtgttgttggtttcttttttaaagatacaggtttcacacttacaaatctatgttgcatttttgaaccaacgaggcttctcataatctcttagcccttctcatttcacattctcaataagcttcaaagccttgccaaaaacaaaatctcagtgagatattgtggtctttgaaataagcaaggtagcaagtgcacatcttaaaattaaaaaggcttggccgggcacggtggctgtaatcccagcactctgggaggccgaggcagatggatcacaaggtcaggagttggagaccagcctgcccaatatggtgaaacccatttctactaaaaacatgaaaaattagccgggtgtggtggcatgcgtcagtagtcccagctaatgagaagctgaggcaggagaatcacttgaacccaggaggcaaaggttgcagtgagccaagatcaagccactgcactccagcctgggcgacaaagtgggactccatctcaaaaaaaacaaaaaaaaaaaacaacaacaaaaatggctctagatctgtaattctcagtagctgacttcgcattcttagataagacacttttaccttacatattaataaagtgaggatggctctacagtggcacgttttacctcacaaactagttctagggataaataaaagataaatgagctagtgcgagttaggctctgatttattcatgtatttattatttctgccccacatgatttttgaagtaccaaagaagattcgccactgaaataaaagagtgtacaaggtagatttcaatagcattgaaatcaatcatttcatagcaaataatacaaggaatctttaaataaggtttttctcttcatcctaaaaaatgtcttcagaacacagcttcatctggtggcattctttcattaatcattagggtaatgcctaccaatactgacaaaatagcggaaaacatttgtacattttctttctttttttttttttttttttgagacggagtctcactttgccacccaggctggagtgcaatggcacgatcttggctcactgcaacttccacctcccaacttcaagcaattctcctgcctcagcctcccgagtagctgggatcacaggcgcctagcaccataccctgctaatttttgtatttttagtagagccgaggtttcaccatgttggccaggctggtctcgaactcctgacctcaggtgatccacccacctcagcctcccaaagggctgggattacaggtgtgagccactgtgcctggtcaagacttgtaaattttcttatttgggttgagatttgagcttcagttcacttaacaacagttctcaaagaactgcaaatgtttaagaggacaacatgtcagaaaggggaaacatgggatttcaactctagctctattatttaccagctggataaagcttgagtgagttatttaacctctgtgaacttgttttctcatctatttaaagaaaaaacaaggagatatataacacagaagagatactctacagaccttaggcttcctttaaagactgcataacttccaaaagtcaagggaattgtttggctttttaaaatgtgagcctgagataagggaatgttcactaagcagtataataccaagttttgctttgtaatttcagacttgctgattctatctgctactcattgcctgaatttatatctcttttctactggaagtgggggactttctagttacagtaaaaatttgctacagctatgaaaatttgctaaagctatacatttgactcccaaataacttatgccaaacactttataaacaaatcaccctttgatgtcagcatttgtttcaaataatgactaattctgatattttttataaattcttaatcttattttatttcatagcttacaaagttaagacccttagaaattgacaagaattaactgctcaccaagtactgcatagcaatagagcgtcgaagaggcccaggaggtcctattagaaaaacatcttgccccaaaagatccttctgcattatccatcttagatgctgaactacagattgagccagagagtctgaaactataaagaaaaaagagaaaatgaagtgcaaatttaagtattacttataatataaatctccaagtaatgtggacatatttatatatatatataaygtatataaaatatgtgtttatctgtgtatttataaacatatgtatataaatatatataaacatatgcatatgtttatctggacaaacatgtagacacctgctgaattttcacatagttttacaataaaaccattattgtcgatgctaaaacaagattaagtttataatatcacaaagaattacatattccttacttgaaagctttccataacatttgaataataacctataactgttcctaacgaaataaaagcgatcttcaaggatgatttgaggaactgatttgattaatcacaattttatagtccaatctttttgttctaaaagagagatatgatcaaatcatcccagatagttaatgattatcatagtcttaaaaaatctgagaaaagcatactacaacttaagttggtaatgggttgtaagatcatggttagaaaatttgatgtagacttaaaactacttctttagaattaactatttaagtctattcttctataccaaattcttttgtgaatagaagaccaccccatgcaacgcccttccaggtctactattaaatcaccccatcaatgtgctcatcttctaactcagcattttctaaaatgtttaaattaatacaattagtttggttttgctcatatgtaaatcacccagtgagtccattcctgggtataaaagaaaaactcataaccttgtacatcaagagacatgtataatactcagagcagaactgtccaaaataaaactggagacagaacaatgaataaatacacagaatgaaatattatacagcaacaaaaacagaataaaagacccccacttccaatgatatgcttaacccttaaaggtataatattgagtgaaaaaaaataagaataaatcatgtataataccattttaataaatctcagtaaactagcaaatgaattctttagaaatagatatatatgtgataaaacagtacttgaaaaagcaaaacagcaagggaattgtaagttgatgataactggatacctgggggtaaggagtggccatggaatcaaagagattcttatgtatagcttcaaggatattggtaatattctagtttttacattagatgtgggttacagtgtttattatgttgcattttatacagacagacacagacatctgtattacataatgtcttttgtatgtagcaaatattccacacgtgctaaactttgtttaatcaccccactgaggtcacggattagttcaaagatccaactaagaaagcctaggactaaatatctagtgcttctagtgcttctcctcctctgacagcacaatattgttaggatagtctctcctgtactcccctgccccaaagaaagcaaacatttaatctttggaaaagataattttctgattttcattattctgataggaagatcaaggacaaggttttgggtaaattgtttggtttatcatgtcactggagtcacactaaagcatattataatctccccaaaacaaatgcccatatgtctgagactcattacttcaagtagaactgtttggtttctctcttgtttttacaaatcctctaagacattcatccctagcaggataaaatccctaagacatgcatccctagcgggataaaagttggttcctggaagggggacttgaaaaaaatgtttagatgttacaatagtttgtggtcctcggccaggcatggtggctcacgcctgtaatcccagcactttgggaggccgaggcaggtggatcacctgaggtcagaagttcaagaccagcctggcccacatggcgaagcctgtagtcccagctactcaggaggctgaggctgaagaatcacttgaacaggggaggcagaggttgcagtgagctaagatcacgccactgcactccagcctgggcgacaaagtgagactccatctctaaaaggacacagtacataagcagatatataacatatctatggtattcaagtttcttggggttaggaaggaataataacagggagaaaatatccgcaggagagtaataaagaaaagtagattgaaaaatactgctctaagaacctatactttttagcaatctattaggtagtttcatgatgctagcatgcaactggcctgagtctagagagttaatcttatttataactatcacatgcccttttacctattttcttttctacttgaagcttaaatcaatctttataatatacagtctattctttcttgcttcaagacaagtcagcctccttgctgtttaaggatgaaacaaaataagagttaagacaccttaacttctttattagtaaaactacacaatgttctctatgctgtaaatctattacctcttcctactctgatatcaaacatataattaaaaacttaaaaacactttgggttttttctttacattttcataaatctcagcttaatttggccacaggcattctctatagtactctcacagttttgtgtcactttgtattcaactttggcaatgtgcctgaccttccattatctggacttgataatttaaaatccaaaatttgtaaagttctagaagttcaagccaagttggtttctttaacttcctcccaccttttattatttatgactattggtaactgtttataattatggagtctcaatttagttctatacttccagtttgttttgaatgttttgaccttggaaccataatcattttcaagattttttaaaatctaaggtagcagttcctaatcaaatgtgaggcctgcccctcataaattgtctgtataataaagtgctgatgtttaggaataacttatcttttcattttttgaagcaaactggagcagaattgaggttatagccataatagagacatttgtacagcagtgtactttcttaagtagaagagaaaagcatggagttatttaaagctagagccctgggaattatgtataatcatgtttatgctcctgggagtgtcttccacttcagcatgatgcacatgtactgagaaacactgccttaaggcacatctgactagtctcagtccttcctttattcttagcactcagcagtggttctcaactggtgaccatactgctaccattctaggcctgccaggaggcatttggaaaatgtctgggagtactttgggttgttgtaaagctttgggaaatgagaaataatttggtacaccactgatattttgtgatggtaaatgcaatgaccaagatggtctcatcctgcccagtatgtcaatggcaccatagttgagaaatattgtgtagtcattattttttctcaaggcctctgttgcctgcacaccactaatgagtttgtcacaattaagcccagagaaagagtttctctctatttcctttaccttctgaaagataaaacttttagcgaggaaatcagtagagaataagttctacctttagagtaagtctgtaggagttgtcaggatatctaaggctctcatcatcacattccaattttacataagtttcttaatacatataagctacttctgaatcccatggctggccttgtagtctatggcataccttcacaaagaaaatacattttccctgcttttattctcccccaataacaatactaataatggctataatttattgcattcctatcaggtaccaggtaaacatacaaacgatttttcacataggatctcataacaattctagaaagcagcagacctattgtataaagacacagattcaagacagattggctgggttcaaattccaactctactatttactagctatgtaaccttaatcaagttatttaacctctctgctcagtttcctcatctgtataatagatacaattgtacttacttataaagttgttatgaggattatattaagcacttagaacagtgtctaataacagtaaatgctgtgtttgttaaatactcattactcccattttacaataagaaaatcaaaattggaaatgtagtatcatttgtctatagctgctaagtccataaaccaagatttatacctaagttgtttaagtccaaaacttgtatttcagtcattatgttctacagtccctccaaaagcttttcaacaggtgtccagcttcaggtgcaagactttccctacaagtgtggacctctcagggctacatcaaatttagcagacttgctgttccagccattagttctacttctttttggtggtatcaatggtatgttttattccttttattaaaatttcaaagttattttgtaatgaatattatgttatcagaggatctacttctcaaagaaaatccaactttcacttattcatgttttagtatagcgtattttaccaaaaagcatgtctatatttaatttgtcaggaaattgcactaaactactgaaagaaagcatcatgcagtgctatgtggtatctgtggtatattttacattaatgcttgaaactagctgtatttttagaatggcctcaagaaaacatgagtcatacttaaaagcacgccagaaatagaaacaagattcaagactgtacattacgaacatctgcaaaacaaagtgccaaactgccatgcataacctaatataaacatagcacagtacacgagagaaatccccaacttcaatgttttcaggcacaaaatgctaccttccaggagtccacataataataaaccgatgtcaaaataatcccaaagagcttgatcctatattctaagattccttttctatgtaaagataaaaacatgtagttcatactggcctaaatccctgattcaattcctaaccaatatttgttttcaaaaaatatgtactattttttgcccagccatattcaaaggctttaaagtaattttatcatagttatctaaattataattttctcccttcatgaactcaaattttcatacatataaaagttaaaattaaaattctagaaaattaagcataggtcagattctattataataaatccttcaaaactgttgatgttttcttagtatcccaaaaagcagcataatataatggaggaaaaaaaaaagtctttgaagccagacagacctactgygatttttcatcctgtcttttatccatgtccttagacaagcattttgactctttcaggtctgtttccttattttcttttttaaattttttaaattatactttaagttctgagatacatgtgcagaacacgcagatttgtagtttccttattttcaaaataaagataataatacttattgagtatggtttgtgaggattataggtaaagcaccatgcccagtccctcagccaatgagaaccaggtacgggagaattattcaagtctcatcctcacctgcaaactcctatctctgctgtgtaccctggacaccaggctgtatagtgtggatttggtggatatgaataggctcctgagtttacactcaaattacctgctgggcctagaggcaaatctgaagaataagggagaaaggaacccagtacttactacatcctcactggtaaagcctatgttagagtactttcacttgacatttcattaccatttcatcaccccacaaaatagstcagaaagaatctacatctaggcccataacatgcccctgaatttgatttttctaccacatcacaacacaagatttcaaaggaagcatgactaacctcctcactgcaactacgtgctcatctgcyaaactttcccctatttaccatgtaacattctgtagttagatataatggacatgaagggtgaaaatatttagcaccaaagtcctcattatttacaacacgaactaaccgaactaaaaaattaatttattcacacagctatatttattaaggacctactatatgctcagcaccaagaatacaaagatgaataaaataaggttctttgaagacatcaaaagaaaaatacatatataaaacatcagcttacgtagcttatataaagccaatcatttataaagtgggctgatgtttctatgatccaatatagctgttatcaaaactaaatctacagcactggccagcacagtgctcagcacagagaagatattcagcttttcttaaaattggaaaaattcatcaatatgtatgaaataattatacatatccatattcaatgactaagtgtcatgttgttcactttttgtgtaagggtacaaaaataagagtatacatgtatatttgcttgtgtttgtatagaaaaatgcaagacagattcccctgaaactaatactgtgagaattaacatgaatgaaaataggggtgaayatataatttctcaatgtatatctttttatattgttttgatttctgaatgacaaaaatatattagttctgcaaaaaagttatttttttaaagtcatgctttagaaaatattttacataaggaaatgtccacaatatgttgctttatgaaaatggtctgtacatacaaaagtatggtctgcaaataaaaaaaggtaagaaaacattctgtatatacaaaatagtatatacagtacatactattattttcttaaatgatacacatatacatagtcattttttaaaacactagatacgtttcacaaagattcaagccatacaaagtgtgttctccgaccaaaattaaattaaattagaaattagtaataaaaagatctttggaaaatctccaaatatttagagactaaacagcataattctacatagcacatgggatcattgctaagtggtatcagtaagatggctgacttgaagttcctagcactcctcccccataaaaaaaccaagccaaacaaatgaaaaaacgacatttccaccaaaataaataaaggagagccctggagaactgcaaaggagtaggagaaatcctgtagagcacagaaacccaggatggccacatagagaaggaaaggaaactttgcctctgccaaggatgatctcagcccctatttggggatcagcttggacccaggaggtatttctctctgcaggaaaaaggtaagcagaaggacactaccagctcgcatcactactatggatacctgcagtctttgctaccagagattcctgcagtcctcacaggctctgagcccagctgagggagctccccagagtacacattctgtgctactcccagagaacaaaccgacactgtgccttaccccagtcccctgcctgagctgctactgtgttgtaaccagagccactgctccagtgcatcctgttccagggatgggtagtcattgcacccctccatcctggaggctttgccatcactgcagcacagctacctggtagcccccaatccctgaatttagctactgctatgctccaagttaccctgaagctgctccatcccctgcatcccagacattggtgtaccctgcccttcaaggcctgagctgaagtgatgctctcactggggacccacagcatcaaactacccccagacaccacacccatgcaacatcctatcctcctggatgccccaaccctccagcacaccagagaagatgtcctacccagtgccatagccgacactgtaccctgcctctcagggacctagcacctcctccaacccacgtagctgtatattttagggccaagctgatacggcatcttacttccagggaatcacagccttggatgagctgtgcctctgccctacaggtcaaatggccaaagggcctttcctccctagaacaggactaggaactcagaatctgagctgctgaggagccccacctcccgaggcagtagactgaggctgtactgctccctgtcccctgggccgtatctgtgccttgccatttctgggttcttgacagtgctgcacctggctgcacagaacctgggctattgctgagtgtcaccatcccagcatcaagagtaattagtgtgtgacatctcatctcccagggctcaagttgccactgtgccctgttgattctaggtcccaaattgcagctgtgccctattccctggggcctgaacctttgaggctccccttcttccctggagccatgccagttctgcacactgccctccatggtcagagccacagctatattcctgccccctgggtgtaagctgttagaaagtgcttcagaggcaagagcaaacacattcaaaagctagcagaagggaagaaataactaagatcagagcagaactgaagaagatagagacacaaaaaaaaccttcaaaaaaatcaatgaatccagaagctggttttttgaaaagatcaataaaattgatagaccgctagcaagactaataaagaagaaaagagagaagaatcaaatagatgaaataaaaaatgataaaggggatattaccaccgatcccacagaaatacaaactaccatgagagaatactataaacacttctgcacaaataaactagaaaatctagaagaaatggataaattcctcgacacatacaccctcccaagactaaaccaggaagaaggtgaatccctgaaaagaccaataacaagctctgaaattgaggcaataataggctaccaaccaaaaaaagtccaggaccagatggattcacagccaaattctaccagaagtacaaagaggagttgataccattccttctgaaactattccaaacaatagaaaaagagggaatcctccataactcattttttgaggccagcatcatcctgataccaaagcctggcagagaacacaagaaaaaaagagaattttagaccaatatccctgatgaacatcgatgcaaaaatcctcaataaaatactggcaaaccaaaaacagcagcacatcaaaaagcttatccgccatgatcaagttggtttcatccctgggatgcaaggctggttcaacatatgcaaatcaataaacgtaatccagcacataaacacaaccaaagacaaaaaaccacatgattatctcaatagatgcagaaaaggccttcaacaaaattcaacagcccttcatgctaaaaactctcaataaattaggtattgatgggatgtatctcaaaataataagagctttttatgacaaacccacagccaacatcatactgaatgggcaaaaactggaagcattccctttgaaaactggcacaagacagggatgccctctctcaccactcctattcaacacagtgttggaagttctggccagggcaatcaggcaggagaaagaaattaagggtattcgattaggaaaacaggaagtcaaattgtccctgtttgcagatgacatgactgtatatttagaaagccccattgtctcagcccaaaatttccttaagctgataagcaacttcagcaaagtctcaggatacaaaatcaatgtgcaaacatcacaagcattccgatacaccaataacagacagagaaccaaatcatgagtgaactcccattcacaattgcttcaaagagaataaaatacctaggaatccaacttacaagggatgtgaaggacctcttcaaggagaactacaaaccactcctcaactaaataaaagaggacacaaacaaatggaagaacattccatgctcatggataggaagaatcagtatcgtgaaaatggccacactgcccaaggtaatttatagactcaatgtcatctccatcaagctaccaatgactttcttcacagaattggaaaagactactttaaagttcatacggaaccaaaaaagagcctgcattgccaagtcaatcctaagccaatagaacaaagctggaggcatcacactacctgacttcaaactatactacaaggctacaggaaccaaaacagcatggtatggtaccaaaacagagatatagatcaatggaacagaacagagccctcagaaataataccacacatctacaaccatctgatctttgacaaacctgacaaaaacaagaaatggggaaacgattccctatttaataaatggtgctaggaaaactggctagccacaggtagaaagctgaaactggatcccatccttacaccctatacaaaaattaattcaagatggattaaaggcttaaatgttagacctaaaaccataaaaaccctagaagaaaacctaggcaataccattcaggacataggcatgggcaaggacttcatgtctaaaacaccaaaagcaatggcaacggaagccaaaattgacaaatgggatctaattaaactaaataccttctgcacagcaaaagaaactaccatcagagtgaacaggcaacctacagaatgggagaaaatttttacaatctacccatctgacaaagggctaatatccagaatttacaaagaacttaaacaaaattacaagaaaaaaacaaacaacccvatcaacaagtgggcaaaggatatgaacagacacttctcaaaagaagacatttatgcagccaaaagacacatgaaaaaatgctcatcatcactggccatcagagaaatgcaaagcaaaaccacaatgagataccatctcacaccagttagaatggcaatcattaaaaagttaggaaacaacaggttctagagaggatgtggagaaataggaatacttttacactgytagtgggattgtaaactagttcaaccattgtggaagacagtgtggtgattcctcaaggatctagaactagaaatatgatttgacccagccatcccattactgggtatatacccaaaggattacaaatcatgctgctataaagacacatgcacatgtatgtttactgcggcattattcacaatagcaaagacttggaaccaacccaaatgtccatcaatgatagactggattaagaaaatgtggtacatatacaccatggaatactatgcagccataaaaaaggatgagttcatgtcctttgtagggacatggatgaagctggaaaccatcattctgagcaaactaccacaaggacagaaaaacaaacaccgcatgttctcactcataggtgggaaattaacaatgagaacacttggacacagggtggggaacatcacacaccggggcttgccgtggggtggggggagcggggagggatagcatttggagatatatctaatgtaaatgatgagttaatgagtgcagcacaccaacatggcacatgtatacatatgtaactaacctgcacgttgtgcacatgtaccctagaacttaaagtataatttaaaaaaaaagtgcttcagagaaacagacctcagctttgtgggagaaatgtatccacttttgccttggaaagtgaaccaacacctcaagtcatagtgtttcagtaattttgtaagaccccgggcctaggaattctggacctgtgccccagatccccgtgctgctgcatctgcctgtgggctgtgtcagactagacatcaagagagataccctcatctaagactctccattgtgggaaagacaagaacaggaggatccctgaagctttggccactgaggatcctaataacctatgctgccaccatcactgacacaaactcctgcagcctagaccaccaagacacctgtagtcattgctgaaattgatcataactaaagaagctgtagctacacagagactacaccactgctccaacgtgcccaaccaatatcttcaggcccatctgcaggggaaagtcttcccctaaaaaagccactctgtaaagtttggaagaggtgactgctctatcaaatgcacagamatcagcatcagaacacaaacacacacacaaacacacacaaatgaaaaagcaaagaaacatgacaccaccaaaggaacataataattccccagtaactgaccccaaagaaatggatatttacaaatggcctaaaaaggaactcaaaaaaacagtcttaaggaaattcagcaagatataagagaatacagatagaaaattcaatgaaaacaggaaaacaatttataacctcagagattcaacaagcagatagatatcataaaaaagaaccaaatagaaatcttggaactggagaatgcagtcaatgaaataaaaaatacaagacagagcttcaaaaatagatgagatcaagcaaaaccaaaaatatctgaacttgaagatagctcttctgaaattacccagtcaaaagaaacagaaacagaaacaggagagaagagaggaggggaagggaggggaggggaggagaggagatgaaggaaggaaaagcggggggaagggaggaaggaagaaaggaaaagaaaaaagaaagaaaaagaaaacagagtgaaaaagagtgaagacagcccatgggacttatgggacactactaagtgaacaaatacattatgggatattcagatggagaggagacaaagacagggacagaaagcttatttaatgaaataaatgctgaggtccagaattcctaggcccggggtcttacaaaattactgaaacactatgacttgagstgttggttcactttccaaggcaaaagtggatacagttctcccacaaagctgaggtctgtttctctgaagcactttcttttttttttttttaattatactttaagttctagggtacatgtgcacaacgtgcaagtcagttacatatgtatacatgtgccatgttggtgtgctgcacccattaactcatcatttcccaagtattggaagatatatggacatcagattcatgaagcttaaaagtctccaaacagatttaatccaataagctattctccaatgtacattataattagtctgtcagtcaaagacagagagttttaaaagcagcaaaagaaaagcatcaagtcacatataagggaatccccattagactattagatttctctgtagaaaccatgcaggccaggagagaatggaataatatattcaaagtactgaaagaaaaaaactgccagtcaaamatactacacccagaaaaaactgcccttcagaaattaaggagaaataaagtatttcccagataagcaaagactgagagaattcatcaccactggacctgccttacaagaaatgcttcagggagttcttcaagtggaaataaaagaatggtcattaatattatgagtacatattgaagtataaaactcactggtaaatacataatcaaatccagaatactccgatactgtaaacagtgtgtaaatcatacatatctctagtacgaaggttaaaagtcaattcagtcaaaaataactaaagctaaaataagttgttaaggaacatataatataaaaagatgtaaatctgaggagtgcgtaaaagtctagagtttttgtatgtggcagaagttaagttgttatcagcttaaaatagtcaattataagatggacttttgggtggagccttctggaaaggtggcagtggtacagggggctgaggtgaaagtggatggcagcaagccaaaactgagcaagaatgagctgaagagatccctgaaagccaagaagaaagtggcagagaaggaggccaagcaggaagaactcagtgagaaagttaaaccaggccacagctgctgtcaccaaccataccactgacagtggtgtgggtactgaggagaagagcytggacccaaatcaacactacaagatccatagtcaggcagtttatcaastgaatgtcaatggggaacacccatacccacacaagttccatgcagacatctcattcaatgacttcatccaagaatatagtcaccagcagcctgggggtcacctgaatgatgtcaccttaaaggtggcaggtaggatccatgctaaaagagcttctgagggaaagttcatcttctatgaccttcaaggagagggggtcaagttgcaagtcatggtgaatcccagaaattataaatcagaagaatttattcatattagtaagaaactgcatcaaggagacataattggagttcaggggaaccctgggaaaaccaagaagggtgagctgagcatcattccttatgagatcacactgctgtctccccacatgcatatgttacctcatcttcactgtggcctcaaagaccaggaaacaaggtatcatcagaaatacttggacttgatactaaatgattttgtgaggcagaaatttatcatctgctctaagatcatcacatgtataagaagtttcttggatgaactgggattcctaaagattgaaactcccatggtgaacatcatcccgggggagctgtggccaagcttttcatcacttatgacaatgcgctggacatgagaattgctccggaactctatcataagatgctagtggttggtggcaccaagcagatttatgaaactggatgccagttccagaatgaagggattgatttgaggcacaatcctgagttcaccacctgcgagttctatatggcctatgcagactaccacaatctcttggaaatcacagagaagatggtttcagggatggtaaagcatattacaggcagttacaaggtcagctaccacccagatggcccatagggccaggcctatgatactgacttcaccccacccttccagagaatcagcatggtagaagaacttgagaaagccctggggggtaaagctgccagaaactaacctctttgaaactgatgaaacttgcaaacttcttaatgatatctgtgtggcaaaagctgttgaatgccctctaccttggaccacagccaggctccttgacaagcttgtaggggagttcctggaaatgatttgcatcaatcctacattaatctgtgatcatccacagataatgagcgctatggcaaatggcaccgctctaaagagaatctgtccaagcactttgagctgcttgtcatgaagaaagagataagcgatgcctaaactaagctgaataatcctgtgccgcagcagcgggtttttgaacaacaggccaaagccaaggccacaggtgatgatgaggccatttcacagatgaaaacttctgtactgccctggaatacgtacaggcatgggcattgaccaagtcaccatttttctcaaaagattccaacaacatcaaggaagtacttctatttcctgctataaaacccaaagacaaggagaatgtagcaaccactgatatgctggaaagcacaacagctggcacttctgtctagaaaataataattgcaagttgtataagtcaagcatctttgcacatctgcaaaagatcaaggtctgcaagggaattcttgtgtgttgctttccatttgactaccacagttccattcagccatcagaagagagacaaggaattaagaatttctttttattccttgttacyaaataaaccatttgtctcctctcaaaaaaaaaaaactataagatgttttatgtaagcctcatcatacctgcaaaacaaaaaagtatagcagatacaaaaacaatacagagaaagaaatcaaagcatagtsttatagaaaatcatcaaatcacagagggtaacaacagagaaagaaaggaacaaaggatctacaaaacagccagaaaacaaataacacaatggaaacagtgagtccttacctataaataattatcttgaatgtaaataaattatctaagagtggctgcatggatttaaaaaaaggggggaattcaattatatgctgcctacaagagacccactttagctttaaggacagacaggacaaatgtaaagggatggaagaagataagatattctatggaaatggtaaccaaaagaaagcatgaatggctatactaatatctaataaaatagacttcacgtcaaattctgtcacaagagacaaagaaggtcattatttaataataaaggagtaaattcttcaagggaacataacaattataaatatatattcacccaacactgtagcacctaaatacattaaagcaaatattaatggacatgaagagataaagagcaatacaataatcatagaggacttcaattctcaattttcaacaaaggatatatcaaccagacagaaaattgataaggaaatactgagtttgaattgcaccttagaccaaataagcctaacagacatatttgaaatttttcatccaacatcagcagtatacacatttatctctagcatacatgaaatggtctccaaaattgtccatgttaggccagaaaacaagccttaacaaatttagaaaaccaaaatcatatctagtatcatttcagatcataatgatatgaaactagaaaacagtaacaggaagaatcctggaaaatttacaaatatgtgaaaatgaaacaacatgctcttgaacaaccagtgggccaagaagaaaccaaaagggaaattttaaaatatcttgagacaaatgacaatggaaacacagcatgccaaaacctgtgggatgtagcaaaagcagttctaagagcaaagtttacagcaatagatgcctacattaaaaagattctgaacagttgaacgttatgcctcaagaactcgaaaaaaagaaataaacccaaagttagcagaagaaaggaaataaacatcataacagaaataaatcaaatagaaaacagaaaaaccatagacagaatcaacaaaactaagaggttttttgaaaaaataaaactgataaaccttcagcttgtttaaggaaaaaaaaaaagagaagactcaaataaataaaaagtgaaagtaaagacattacaacagatgcctcaggaataaaaaggaacataagggacacaaataaatggaaaatatcccatgtccattaatattgtgaagatgtatatactatccaaagcagtatacagattccatgcaatacctttcaaaatcccaatggcattcttcacagatagaaaaaacaatcctaaaatatatgtgtaaaaatacaaaagatctcaaatagccaacatttctgagaaagaaaaacaaacttggaaacatcacacttcttgactttaattttttttttttttttttttttgagatagggtctcactctgtcactcaggctggagtgcagtggcacaatcatagctcactgcagtctcaacctcccaggcttaagcaatcctcccacctcagtctcccaagtagctggggctacaggtgtgtgccaccacatccagctaattaatttttttatagagacagggcctcactatgttgccatggctgatcttgaactcctgggctagagcaatcctcctgccttggcctcccaaggtactgggattacaggcatgatccacagcactcagccctgtgttacaaattatgtgtgtatcaaaatatcacacttaccccagaaatatgtgcaactagtatgtatcagtttttaaaaaggtatgatactggcaaaaaaaagacagacacatagaccagtataacagcataaagagcctagaaataaattcaaacatatacagtcaaccaatttttgacaagggcatcaaggacccaatggggaaaggatagtctcttcaataaatggtgctgagaaaactggatttccacaggcaaaagaatgaaatcagacctttaacctataccatatacaaaaatcaactctaaatgtaagacctgaaatataaaattcctaggaaaaaagctcctggacattggccttggcaatgatttcttttttattatctcaaccaaaagctcaaactacaaaagcaaaaacaaataagtgagactacataaaactaaaaatcttttgcacagcatagaaaacaatcaacaaaatgaaaaggtaacttatcaattaggaaaaaaacatttgcaatccatatatctggtgaggggctaatatccaaatttataaagaattcatataattcaatagtagaaaaacaacccaatttaaaaatgggcaaaggatttgaattctccaaagaaggtgtaaaaatggccaacaggtatatgaaaaggtgctcaacatcattaaatcaggagtcagggaaatacaaatcaaaaccacaatgagataccacctcacatgtgttagcacggctattatcaaaaaatcaaaagataaatgtcggcaagggtgtggagaaaagagtgcgcactgttggtagacatgtaaattggtacagccataatggaaaacaatgtggycatttctaaagaaattaaaactagaaatactatatgactcagcaattcttctggatatatacccaaaggaaataaaatcacctcataaagatatctgtactccatgttcgttgaagcactattcacaatagcaaagatacggaaacaaccaaaatgtcaatggataaatgaataaagaaaccatgatacaggttgagcagctctaatcccaaaatcattaattcaaaatactctaaaatctgaaatgttctgagtgtcgacatgacaccacaggtgaaaaattccacacatttgactgcatgtgataggtcgcagtcaaaaagcaggcattcaacacccaatttactaagcatccccaagggaaaaacagaactaccttcaggctacgtgtataagatatacattaaacacaactggacttcatgtttagagttgggtcccatccccgcaatgtcgcaaatattcaaaaatttttaaaaatctgaaatgcaaaataactctggtcccaagcatttcagataagggatggtcagcttgtatatctacacaatatttaggccaggcacggtggctcacgcctgtaatcccagcactttgagaggccgaggcgggcggatcacgaggtcaagagattgagaccatcctggccaacatggtgaaaccccgtctctactaaaaatacaaaaattagatgggcatggtggcgcacgcctgtagtcccagctactcaggagactgaggcaggagaatcgcttgaacccgggagacgaaggttgcagtgagccgagattgcrccactgcactccagcctgggcaacagagtgagactccgtctcaggggaaaaaaaaaaaaaaaaaaagaatatttattattcagcctttaaaaagaaggaaatcttaccacttgccacaacatgaatgaagttggaggacattatgctaagagaaataaaccagacccagggttaaaaaaaaaaaaaaaaaaaaaaacccctacatgagctcacttatatgtggaatctggttggggcggtggggtgcagggggagtaaaaaatacagagatacagaaaaaaaacattggttaccaggggtaggggtgggtaggaaatggggagatacaggtcagagtatttaaatagcagatatgtaagatgaccaagtctagagatctaatgtacaatatgaggactataagtaataaaactgtactgtgaaattgtaytgaaattcctcctaaatgagtagtttttagctgcttttgccaaaccaaaaaaaacatgagtaactatgtgagatgatggatatgttaatttgcttcactatagtaaccattttactatctatatatatctcataacatcatgttatatgttacatataaaaaattaaaaaaaaaactaacacatgggcaaagaagaaattaaaagggaaattacaaagctttttgaactgaatgaaagtgaaaacaatgtatcaaaaattttagcattccactaaagctgtacttggggaaaattttacagcactaattgcctatcctgagaaaactgaagtgtttccaattaatggcttcagcttctgccttaaaagactagaaaaagaagagaaaatgagatccaaagaaagaaaataatattcatcatagcttaaaaatcaatgcaatagaaaacaaaaacacaaagaaaaatgaatgaaaccaaaagcttgttctctgagactaacaataaaattgacaaacctctggtcagactattaagagagagaagacacaattcaccaacatcatgaatgacagagagacagacagacagaaaatacagatacttcagatattaaaaggataataagtggatattgttaaaaaaaaaacacttatgctaatgtattccacaacttagaagaaatgaacaaagtccttaaaagagtcagctccttttttagttgacacaattagggataacttgaatgactatatctatgaaagaaactgaatttacagttaataacctcccgaaaagaaaaccctgggccaagatggcttcactgatgaattctaccaaacatttaagaaaaaatatcaattttatacaaattcattcagaaaattgaagaggaggaaattattcccaattcattctatgaggtcagtattaccctcatatcgaaatctgacaaagacatgacaagtaaggaaagctgcagatcaatatccttcatagagatgtacaaatcctaaacaaaatgttcacacactgagtccaataatatataaaaagactcacacattgttaccaagagggtcttatcccaggaatgagaagttgaaaagttagcttaacatctgaaaatcaatcaatgtaattcaccacattaataaacaaaaaagaaaaagaaaaaaaaacacaagatcatatcaaaagacacggaaaaagcacttgatgacatccaacatctcttccagattaaaaactctaagcaaactatgaatagaaaaaaacgtccttaacttgataaagaacatcctaaacctttacctaacctacttaaaaatgaaagactaaaaaccctttcccccaacatccggaataagacgttctctctcataacttctattcaacatattttaatgttttatataataaattacatattaaagagattttagcaagtacaataaggtaaacacataaaagaaatcagaaacatccagattggaaaggaaaaagtagagctgtctttatttatggacatgattgtttatatagaaaatgtgatgcaatctacaaaaacaagctctagaactaataagcgagttttgcacggcctcaagattcaagattagtatacaaaaatcaactgtacttctatgtttaagttaaaaagacaatatcatttacaataacatcaaaaagtatgaaatactcaaagcataaagctgacaaaacatatgcaagacctgtacactgaaaacaatacaacattgctgagagaaattaaagatctaaatagagaaatataycttgttcatgagttggaagtttcaataatattaagatagcaattatctccaaaatgatctacagatttaatgcaatccccattaaaaatcccagcaggcttttttgttgttttataaattgacaagttgattacaaatcacatatagatgcaaagaacttagaataaccaaaacaactttttaaaagaacaaagatggagaactaacattatctgatttccagactaattgtaaagctacagtagtcaaaacagtgaggcactgatgtcaagacagaaaaatagatcaatggaacagaacagagtctaaaaacagactcacaatacacacaggcatcagacttctgacataactacaaaggcaattcagtgaagaaaggatagtcttgtcaggaaatggagctgaaataactggatatccatatgcaaaaaataaactttgacccataccctatgccacatacaagaattaactcaaaaaaggatgacagacacaaatgtaaaatgcacaagtacaactacatctagaaaaaaatgagaaaagaagtctttgtgaccctcggttaacaaagattttttaggatttcttaggtgacaccaaaagcacaatccataaaagtaaaaacttagtaagttggacttcattaaaatttaaaactcctgctcttcagagaacactattaggagaataaaaagataagtcatagactagaataacatatttgcaaatcttatatctgataaagtccttatatccagactatataaagaaaaagcaactcaaaaaaaaaaaaaccacaaacagcccacccaaaatgtaggcaaagatttgaccagacactttacaaaagatataaagatgataaataaacacagaaatagatgcctaacatctttagtcactaggaaatgcaatttaaaatcactgtgagatactactacataactattttaatggttaaaattcaaaagtctgaccacaccaagagctggcaagaatatggaggaactggaactctgatacactgctggtggaaatgtaaaatgatacaaccactgtggaaaacagaatggcatttcttaaaaagttaaacatctaccgcatgatgcaggtatttacacaagaaaaaagaaagcctatgtccatacaaagacttgtacatcaatgttgagagcagctttatttctaagagcctataacaacccaaatgtctaccaacatgtggatatagaaacaaattgtaatatatccatacaatggaataccacttagaaagaaaaaaactcaaaatcattatgctgagtgataaaagctagacagaaaagtatatatgttgtatgactccatttatataaaattctagaaaatccgaataaatctacaaagcagattaatgattcctaggcaatggaggaaccaggaaacattacaaagaggcacaagtaagctttttggggagataaatttatttgatcagtattttgattatagtaatgtttcctggttatatacatatgtaaaaacatcaaattatacattctaaatatgtgcagtgtattgcatgtcagttatacctaataatactgtttttaaaaattagaattacatatattattaatagtgtctatttaggcttatggacaattttggttttatcttttgtgtttttcaatgttttccaagtttttatgttgattatgttttatatttgtaataggaacaaaaatttatacttcttatgttttgaaaaaccatactgcaaagtaataacagccatactggaagcaaagaactgacatgcacgaaaggagcaatatgattggtgacatacctcagggtagtgtggctggtcaagagatcacaatttaatatccaaagttcaacttgcagctcagcttcctaaagtgcttatgtattaggcattgctaaattataatttgctgaaggcacctttgttaggcttagtatagctagtcatatttatgacaatgacaaccacaaacataaaataaaaccaaggaatgaacttttgttatgagcacatctcaaaagaaccaagaattttcaggtcctataaaatgagtccaaatttcttaaacataaagcatgaacttatttttgtgggtcaggtcatagaaaaagcggttagaacttataatagatgtatatgttaataaaagttgcatttaaacatgaggtttttattagctattttaaaaattacaaatgtagtacatacttactataattttaaaaattcaaaaatgtaaaaagaaaaatatataaatggtctttttcaagcaccactcctaacccaatgccctacaaggaagtcaaagttaagagcctgcagtgctcctcccacacttctctctaaacacagacagacatgtaatagacctataaaggtgcttcaaattgttcgaggtttttttttttttaacaatagtggtatcatatcttatatgacactctgaaatctgtactattttgcttaactataacactctctaggtacaaagatgtaagtctaatttattcttttttaatagccacagaagattccataatgtgggtatacaataatttattcaacggctcctccactgatagactcaggttgcttctactttctatctctaccacaaacaccaaaatgctgtaatacataatatgtacatttatccttttttaggtactgattttttcataatggataaagcataaaaaagaaatgtcagaagatgtactttttattttaatcactactccaatattactttctaaagaagtcatatgaactcatatttctcccagcaatgtatgaaaatgcyatttccctgaaactatataggtattggacattacgatattttttaattttggcccaagtgatgtatgaaagtttgctatcttgctatataatttccatctctctagctattaagcagggttagaacacacgttcacatgtttattgttcatttgaatttcctcttttatgttgtgcctgtttaaatccttcatttattttctattggatcacatggtttttctcatcaatttacatgagatacttgtatattaagtgagttatttctctatcatttgtgttatataggcattaaaaatgtgatttttaagttaagggtttactatttgaattcattttctcatttaaacaatgtctttaatggtgactaaattgccacatggatccacagaagcctatttagcacattacatagctcgaaaattgtacatctgggagtagagggcattggggagatgttggttgaaggatacaaaatttcagctaggagaaataacttcagaagatctattgtacaatatagtgactatagttattaacaatgtattgcatacttgaaaatggctaagagaatagattttaaatgttctcaccacaaaaaagataactatgtgaggtaacagacatgttaattagcttgatttagcccttccataatatatacatatatcaaaacattttgtacaccataaatacagtcatgcaccacataatgacgttccaggcaatgatggattgcatattagatgatggtcccataagattatactggaattgaagcattcctatcacctagtgatgtcatagtgtcataacactgtagttaatgcattaccttttcaatgtttcaatacacaaacacttaccattgtgtaacaattgtgttacaactgtctacagtattcagtacagtaacatgctgtataggtttgtaccctaggaacaataggctgtaccatatagcctaggtgtttagtaggctataccagcagtcaccaacctttttgataccagggaagataatttttccacagactggggggagggaaatggtttcaggatgattcaaatgcattacatttattgtgcactttatttctcttattattacattgcaatatataattaaataattatacaactcaccataatgtagaatcagtgggagctctgagcttgttttcttgcaactagacagtcccatctgggggtgatgggagacagtgagagatcgtcaggcattaggttctcataaggagcgcacaacctagatccattgtatgcacagttaccagtagggtttgtcctcctataagaatctaatgtcaccactgatctgacaggaggcggatctcaggtggtaatgccagcaaggtggggcagctgtaaatacagatgaagctttgctcgcttgcctgctgctcacgtcctgttgtgcagccttgtttctaataggccacagaccagtactggacccatcagttataccatgtaggtttgtgtaagtacacactgtgatgttacaaggatcaatgaaatcacttaatgatgcatttctcagaagacaaccctgtcattaaacaacacataactgtatatacagtttttgtcaattaaaaaataaattaatttttaaaattatacatctgcaatgaaagttgcagaaagcaacaagaggaattaagcagaaaataaaaagtaataaaatgcagccagccatggtagctcacacctgtaatcccagcactttgggacaacgaggtgggcagatcacctgaggtcatgagtttgagatcagcctggccaacacggtgaaaccctgactatactaaaaatacaaaaattagccagacatggtggcacacgtctgtaatcccagctactggggaggctgaggcaggagaatcacttgaacctgggaggcagaggttgcagtgagccgagatcgccactgcactccagcctgggtgacagggtgagacttggtctctttcaaaaaaaaaaaaaaggtaataaaatgcatcaaaaatattgaatccttcttgaatatggtgcctgggaaaaagaagataaaagaaaaagtaggcacactggataaagattgctatagagactctacaggatacttcagaacacgttcaagggctttaaacgttgatgagcctcttccttttaaggactctattcttaaaaatacatctaggccaggtgcagtggctcacgcctgcaatcccaacactttgggaggccaaggcaggcagatcatgaggtcaggagtttgagaccagcctggccaacatggtaaaaccccgtctctactaaaaatacaaaaattagccaggcgtagtggcacgtgcctgtagtcccagctactcaggaggctgaggcaggaggatcgcttgaacccaggaagcagaggttgcagtgagccaagattgcgccactgcactccagcctgagtgacagagtgagactgcgtctcaaaaaaaaaaaaaatacatctaaagaaatctcaaagaaaattctttcataatgagaggcaattaatccaactattgaaaataaggcagatcttcagtagtggcagccctgcatctttgattttttcccaagctctaactctattaagtaagggactcttaggtaacactttcccagtgaagttttgtgtaatttttgtcactaattcactaaaattgacaaatagctgcaatgatgttctatattatctatatttacacaaaaatcagtttttccatgctatcatttatgacactgatgaatttctcaaacctcaaaattatttacaaactaaaggaaaaaattctctcctcctgtggattttatgtcaaaactcaccatttaaaagcacaatgttgtaattcttacagaaatctttgtgggccctaattgcttggataagagttcagtgtgtccagtaaaccttaaatggcctcatgtataattggtctaccaactgcaacaagattatgtaagcaagcagaaatataactctgaggtcaggttgaaagttatctattgaaaacttgctatgctggagcacaacctcgtgaggcaaaccctggaagaaataccatttttgatacactatagtttaacttcaagcacaaaagcatgaaagaatccctttttgaaaactgccaaattcatctaagccttaagattccgttttcacatagaaaagtaaaaaagcatttatccacttcaacacttacaggtgagagacttgggactaagatgataaatggaagttataatgatcaaggcaggaggtaacaagacctagatcataaaaaaaaaaactgaagagtaatccaactctcatgtctatgatgtgccagatgctagatgctgcactggggaagatgtcctgctgtgcccaatgctgtgcccaatgctgtgaagacagaagcaattcaaaagagaagttgacagctgcctgtagactatacatatttattatttcaggtggtcaatgaattaagaaattttactttgatgagataatactgcttttgtgtagttttgcattgaagtttagatttccagctaagaatatttctagtcttaagcatcagccacttagcaggatttctaccattctattaaattttaaatatgaatatcagttcatatttcaacattgtgatttttattatttcttcattactgtaagataatagtgattctccgtgctctaaacaataaatttgataaagatagaaataaaatagcactgtcatgcctcaagtaattcagtatttttcaataatctttcacacttttaaattccaaaagaattttctaacacactgttcttctcattccaggacttattctcaggaaaatcaagagtagctagtaaatagctagagacatcgtagcagactgtaaaaggaaaaccaaactgaagtcaggaaatctgggctttgctactaattaatcagtcttctgacctccttctctggtcctactttcctggctatgaactgaaagtttcagagaggataataattgctgaagtccctttcttcaatgtctatcattttatgtttcacttgaaaagtgaaagtctatcattttatgtttcacttgaaaatattaaatatctaaaaagcaataatctttttagaattaggtaaatcaaagcataaatacaggaagaaaagtaagagggtatcaaacttcaacaaaacaccattgccaaagtactttaaaatactttttaaacttcaaaacagaaaaaaaaaaagtccatcaaaattctctcataatccaaagccataatctctaatcaatcaagcaacagccacagtgaagccaaagaactataattcactcattttggaaacagtccctgagagaggaagaaaaagttcaacaaatacaatatttgaaaacaatacagtaaatgaatgcacaaaaacatgtattatgcaagacaatttatctgtctaatcaatatgtagcaactgcataatgcatatgtggctaaagattttagttgatgtagctcagtcacttctcttatttcaagttcatcaactccttagccgaatttttcttacaaatggacacagttgctcataagattagtagaaacaatgcaacaatttactactggataaaatatatggtaccatcatcatcttgatgtacaaaggttaatagatgaggaatacttatattgtgattatggtaggaataatgatgaatgaatagcaagaaaagaaaatgcaaattgggtctacaggctatccaaatgctttcaatattaactcttcaggtaaatttcaaagagcaagctactaataacaaaaaacaaacaaaaagttttgattacctagagggtgaatgaaaactataataaaagtatgtaaacaagaaaatgtggtgatttttggaggttttttgatgacttgctctcagccagtcactgtattgctcctcagtcatttgcaaaatactaaaatacattcactcaaagcctatgcttttaaagtgtgtattattgctacgatctattaaatccttaaagctaatatagataatacagtgaattctctcacttaagaagattcccaatataattaagcatttgtgactatgacaagtacttcagctgaccccagatataatacggcaccttagaagctaaaagaaggaatgactaatgctatcctctgttgaacgctatcaggcaatgacaatgcttcacgtctaagtgagactgaaaatgccaacattcttgctacactgcaaacacagtatatttgatctctgaaggaaactgaagcttatttgaaaagcctacggccatttgtaatcctgcaaacaacctaaattaaaaatcaaatttagatgaaatgcatacagaatttatttattaagaacaagactaaatgaagactaaaatatttttagcatatctcttcagcataatcatagcagcccctagtaatccccatactcaacagtgtcacaggcacagaataatggaaaacgaaaaggaacaagaaccaaaccacatttattgagcactaagcaccaggcagtatcctacacatttcatayatgctatttgatttaatcattataatatatctgtgaagttgaaacaatcacccctatacagtcaaggaggctcagagcagtgaaataacctgcagaaactggcactgctagaaagtagtacagccaaaattttaaacattaatttccaccccagcaatcattttcctacagaactcaaattacataaaagttttcctattgtctgtcaagattggatattatcccttgcctctcaagtttaatgtaaaacattagctacactcataataagagaagacccagaaagcaggaaaagtgcccttttccccccaattatcatgtgcccatggcatgtaagttattatacatctattttgttaatttttctccagacaagtgtaacaacttggtgaagaatttatgtcattagtcttacctctggaaaagaaaacctattaaaataacacacttaggcataaccattaaataatgaatattaaaaataaatattcccaactcccacttccagttaggatgaaatgagttgcaagagaattttatttccaaactaacaaccagaataaaccagctaatctataaaaatcacagttttctaaaactcatcacacagctaacaaaacaaagaagcctacatsaactaaattctagaaaagactgagccttttcaaggaaagaatagacccgcagctaactttcacccctggtagaatggcaggaggagaaacaatctgcatagatgtgtcaggagaaacaaactgaactttcagcaaacttatgatggccacgcatgggcagacataatgtaccgagaagtcctagccacatagaaaacctgcatccacccacytactccttcccaacagtccttacaagtacacagggatgtacactacagaccaaatacagggcaggagctgagacatattcctcctgaagcatgctggacctttccctagtgcaaggcaacatcccactaaaaggccagtggtaggagagaagaggtgacagagattcctcctaggcactccaggtctttatccagtgcaagacagcagttccttaaggatggtactggggccagatagctgagataaatccctcagaagcactctccaccttcactgaagtggcctctggaggctgagggcagtacaacaagacaagagacagctgagttgcagcaagcagaatataagactgaatagcaaagagaattccccagcattccaaaaatctggcagctatacagcaaagagattttcacagacctctttggccccaggtttgccacagtttgtgaagctggtgttagaagaggaactaaaataaaaataaataaaaattaatgcttggaaatcaatgaaataacaaatggacaagcaagagaaaaaaatcaatagtcaaaagctgtttccttgaaaagttattagcactgataaacccatagtaagactaattaaaaagaaaaggaaaaaacacaaatacaaatttccagtatcaagaacaaaatagagaattatcactatagattctacagatatcactaatcactacagattctcagatatttaactaataaaggctatattatgaaaaaatggtgctgatgaatttagaagcagagatgtaatagacctatccttttaaaacaaagcagaattataaaattcttaggaaaaaaacacagaatgtctttacagtcttggtgtaggccaagatttctgacacaatgagcactaactttaaaaaataaataatcaataaattatgtgtaatcaaactttctgccaaccaaaagatatcaatgagaaaatgactaagcaaatagattgagaaaaagtattcataatacttatacatgacaaagtacttggatccataatacataaaaaacttttgcaactcaataataaaaaggcagrcaactcaatttttttagtgggcaactgactttaatatatacttcacaaaagtagaaatacaaagggccaataagcacagaaaaatatcttgaacatcactgttcatcagagaaatgcaaacttacaccacagtgaggctgggtgcagtggctcatgcccgtaataccagcactttggaggccaaggtgggtggatcacctgaggtcaggagttcaagaccagcctgggccaacagggtaaaaccctgtctctactaaaaaaatacaaaaattagctaggcaatgtggcgtgagcctgtaatcccagctactcgggaggctgaggtaggagaatcgcttgaacctgggaggcagaggctgcagtgagccaagattgagccactgcactccagcctgggcgacagagcaagactctgtctcaaaaaawaataataataataataataataataaataaataaaccacagtgagaggacaggcattactggaatagagtaaggacctctgaaaattcattccttcttaaaaaaacaataataatggcataaattgtcaaactcaacttctttagaactctggaaatcaaaaagttttcaacaatctcatgagcatttatgtaagaaaaggggttaattcgccctaaccccatccccatgtccctagctctgtgattgtttttcttttcttttttcttttattgagacagggtctcactctgttgttcaagcaggaggcatgcagttgcacaatcatggctcactgcagcctcaaccacaataaaaaacaatattttattttttacagaaacagggttttagtgtctcactatgttgcccaagctggtctcaaactcctggcctcaagcgatcatcccaccttagcctcccaaagtgctaggattacaggcgtgagcccarttgttttacaacaaactgtccataatcatggtgaaaaccagcagcctggaagtcactgaagtgaacagaactatacagaagctcctcaaaagcctcaatcccaaaaaattatccctacttgacctgtctggcagctccckgaaatgctccatttttagaatttgtctttatttgatgtactcagagctactgtatgcaaacagcactaactcggggcatttgtcaaaaaaaatcaacaattgtttaacatcacagctgcctgaggcagcaaaaccagttggagctaacaagaggacaaccaaaaaactttaaagacagaaacaaaaactgaaaatgagatgtttgcagaaggctttgaaaagcttcagtgtatgcctaagaatctggaaggccatgcatatattcaggaaaatcctgagaagggcctaatctctctctcaccttccgctaatcttgagggtccacacaagcagaaagaaaaggttgagacacaactgtaagctacctatggagcactgaagtcatgtccaacttgcacacacagactctcagcaaaagccaagagacttattgattcaaggcattaaagaaatctccgttcaaacattagctgaccactaagctaacaaggcatgacaaagaacacagactttaaagaaatagactaggaacatcactaaaaaaaaaaacagcaacacaaggagcaaccacaaagcctgggaaggagagattatactatttaaaatgtctactttcagtaacaacaaaattataagaaattaagaaataggagagtatggctcatacatacagaaaaaaggagtcaataaaaactatctctgagtaaaccagacatttgactaagtagaaaaacactttaaatcagctaccacaaatacattcaaagaattaaaagaaatcatgtctaaagaagtatgacaacaacgtctcatgaaacagagtaccaataaagagaaattataaaacaagatccaaataaaaattctgaacttgaaaactctgattaaattaaccagaggggctcaacaacagatgtgagcaggcagaggaaagaatcagcaaacttgaagattagtcagttgagatgatccaatctaaggaacagaaagaagaaattataaagaaaaatgaactgagtctcacagacttgtggggcaccatcaaatctatcaaatataatgggagtcctcgaaggagagagaaaaaagagaataaataaataataatgaaaaataatagccaaaattttgccaacttcgatgaaaaacattaatttccacatcccatccaagaagctcaacaaactcaaaacaaggtaaattcaaagaaatctgcacttagacacatccacagtcaaactatcaaaaagctgaagagagaatcttgatagcagagaaaaactgacttatcatataaaaaggatccttgttaagattgataactgacttcttttcaaaatctaggaagtccacaaacagtaagaagacatattcaaagtgctgaaaaaaaamaacctgtcaaccaagaattctatttccagtaaaattatccttcaaaatacaaaggagaaatgaagacatttccaaatttaaaaaaaaaaaagtgataattcaccactagcaaacctgccatctagaagatacttactaaagggcatccttcctttaagctgaaatgaaagcacactagacagtaactcamatccacatgaagaaataaagattatcagtaaagggaactacatagataaataataatgacaacgtaagcctatttttgtttgtaactcttttcttctacctgattttaaaaacttcataaagcaataattataaaactgtgctgataaacttttaatgtataaagatatagtttgtatgacaataatagcactgaggagctggaagggaacagagctacattggagtagtttatatactattgaaactaagttaccattaatctaaacaagattgttttaggttaaagtgttaattagaatccctaggatgaccactaacaaaataattaaaaaaaaaaaaagagtagtaaaagaaaaagtgggccagagtggaaaggacagattgcagaggcatttagggggtagagtcaatggaaccttgggttagatgaaagtgacatattctccctcaagaagctgacaaagattctcttcttgcccaaactttagtcaggtttctaaaccttttcctagacacacctgtgtacttccttgtaaaatccagttgtagcaaaagaacgccattaaaacaatttatccagaacccgcccatcctcataatctaatcacccttgatagctgatcagagtcctcatcttctacaatcccccaggtgatgtctgatcaccccagcctgtcgtcagcaagaattttgttaggttggcttagccagaatctcccttaaccctgacatttcctcttaacaattttctatccaccaactcccacactgttccttggctataaactaccacttgcccatgctgcattgggggttgagcccagtctttctcccccactgcaagactcatagtgacagtcctgaataaagtcttccttacccggctttaacacatatcattgatttattttttctttaacagagcacatagtctagtggaagaatctgaagagtgaacaaaaagctattctatatcatgaccaatgactggaacaaagaataggagaggagagtggcatgagatgagactaagattagatcaagaaattaatagctaaggatggacctttgttcccaaaatactaaaaactcatttaaagaattttgagaaaagaagtgacatgattttgggcaaataatgattgcaagtcattagggaaatacaaatcaggaccacaatgagatgtcacttcacatgtctgactatggctgtaataaaaaagacaaacaataacaagtgttagtgaggatgtggaaaaactagaatcctcacacattgctagttagaatgtaacatggtgtaggtgatttgaaaaccatattggtggtcgggcgcagtggctcatgccagtaaacccagcactttgggaggctgaggtgggcggatcacatgaggacaggagtttgagaccagcctgatcaatgtggtgaaaccccatctctaccaaaaaatacaaaaattgctggggatggtaacctgcacctatagtcccagctgctggagaggctgaggacctggaggttgaacctgggagggggaggttgcagtgagccgacattgcaccactgcaccccagcctgggccacaaagtgagaccctgtctcaaaaaaaaaaaaaaaaaaaaaaaaaaaaaaacattttggtaattccttgaaatgttaaacatagagttaccatgtgacctagcaatttatcttctaggtaaaacccaagaaagttgaaaatatgtccatataaaaacttgcatatggatgcttggagtggcaatattcacaatagtccgaaagtggaaacaatccaaatgtccatcaactgatgaaaggataagcaaaatgtggaatatccacacaatggaatataatttagccataaaaagcaatgaactacagcatcaataaaccttgaaaacattatgctaagataagcaagatacaatggctacatatcccatgtatataaaatgtccaaaatagacaaatctatagaaacagaaagtatattagtagttgctaaatgctgggagggtggtgggggagagagaagaaagaaaatgggaaataactattaatgagtataaagtttcttcatggagtgatgaaaacgttagataacagtatggttgtacaactctgaataaactaaaattactgaattgtacaatatggaaaggtgaactttatggtatatgaattatatctcaataaaactgttataaaccaaaaaccatgatgagttactttttcacacctggtagactaagattaaaaagactatgctgacaaggatgtagaacatcactgtcggtcaaaggtaaaatggtacaactgctttggagaattgtttggcagtgagttaaaaagttaaacaggcatctatagtatgacatatcaactcaactcctagatttttactcaacagaagtaaaaactgataactacaagaattgtacaggaatgttcacagcaggcttcaaatgaaagccatccaaatgtctatcaataggagaatggataaacaaactgtggtatgtttatacaatggaacattattcaggaattaaaaacaaactgataggtacagcaacatagatgaatctcaaattaatgctcttcatgagaaaaaaaatacatacacacatacaaccataccatgtgactctatttatatatagctaaagaacaagcaaaactaatctaccatcataaaaaaaaaaaaaaaaaaaaaaaggaacagtgatttccagggcagggtaaaggggtaggaacacaagagaacatttgggatgattaatgtaatcttggtggttatacaggtttataaaattgtcaaaaccaaccaaaataaatacttaagatctgtgcatctgttcacgatagcaaagacttggaaccaacccaaatgcccatcaatgatagactggataaagaaaatgtggcacctatacaccatggaatactatgtagccataaaaaatgatgagttcatgtcctttgcagggacatggatgaaactggaaaccatcattctcagaaaactaacacaggtacagaaaaccaaacactgtatgttctcactcataagtgggagttgaacaatgagaacacatggacacagggaggggaacaacacacactggggcctgtcagggggtagggggctaggggaggaatagcattaggagaagtatctaatgtagatgaccggttgatgggtgcagcaaaccaccatggcacgtgtatacctatgtaacaaacctgcgtgtactgcacatgtgtcccagggcttaaagtataattaaaaaaaaaaaaagttctgtgcattatatgtaaatcttattccaggtaaaaaagaaacagtaggatgtgagaaaaataaatgtttctactgaaatattgatgggtgaagtaataggatgtctgggataggttttaaatactccagaacaaaaatcagttaaaagaagattggcataatattgataaatgttgaagctggatgataaaatcattaggtttatactattctctctagctttaaataactttgaaaattcctataatgaaaagttaaaagttattcattcatatattaataaatatttcttactgtagttctgtggcacaagttctggattcttaggaattttcaacttgtaggatacatctccaatattaactgtatcacctaaaaagagattttaaaaacagaataattataagagacaaacgagaaaaccatagactatgcaacaatgcttgtcctgacctacagagagggatgttacagaaatgtactacgcagctgtctataagtcaagcactatgctctaaaacttctatccaaagtatatatgtataaaggagaagtgaggcatcagtgcaattcacattttaaatgtgttagcaaacaaacaaacaaaaacatgataaaatacatcaacaagctttatttcatgaatagcaacattaatataggcaaaagcaatacagaagaatgcattttgtttaagatcattcaaagtatccatagagtaaaatctttttttttttttgtttttgagatggagtctcactctgtcacctgggctggagtgcagtggtgcaagctcagctcactgcaagctccgcctcccgggttcacaccattctcctgcctcagcctccagagtagctgggattacaggcgcctgccaccatgcccagctagctttttgtatttttagtagagacggggtttcaccatgttagccaggatgatctcgatctcctgacctcgtgatctgcccgccttggcctcccaaagtgctgggattacaggcatgagtcaccacactcagcctttttttttttttttttttaagacggactcttattctgccacccaggctggagtgcagtgatgtgatcttggctcaccgcaacttccgcctcctgggttcaagtgattctcctgcctcagcctcctgagtagctgggattacaggtatgtgccaccacatctggctaatttttgtatttttagtagagatgaggtttcaccatgttggccaggctggtcttgaactcctgacctcaagtgatccgcccacctcggcctcccaaagtgctgggattacaggtgtgagcctccacacccagcccatagagtgttacctttaacacagatcctcaacctttttacatatctttgtacacccgtatttttactgcatacagtttcaaattatccagcaacatatcctcaaacttcaacatttctaggtgcataaaaggaataaagccccagtggcataaatgccaagaactggccaggtgcagtggctcacgcctgtaatcctagcactttgggaggccaaggcaggcggatcacttgaggtcaggagttagagaccagcctgaccaacatggtaaaaccccgtctctactaaaaatacaaaaattagctgggcgtggtggtacgtacctgtaatcccagctacttgggaggctgaggcaggagaatcgcttaaagccaggaggcggaggttgcagcaagccaagattacgccactgcactccagcctgggcaacggtgcgacactccgtctcaaataaataaaaaataaaagccaagaattcctacatgaaataagcaaaagcaggcaaaagttttcagtaagttctatacagttctattttttaatgtaaccttaatttccgagtgatcttctaaagccgaggactaaactgaataatctctccccgctgtgctctctctaacagcaaaataggcatggtgataccatttgcatctagaatttcatttggaaagggctcagagacactccaaaaaagtagtcgtgcaaaactcatctttcagcactgccagtttaaagctagcaagataccttgaacactaagrccttaaatcayggtactaataacaatagccaacatttgttgaatgcttactaccttctaagtattttttgcattctcaaaataatcctatgagacagaaaytttacaaatgagaaaatttgtaaatccataacagagtttttaacagataaagaaatttattacaggtatgtggtaaattgagagaggaagataaggactacacacaaagctaaatccctgctaggtccaaaactggcagccagaaaaaagcaaggcaaaagatgatgaggaccaaaattcaaaagcctgcaaagctcctccataacccgtgcaccgctcccttttcctcccctgtccaattaactctttgtcttcacgcaatctatcacagagattctcaaagcatcaacgtcacctgggaacttgtaagtcatataaatcttcaggccccacctcagacctactgaattagaaaccctaaggtccagcaatcggtgttacaatgagccctccagatgatctctaatgcatgtttgagatcatttggtcgtttaagttctaacaccctcaaaaaacaggtggtcagcagtgcctcatatagtacaatcttagttactgccaggtattggttgactggtcatctcgccctattttccttaatgcaggaaagaacctataaattagctactttctacagtagcttttcttttaaaagataagcttgcttacaaatataagtgatattatctactggcttttattacagagtagtttcaagaattatagttacagtattttcaaataggatgtctttacaaatgttatttcacttcctgaaaagactgtaattatttggcctcctgacaaaatgatactgagtaattaatctgaacataagaaaaacgttttcaggcacaggttctcattacaaacattccctgagtgttagagctgaccgacatcatccttctaataaataatctagaaaaagggcagactatacaaattcatggtaacttgacaattggctgtccattttttttttwaaaaaartaaaattcatacctcacatttctgaaagacagtacattcaaactgagtaactgaggagagtacaaaaagggaactatttacaaaggtatagcagagtttacggaaaccaaaaaagatggtgcagtatcctaggactagcaataacagaaagtcattaccgcccctaggcctgaaggggcaaggggagagagcaagcagagagggtcactgtgttaggaagcctccttctgggtaacacagcaaacccataatggtgacctggcagggagggagctgggaaataaacatgaagcaaaaacggacagaactaaaagtggaaatagaaaaatgcacaatcacatctagatattaatagctttaagtagctctcttggtaaataatggaagaagtaggaaaaaataaagaaggatacaggataaggataattttttctcagccttctggcaaagaccaagtatagacgtaaagaaagagaagattggaaaacattattaatcacttggcctaaatgacatttatggaacactacacccaacaacagaatgcatattctatttattatttatttaagtattactgcaagtatgtttttattttctcaacctatcaactgaatattgtattttataaagcactttttagtattgtaattggttcctcatgatcagaatgcatatcctttttaaatgcacatggaacattcaccaaaataaattataggctggaccataaagcaagtctcaaggaatttaaagatgagaccaggcacaatggctggtgcctataatcccagcactttgggaggccgaggtgggtggatcacctgaggccaggagtttgagaccagccagaccaacatagtgaaaccccatctctactaaaaatacaaaattagctgagcgtggtggctggcacatgcctgtaatcctagctacttgggagactgaagcaggagaattgcttgaaccagggaggcggaggttgcagtgagccgagatagcgccattgcactccagcctgggcaacaagagtgaaactctgtgtcaaaaaaaattaaaaaagaaaattaaaggatggaagtcataaagattatgttttcttaccacagtggaattaaactggaaatcagtaacaaaaaggtaactggaaaatccccaaacatttggaaatcaagcaacaggcttcttaaaaaatccaaaaaataaatcacaacggaaattggactcattgggaaacagggtggtgatcaatgagccacatctgcaatagacaaaagggaaaagttatgacattcatatggaccaggcatctgccatctctgcctcaaacattgatgttcttggccatcttctgttactacactacactttcctcagtcatttaatccataccaatgtcccaactctgacctctatacaacctttttttttttttcagttaagggtactcttcaaacaccatatacaactaattctttaaatgtctattttggctcagatctctctcctgagtttcatacctgccagtagcctactggagactttacctagatattccagagacaactcaacaaacacacagaaacagaattctatattgtccattgtgtgcgcctaaccacctctaaccagctccacctcttgtattcctatctcagtgactaacactttatctcctcagcctagaagaccttccacatctctctcacaccacttgccctctacacaactactactgaaatatcttcatctccccattgaaccttccctaacttttcctctagcacaaattgatcactccattagtctttctgctagcacaggatctgatttatgcttctgtaatggaaatacaaattcaaggagataagagacattttctaacaattaaagaagagctttttatctacttccaaaatagagataggatattctatttccacttaaaagatacactcagaatttgtactaaattactagaatattctgtttccacttaaaagatacactcagaatttgtaatattttttcttttaaatgccaatatttacaacatactggaaatgtcatcctttgcaactatttaaacttaccaggaaaactttagctattaacctaaaaatgttcaaagggatacatatttttaaaatcctcctagcagataaataagaaaaatttttgaagactactgtttagtctacaggactctttttttcttggtgcaaggcctaagttttaatcatcattttatccccaatacctgaaacctaccagatattcaataaatgtttgacaaatgaataattataattttaaattttttcttaagtattgtttttaagctgtaatgttttctcctttgaaaacatcccacctactaatgtgcttataagtcaagccatctataatgatttaagtgaggtagtttactctctaaaggggaataagaatacttataagacaacaggtaacataatttaggcaaaagaagcaaatgtatgcctttcttcatgtaaactgtgggtttacttgaactagactcaaatactattgaagtgtctaaagtgcctgaaccttgctggatttctgattggttcagttcacaggggctcctgttaagaagtacactacagtctttattattatcctgagattcttcatgatagcccttctggtgcaccatatcctctcaagtcttaaatgtttgtatgcagccattcattgagcattcaatggtctcactttgaccagaacagcaagaacataaagaattattcaactgatatgacatcatggcttttaaattccataatgagaccaagtaagtccattaagttggtgacagagagtggcaacaacgcccaaagtttcagtgaatctgtcaaaattgagaagctaaccaaaggggcaaattgttaaattcaaccaaatttggtctaaggatgcctccgtacttggagtccttatgtaatgaattgcaacataactttgtatgtaaattaactgaaaccggaacttaggagtatactttggtaacaaatagatgagtcttagccaatctgagcagctgagcttgggtcaaccacaggctgccaactgatgagaccgtgttcaagtaaggcaaacactgagttatagccaagtaagctgtttccgtacctgacttccattttctgtccataaatgctgcctgctcacgtttcagaatggagctctctgagcttattctggttctgaggactgcccaattcacaaattgttctgtgcttaaattctgttaagtttagtgagtctaaagtttctaacagtagctttgacaaagaagttggtttcatgagggtttttcaacagcggccctatgaacattttgggccagataattttttgytgtgaggggctgtcctgtgtgtcatggactgtttagcagcatcactggcctctacccgctagatgccagtagcacccctccctcctggttctgataaccaaaaagaaacatctccagacattgctaaatgtcccctgagggggagaaatcaccttgggttgagaactactgggttagtgtcatcatttttatatatactaaacttagacccaagagaaaactaaatatatcagcaattcccacactagtctatgtgcccctaatgcagatctgcctaatgatttataagcttaccattgttctgagcctttctgttaaattcttgaatacacaatggggtcagaatatcctcagggtcaaaataacctgctgcaggtttaaagtagttaataatttccccaaggttcaatacctgataaatacaaaacttagaccaaaaccacagtatagttctttcctctttacactgtatttctcagttgaagccacagttctatatttcccctcctcaaagttatttctatctaatcctattgtagcccaaggatataatcttaaaataacaaaaattcatgtagatggatgtttattgcattgtttatatattttagacaacatgaatgtgcaagaatgagacagtaaaataaattatatggacaaacatataaacttaataactactttaaacaatcatgtacaatgatatttattaccatgttaatatgttcacaataatggatgtaataattataaaacatacatgatcccatttctttaaaaaaatgtatctgtataaatatacatatcatccaggcacagtggctcaaatctgtaatcccagcactttgggaggcaaagatgggcagatcactttaagtcaggagttcgagaccagcctggccaacatggtgaaaccccatctctaccaaaaatacaaaaattagctggggtggctcatatggtttgcctgtgtccgacccaaatcttgtcttgaattctagctcccataatccccatgtgtcatgggagggacccagtgggaggtaattgaatcatgggggcaggtttytcctgtgctgttctcgtggtagtgaaaaagtctcacgaggtctgatggttctataaaggggagtttctgtacacaagctctcttacttgccgctatgtaagacgtgacttttctcctccttcgccttccacaatgattgtgaggcctacccagccatgcgaaactattgagtccatgaaacctctttttcttcataaattacccagtctctggcatgtccttatagcagtgtgagaacagattaatacagtggtgcacacctgtagtcccagctacttgggaggctgaagcaggagaatcgcttgaacccaggaggtggaggttgcagtaagccaagactgctccactgcactccagcctgggtgccacagcaagactccatctcaaaaataaataaataaataattatacatatatatgtaatctgataggattaatgctaaaaagttgataattataaatttgggtgggaggatcatgttttagggaatctgtacttatcactcttctataataaacatagattgctgtgtaaaagtattttagggtatttctataaacaaatttacttcatatacaagagtcataaagaaaaaactgtgaatccctttaataataatggcgttaaaggaaagcaccaaaatgtcatgatatatttatacagttatgtttctaggtttatcatttgatctatagtatatttgaatccatttaacatcagagtcccactgaaacaacttgcttggctccatctgtaaaaacactacaataatctttattgaaaactctctgcagtagatatccttgttaacctctttgctcttaaaaccaagagacagtaattttaatggaagtataaagagatataaagaatttacaattatagatacttatactatctgacagcacaggataaaaagcagtgggtttgggttgagtttatctgcttgttttgtttttaacataaatgacctattttccttctgcttatcaggcttaacaaaggtcctctcttgagagcaaacgacaattccagcctctcctgctccttctctgtatgaactttcacaaaataagccactgaatgcttactaggtacaaagtgttggcaggcaccaaacgaatatatagataaacaaaacaaatactccaggagaaataacagcagtatataacttaaatatattatttatgaactttgttgttcttttttcaaactattaggaagcaatgtcaattacagagagaggagataatcagttactggtcacatgtatgaatgcagctgagagcatcatcccaacataagatgtaatccattatggcctattgctatttgtagttttacacttgtccatgtatgatctctgattcaaaatgggacacttccatcttgatagccttactctcaggcctcagagtagccaaaagtgtgctgtccatttacctggctcacaactgctcttactcaagtccagatctctggtgggttcccagctgcattcagttacagttctcacaccctcaaaaaatacctctttttggtctgatcctgccagagtaaatgactgatttaaagaagatagtatgttctctgtaatatgtccatgactctcacatttgaagcaaagcctatactttgatttactggctataacaaaatttgaggacatttacaacttatctaccaatacgtatataatacagactttaaaaactcacacccacatgtgtttttacaatcaacatgtattatccatgtacaaagaacaattgttttttaaaaagttcaagtcaattcactcggctaaatctgcctacccagatagtctgaacagtcctgaatctaaacaaacttggtttcatgtcttctaaaggcaaggaaacagaataattctcaaatagctaaaactgtacatactaagaataaaaaagctaacttttattgagcattaatatgtgccacagattatattaattaataaatcctcacaacaaccataatagatatattcttcttatccttttacagttaagaaaactaggacacaaagttaagtaacctaccctcaacgacccatggttagatagtggataagtggattccaacccaaattgtttaactccaaaacccaacctatagtttatgctatacttccacctttgacctctgccttctagggcaaaggagcaaaaaacaaataaagaacacacaaaaaatgtaaaaaacaaatgaataaacagcccagaagtgagagtaattgagaaaaagcaaaaaaaaaaaaaaaaacaaaaagtaaaatttgaaattgcaacactatggtgggggacgggggtggtgtatgtcttcaatgaataaaacgaaatacgtgggacctaaatatgctttttttttttttttttttttttttttgagatggagtcttgctctgtcgcccaggccggagtgcagtggctccggtcactccaagctccgcctcccgggttcacgccattcttctgcctcagcctccggagtagctgggattactggcgcccgccaccacgcccggctaatttttctgtattttctttttagtagacacgggggtttcaccgtgttagccaggatggtctcgatctcctgaccccgtgatccgcccgcctcagcctcccaaagtgctgggattacaggcgtgagccaccgcgcccggcccatatgctcatttcttagcaaggaaaactgggggttgcggggaaaatgcaagaggacaacgaaacctacaatttcatagtgaaaacctgttattccaagcagcactgacattgacaaaatcttgtctggaatcacttcaccattcaagggtagcaacaacagatatcctttccttaaccatcacagtaactctaactccaccaacacacaagaaaaagaattcctaaaaccagctcaagtagagccaaaaaatactgagcttagaaatcaaagcatgtgattctagcatagtaattagttgtgtgttctccagcgaatcacttttcccttctgggtttcaattacctcatttgtagaggcaagtgttttaactaaattaaggtgtaactgtcagctctaagaattacgtgaaactttaaggaaaactcctgtaaaacttggaaaggctcggggatgcatttaaaacaccgtgaactatgggttctttggcaagaatgttcccttmtaagccgccacaagccctggctagaacatgacacagaccggcttccaggcccttgaggctcagagagcaaggtcaaatccagctttcaataattccatagggctgaggcattaacctctacgagtattataacctaagtcagaattctgggggtaaaggcagcggcaggggaaggagaaatcactcttctaggtcatcagaaaccttagtccagacccctcgggttgcagaatcaggcacagagagggcgagcgccttgcccccacgttacacagcagttagcgccgaggtcgggactagaacctcaatctttcagctccccgctcggcaaacggtccttccaagcgcagcgaagcaacagagaggaggggcgggggcgcgcggggacccggcacggagcgcaggggcaccagggaggacaggggcgcaccccgagttacctgtgtcggcccccgagccggcgtgcaacagtctgacctccggccgctgcctgtcgccacccggcctgcgctgcaccacctgccgcaggagcagccgcatgcgccgcgaggccgggccgccgtggcctccgggtgccccgaggagtagaagccgggattgcatggcgccgggggggctgtcggggacggcgagggggctcggggatcgagcggcgtcccgtgcaggcaccgtgaggcagcgcggagaaggggacaggaagcggcacctagccgagtccgccggaaactccttcccccgcggcgcggccggctcagtagactcagcccggccctacccggccctgcatggcccagacgggcggaaagagcctgcggagctccagcccaaagagccggcaccgtcccgggactgcccgcaccgcgggggtgctccgagctgcggcgctgggctctggcaagcgcctcgcagtccgtgagactgtctgttcacctggatgcaccaggccttcacccgccgtttccctgcgatcccacagaatctcaggagttcagtaaatgccaagggttttaggagcatttgtcggtgtgactcttcagatgcttgccccaagtcttcgtttcttagttaaaggcccagtaagtatagggagctttccctgtattcggcttcagatttcggaaatggagaaaacatgcacaagatgatgggaactttcacaactgtcttgattcattgtaaccacactagtgtttccaaaccgtacgtgaaagctttaccctttgtccttttggtggtggttgtttgtttctgtgttttattaccgcttcctaaattctaaggaaaaaattcacatcttagtgatagatggaaattgcttaaatatcagaaaggatccagatcaagcacttttctagtcatgctgtaatacaaaagttatataaagataatttatgtctttagtaaaggaaaaagtaggacactggctaaggctgcctccctcttgtacattccaacatcggaaatggtcctaccacaaagcaaactaagcctaatgtaattagactgcatccccaaaatgtcacagtgaattgactaaggcaaaatatttgagacaagttatacaagcaaacatcaaaaagaaggcagaagacctcactttcagctaaagaccttgctaattctagagctgccactgtctaaatacatagcacctaccctgcgcctgaccctgtgatgagtgctgagaagagagtgttagagtggagactgtaaaagtcaaacaaggctaggtaaggaaggctttgggcatccagcggaagaacttgaggaatgaaggctgaaccaggcttctaacctagatgaggagacagtgaaaataaaggtaataagtagttacacaatatattatgacttcgtttcatgtgtatcttctcatttaatcctcatagcaaccctaagacataaatttaggatgtaagcttataaaatgcttttcctactttgagcacattgtatgtatcaagattttaatgaattatcccatttcacataaaaatgctttgaggtactattattatcctccgttttacagatgaagaaactgaggctagaagaattgaataccttggtcaagatatctccatttaatctcgctggaactcagtagacacctgaaagaatgggagaacaacctaaggcaattttgcaaagtggttgatataagcactaagagctcttggagttaagacaatggagagatcaacacaagttagagcattcaacaacattttttgcctagttttattttttttagagacaaagtctcactctgttgcccaggctggggtgcagcggcagtattatagctcattgcaacctcgaactcctgggctcgagtgatcctcctgcttcagcctccctagtagctgagactacaggcgtgcaccactgtgcctggctaatttttgtgtttttgttttcgtagcagtggagtcttgttatgttgcccaggctggtctcaagctcctggcctcaagtgatcctcctgcctcagcctcccaacgacaacatttattgagtaactgctgtataaacagtaccctgctagatactgtgaatcaatgggctcacattaggtattgatgataaatatgcaaataaagaattgcaatacagtgagacacgtgtcaagagatttaggttcaacatactgtggagtggattgctgcacctggagtcttcacagagaaggtagtgtttgaaatgattcatgtaggatatattatacaagagtttgtcaggctgagacaagtcaaatctggcagacagatcatgtacagagagagagagaaagaaacagctgaaagtgcagggcatgattgagaaccagagagtgattcagtgtgtctagaggtcaagtatatacaacagtttgtaagaataagaccagaaagagaatctggggccatgttgtatgccaagagaaggagtttgcacattaacctccaggaaatggaaaaatggtgaaggttttttagagtgacaaagctacaatggggaggaaaactttgagcctgagaaaaggcagcacctgagcttaactttgaatgccatttaggactggatacacagagaagcggggtatagagcctaagtagaggcttggagtcctgacagagttcagttacaggggccatgagaccagccagatgaggaggttaatctttcgaaagtagtagaaggtgttggcagagcaggaggagaaggttacagagtgaagaatcttgagtagctggatgaagttggacttcatccgatgagcaaactgggcagctactggactttttgatcgtgttttaggtggtgacatactatgaattgaattaggaagacaggaagcatcaagtgctagctacgtggcagtaaaaatagtctctacttgaaatgatgaacagtgctgatggcaatgagactgaatgggaaagaatggaccttcacaatgtttttaaagaagaaccaaaggtgttttgttttaaaagatgttcatcacaatctgtgtaaagtctctcaaactctcactaaaatatctgatcacatgcttattaaaaaacaagctaccagccgggcacagtggctcaaacctataatcccagcactttgggaggctgagatgggtggatcacctgaggtcaggagttgagaccagcctggccaacatggcaataccccatctctactaaaaatacaaaaattagccaggcgtgatggtgggtgcctgtaatcccagctactcgggaggcaggggcaggagaatcgcttgaacccgggaagcagaggttgcagtgagctgagatcgcaccagtgcattccagcccgggcaacagagtgagactctgtctcaaaaaaaaaaaaaaaaagaaaaaagaaaatcacactaccaaaagctagtattgactgtcaagctctttccagagtttgggaggaatattttttacataccacattaatgtaacttgatgaaaaatgcaactaataatccttccatgctatgtctgactgaaaaaaggtgggtgctccactcctccctactgtctaccccagctaagaaatcaaaggttcataccactggttcccagacttttgtgtgcatcctaattacctggagaacttattaaaatgcagattatagggtttcgttcctccctgcacccagagattctgagtcaataggtctgaaagggcccaagaatattcatctttagtaatacctataggagatcacccatgtgccacacatttcagtcatgaagctgtacaactgttctttatagagagggagggaaaaaggaaaatcacagccaggtgcagtggctcacgcctgtaatcccaacactttgggaggccgaggcgggcggatcacctgaggtcaggagttcgagaccagcctagctaacatggagaaaccccatttctactaaaaatacaaaaaattagctgggtgcggtgatgtgcacctgtaatcccagctactcgggaggctgaggcaggagaatcgcttgaactcaggaggcagagattgcagtgacctgagatcgtgccattgcactccaacttgggcaacaagagtaaaactctgtttcaaaacaaaaaacaaacaaaaaaacaaaaaaaacacaaaagtcactggttctttggtactccaagactgacctcttattgctcttttttccatttttttgagacaggatctggctctgtcacccaggctggagtgcagtggcatgattacagctcattgcagccactacctcctgggctcaagcaattctcccacctcagcctccctagtagctgggactacaggcatgtaccaccatgcctagctaatttgtttttttgtagtgacaaggtttcactatgtttcccaggctggtcttaaactcctgggctcaagtgatctccctgcctctgcctcccaaactactgggattacaggcatgagccaccattcccagcctctttcatttgatgtatgcctgctgcagagctggagaagacaggtgggagacaggggctagggggactggtttggagagagagaaagggctgaccagatagatgggtatttttatttttatccctttgattaccagtaaggataaacattttttcataagtaatttgtgtttttagttattatttatctaattctcctttgtgtatttttaaaatatttttctaactaattttaagagctttctgcatactaagaatattgacactttctagtaggttgccaacttacattactttttccctccaccacacttaggcagctcaaatccatgtgagcaaatagatttaagtaaggaagaaatacgaagaagactatgggcttttgaaccaggcaaatctgggcttcaatcatacttcatcacttctagttgtatgacattagccaaattgctatcttttctgcacctcaatattttcatctgtaaaacagatatggctggacttggtggctcacgcctgtaattcagcactttgggaggctgaggcgggtggtcatgaggtcaggagatcgagaccatcctggccaacatggtgaaaccccgtctttaccaaaaatacaaaaattagctgggcgtgatggcacgtgcctgtaatcccagctactcgggaggctgaggcaggataatcacttgaaccaaggagtcgaggttgcagtgagccaagatcgctccaccacactccagcctggcaacagagccaagaccctgtctcaaaaaaaaaaaaaaaaaaaaaagatatgatagtacttaatagagtgttgtgaggcttcaataacagatgtaaagtgtctagcaaaacacctggcacacagtaggtattcaggaaatgttaacaattcgagtaaccaatctttagaagttaggcaactccataatttaaaatattttgaatgggcattaaatgtaaattcagtgtttgaggcgtgtctagaagccttgattactatgataagtatttttcattacatatgaagaagtgtataaaagggtacattggtattccatccctttacctccaaaggagcaatgtctatgtttcgctctttactagatattctgtcatatctgcctgccagaccactccttctgcttctctgatgcaagttacacctgcatcttgcataccaagtgaggctgtccatcacctaactccacctcaccaggcacacaggttcggcatgtgatttggcctcatagtgcttgacccggcaccaatcagagagctttgtcagagatggatataggtgcagggactctttctaagattatggatgcttatagcctcacataactccagaactgtcagggccatcttggctttaattcgagaagagcttgactgagacaagagaaaggtgaaacaaatgattgcaaccaagggaaacaaaatgtcctggtgatatactttgaactgtgaatcaccccaatctgaaacattgctttggacatcatgagtaaataaatcctgacttaatgtatacaagtaagtttgtcatagctttctgttgctcataattccaagaattctggctgatgccatctcttacccctgaaaccttggtaggagttgctttactgggagatatgggtatccttggtattgatcacttcataatgcctctccatatatgtaaaagtaaggtgggctgtagattat

SEQ ID NO: 97990 - DNA, 12435 bp, Homo sapiens
cctgttgacccatccaccaggttcccgcccctcacccccaacccgctaaaggccatggtgtatgttgttcccctctctgtgtccacatgttctcaatgttaaaccgcaattttttttttttttttttttttgagacagagtcttgctctgtcgcccaggctggagtcaatggtacgatctcggctcactgcaacctccacctcctgggttcaagcaattctcctacctcagcctcccaagtagctgggattacaggcgcctgccaccacgcccggctaatttttgtatttttagtagagacagggtttcgccatgctgtccaggctggtctcaaactcctgacctcaggtgatccacccgccttggcctcccagggggctgggattacaggtgtgagccaccgcgcccggcccacaatttttaaagagagagaaatgccccaaatgaatcagtagcaaacacaattaactcacagttccatccttattacttctaacaaaagatactaggacaatacttttgtcccttccttggtatttgtctactgtattaacttcgaccatcccaatagaacgtgccaataaatcattgatgatctttaattgctgcctgtacggtgcaataataccaatatcagagggactgcatccagcctaaatagaaaaagacacaatttaaaagaaagaaatcctgattaagttaaacttttctgaatttaataattaaatgtttacattatgtgcccaactgatgtttataacaaactttcctatctcaaagactgaatacaattactgaatttgctctaaatctgtccatatttcccaggatgaaataattccttagacattgctcccttaatttttagtttcatgagaacgtaaaggattatatgctactaaaacagtgcacacacacacacacacagtacaaagaaatacatttcaccttctgctatttctttcacagaaaaatttccaattcctaatcactacaacatagtattgtctcaattagaattagctgacattacaaaaagttattatcgtaaatgaaaactccaaatgtcattataaaatattacatgtcttagatacattttctcaaaataaaaacaatggggcttcaatcccccccttatcttaataaacgagacttaatgccagattgtaagtgtcttacagtctaacattcttttattctgcactttaatatttgctagccttgaaaattctaaattaccttaacaaaaatggaggttaggaaaactatgagtttggcttctgttacattgctcacaccacctttttcaacttgttctggcgctggaacctaagtggaaaaatatacagcctgctgataatacaatctctaaagagtactataagtacgcaactggccataaagactatactaccgacttggagatgaaaaatagctttgtctaaaagatgaaggtgaaagaatcaacaaaaatgaatattaatattagtcactttcagaaagccacgcagaggccacctatctgaaacatgctatgattgaggctaaaatacctacgaaagctgatcacacactgagcttcaaatacttcactttgttatcccccattttacaggaatcaaaggcagaaaagaataagtaactttcccaaggcctcacaataaactgtggcactactatttgaacttagggtggccgggcgcggtggctcacgcctgtaatcccagcactttgggaggctgaggcaggcggatcacaaggtcaggagttggagaccagcctggccaacacagtgaaaccccgtctctactaaaaatacaaaaattagctgggcgtggtggtgcgtgcctgtaatcctagctactcaggaggctgaggaaggagaattgcttgaatctgggagtcggaggttgcagtgagctgacacagtgtcattgcactccagcctgggagtcagagtgagactccgtctcagaatcaaacaaacaaacttagatctgggtcgtatatctgtgctctttccattttcttgtccccttttatacaaataatggagcagataaaactgctgtcctacctcctgatacatctcttcaaagactactttcctcctacatcatccctaagcaatcttgattttttttttttttttctgagacaccaggagattgcaccactgcactccagcctgggagacagagcaagactccatcctaaaaaacaaaaacaaaaacaaaaaagtcgttgtgcagatttctttttaatgactggtttgtaaaaaggtcttcatgtgcatatgtgggggagggaggttatgagaaacctctgtactttccacataattttgctatgaacctaaaactgctctaaaaaataaagctttttttttttttgagatggagtttcactctgtcacccaggttggagtgcagtggcgcgatctcggctcaccgcaacctccgcctcccaggttcaagcgattctcctgcctcagcctcccaggtagctgggactacaggcgcaccaccacacccagttaagttttgcatttttagtagagacagggttttgccatgttggtcaggctggtctcgaactcctgaccccagtgatccacccccctcggcctcccaaagtactgggattacaggagtgagccactgtgcccgggtttaaagtctgttttttaaaaagtctttaaaaggacatcaatttattataccctctgtccatttgtaaacccagccctttgatagtatcagtgccatttccttttctaggaaatagaattatacccctgagttcactttgtggccttccttcttcaaaagtcaattttgatatctactgacctccagaataaacctcctccaaaaaatactgggcctatagaaagaaagactattttgggccgggcacagtggctcacactataatcccagcactctgggaggctgaagcaggcggatcatttgaagccaggagttcaagaccagcctggccaacatggtgaaagcctgtctctactaaaaatacaaaattagtctggtgtggtggtgggtgcctgtaatcccagctacttgggtggctgaggcaggagaatcgcttgaatctgggaggaggaagttgcagtgagccgagatcatgccacttgggcaacagagcaagactccgtctcaaaaaaagaaaaagaaaggaaaaagaaagaaaagactattttgggttgaagtatgagaagtacattagttttgcctttttttttccccccaagatgggagtcttgctctgtcacccaggctggagtgcagcagtgtgatctcagctcactgtaacctccgcctcccgggctgaagcaattctcatgcctcagcctcctgagtagctgggattacaggcacccaccatcatgcccagctactttttatatttttagtagagacagggtttcaccatgttggccaagctggtcttgaattcctgaccttgtgatctgcccgccttggcctcgcaaagtgctgggattacaggtgtgagccaccacgcccagcctagttttgccttttaactgataagctctaattagggcatgtgctaatgaaaactgagaaatttaaataataggacaaaatgagaaaaactaaacagaaatttttttttttaccttgtctgtattaaggaaacaaacaggattgttgggttcaaatactcccatcaaccaaggattatcagaatagtcagcataaaattccagttccagcttcacatctttaaagtgacgtaggtttatcactgcattggccactttgtctgatccacactccagcttgccctcataggtcagcttattacttaaggacataattttactaagggaattacaaaagataactttagttttggtagatggaaacaaacatgaaaaccactcctagctaacactgttacaaatacctgttcattctgtactgcacggttaactgtacaacagcactcttattctgctccagcctcttgaataagctttcactcatgccaagagctctgtcaataaatcagattcatgtttatcagtgtactaaatctgttccttgaaaataatctagtttaaaattaacacttaagtgtctgcctaccttgcttcacggtttagcaccaggggaggaagctgctgatggtcccccactaacacaaatctccgtgaaaaaaaaagggggcccagacaaattggttggctaatttgagaggcttcatccacaatacaaaaatcaaaaattttacgggaaaatattggatggtttattcccatacatgttgttgcaactataagctaaaaacaaggaaaacagatcagttatttaacatgtaaaagaaatgtagttttgtttctctcatttttgaaatgaaaagatcaaaaggtttttgttctatggcatcaggaatccttcgatattatttaattctgaaatatttatagcatgcaaattttaatttttttctacaaattaaaaataatcaagtaaactttccagacactattgaacaatgctcacatttggatatttcccagtggaaatctggaacattcaagaggtaataagttagttctttttttgtttgtttgtttgtttgtttaatgtcaaccaggactttgcttctgggaagatggagtacttttccttattctttccacaaacgacaactaaaatccctaggcattatatataaaaaaaaaaaacaaaagaagactctgaaaggtggagagaaggcagaccagctagggagctcaggaccaaagaaacaacacagtagttgattccctgggctttctttttgcctcatagatcccagatttggaactgaaggagccacggcacaccagtgggtgctaaaaacagctgcaaccaaagtctgctctctccagctgaaggaacaggaaaaggaaagcctagctagacagaaaactttcacacaataactactctagccaaatatcactggaaaaaaagtacagccccacaaccacagacaccagcaaacagggaggagggtagatctctgcccttctcaaggctgtaacaaggtgccccacaccccaccaggcgggtgtcagagaaagccaagtagggagtcaggtctttcatccccgatgactggtaactggcaccaaccccacatgttagtagagaccacatcagaagcctagacttccaccccaaccaagtgggcccagcggtaacgaggaacctcccactttggtcaaagaaggctgagtggggaacccacacttcgactcccacctggcaggaatgaggtggtacccctcttcccctaccatggcagtgtgagaggaagccagctaaaacagaagttttcagtaacaacaaaatatgctcatgtttcaataaaaaaatcaataattaaagacgaaccaggaaaatctcaaactcaatgaaaacagatgacaatctataaatgccaacaccagaatgacagagaggtcagaactatctgaccaagattttaaagcagccacggtaacaacatttaatgagtaattatgaacacgcttgaatatgaaccaaaaaacaaagtctcagccaagaaatagaagatagaaagaataaaatggaaattttagaactaaaaatatgataactgggccaggtacagtggctcacgcctgtaatcccaacactttgggaggccaaggtgggcagattgctggagctcaggagtttgagaccagcccgagcaacacagcgaaaaccggtctctacaaaaaatacaaaaataagctgagtatgctggcatatacctatagtcccacctacttggagggctgaggcaggaggatcacttgagccaaggaggtcgaggctgcagtgagccttgatcatgccactgaactccagcctgggtgacaaagtgagtcactgtctcaaaaaaaaaaaaaaaaacaaaacaggcctgaggccgccgctagccggagcatcaccatgaagttcaatcccttcgtgaacytggaccgcagcaaaaaccgcaaacgtcacttccatgcccccttgcacgtgcacmggaagatcatgtcatccccgctctccaaggagctgcggcagaagtacaatgtccgctccacacccatccgcaaggacgacgaggtccaggtagttcaaggacactacaaaggtcagcaaattggcaaggtartccaggtgtacagaaagaaagatgtcatctacaytgagcaggtgcagcgtgagtaggccaacagcacaaccgtccacgtgggtactcacccaaacaaggtggttatcaccaggctaaatctcaacaaggatcggaaaaaaattattgaacacaaagccaagtctcgacaagtcagaaaagagaaaggcaaatataaggaggaacttattgagaaaatgcaggaataaatataacctgttgtgcaaccatggtttaactgagatttttaggctagtgtgtgtttctttggaacttttcagaatgtctctggaacatttcttttttttttttttttttttttttgagacagagtcttgctctgtagcccaggctggagtgcagtggcattatctcggctcactgcaacctccgcctcccaggttcaagcgattctcctgcctaagcctcccgagtagctgggattacaggtgcctgacaccatgcccagctaattttttgtatttttagtagaggcagggtttcactatgttggccaggctggtctcgaacgcctgacctcgtgatccacccgcctcggtgttccaaagtgatgggattacaggcatgagccactgggcccggccatgtttgtgttctttttttttttttgagatggagtctcgctctgtctcccaggctggagtacagtggcggcgatctcggctcaccgcaagctccgcctccccggttcacgccattctcctgcctcagcctcccaagtagctgggactacaggtacctgccaccatacccggctaatttgttgtatttttagtagagacagcgtttcaccgtgttagccaggatggtctccatctcctgacctcgtgatccgcctgcctcggcctcccaaagtgctaggattacaggcgtgagacaccgcgcccggccatctctggaacatttcatttcctgttttgttacctgaggctctgtaaatctacttttgcaaatttaattaataattttataaataaaaatgggaaatgtttcataattcaaaaaaaaaacaaaaaccccaaaaacccaaaaaacaaataccaggccaggcgctgtgtctcacacctgtaataccagcactttgggagggcaagatgggtgaatcacttgaggccaggagttcaagaccagcctggccaccacagtgaaaccctgtctctaataaaaatacaaaaaattaaccaggcatggtagtgcatgcctgtagtcccagctacttgggaagctgaggcatgagaaccatctgaacctaggaggcagaggttacagagagccaagatcgggccattgcactccagcctaggtgacagaggaagattctgtctcaaaaaagaaaaccttcagcatctggggctagacagagttcttagacttgagaccaaaagtataatctataaaaggaaaaaatgtatattccggacttcctcaaaaaaaaaaaccttttgcagccgggcacagtggctcacgcctgtaatcccagcactttgggagactgaggtgggcggatcacctgaggtcagaagtttgagaccagcctggccaacacagcaaaacctcatctctattaaaaatacaaaaattagccaggtatggtggctcatgcctgtagtcccagctacttgaaaggctgaggcaggagaatcgcttgaacctgggaggcagaggttgcagtaagtggagatcacaccactgcactccagcctgggtgacacagtgagagtctgtctcaaaaaataaataaataggccgggcgtggtggctcacacctgtaatcccagcactttgggaggccaaggcaggcagatcacaaggtcaggagatggagaccaacctgtctaagagacggtgaaaccccgtctctactaaaaaaatacaaaaaattagccgggcatggtggtgggcgcctgtggtcccagctacttgggaggctgaggcaggagaatggcgtgaacccgggaggcagagcttgcagtgagccgagattgtgccactgcactccagcctgggcgacagagcaagactctgtctcaaaaaaataaaataaataaataaataaaactatcttttgttctgcataagaccctatgaggaggataaaaagcaagcgatagagtgggagaaaatacctgcaaaccacatatccattaaagggctagtattagaatatacattttaaaaattctcaaaactcaacactacaaagcatataatccaaaatgggcaaaaacatgaagaagagatacagatgacaaataagcacatgaaaaactcattatgggccaggtgtggtggctcaagcctgtaatcccagcactttgggaggctgaggcaggtggatcacctgaggtcaagagttcgagactagcctggacaacatggtgaaaccccgtctctactaaaaaaaaaaaatatgtggcgcatgcctgtaatcccagctacttgggaggctgaggcaggagaatcacttgaacctgggaggcagaggttgcagtaagccgagttcacaccactgcactccagcctgggcaataacgtgtcaaaaacaaaaaaaaaaccccaccacattatggctggatgcagtggctcacatctgtaatcccaacactttgggaggcagacagaggtgggaggatcatttgaacccaagagttcaagaccagcctggacaacataaaaaaattgaaaatattaggcaggcatggtggtacatgcctgtatagttctagctactcaggaggctgaggcagaaagatcacttgagcccagaaggtcagggctgcagtgaggcgtggtctcaccagtgcactccagcctgggcaacagagcaagaccttgtctcaaacacacacacacacacacacacacacacacacacacacacacacacattttaactgggtaaatgcaaattaaaatctccaaacacctaccaaaatggctaaaattaaaaatagtatcagctgggcacggtggctcatgcctctaatcccagcactttgggaggccaaggcgggtggatcacgaggtcgggagctcaagaccagcctggccaacatggtgaaacctcgtcactactaaaaatataaaaaattagccaggcgtggtggcgcatgcctgtaatcctagctactcaggaggctgaggcaggagaattgcttgaacctgggaggcaaaggttgcagtgagctcagatcgcaccactgcactccagcctgggcgccagagccaaactccatctcagaaaaaaaaaaaagcccggcacagtggctcacgcctgtaatcccaacactttaggaggccgagacaggcagatcacaaggtcaggagattgagaccatcctggctaacatgatgaaaccccatctctagtaaaaatacaaagaattagctgggcgtggtggcaggcgcctgtagtcccagctactcgggaggctgaggcaggagaatggcatgagctggaaggcggagcttgcagtgagccaagattgcaccactgcactccagcctgggggacaaagcgagactccgtctcaaaataaaaaaaaattgtatcgccaccaaatgctgaggagatcactcatacacgtgaaatgttcctgcttagaaaaacagtttggcagattaaaaaaaaaaaatgaacatgcaactaccaatcaatccagaaattgtactactgggaatttatcccagggaaatgaagacttatgttacgcaaaaacctgtaacatgattgtttacagcagctttattcacaatatccaaaaactggaaacaatccagattttcagagggtgaatggttaaacacaatgcagtacatccatgctatggaaaaatacttggcaacaaaaaggaacaaactattaatacgtacaactatctgggggaagctctggagaatcaggctaagtaaaaaacaccaatcccaaaaggctattgcatttacttaacattctcgaacgaccaaattatcaaaatggagatcagagtctcagagtcatggctgtcagaggttaaggaggggtaaggcaggagagtggatacaactataaaagtgcaacatgaggaatcttgtggtaatagaatagggactgtatcaatgtcaacatcctgggtgtgacattgtactacagacttgcaagatgtcaccactggataaaggggacacaggctctctctagtatttcttacaactgcatgtgactctacaattacctcaaagtaaaatgtttaatttaataaaaatgttaaccagatatacatcttagccagttctaaatttatcaataacagggacagatattagataaaaatatgctagcattagacaaaggaggtaaaggaacactctattaaatctaatctttgggaaattttttaaagacaaaaatatcagttaagccaggcactatagccgcgcccataatcccagctacttggtggaaggttcaattaaaaaaaaaaaaaaaaagccgggcgcagtagttcacgcctataatcctggcactttgggaggccgaggcaggaggataacctgaggttgggagtgcgagaccagcctgaccaacacggagaaaccctgtctctactaaaaatacgaaattagcaggacgtggtcaggcatgcctgtaatcccagctacttaggaggctgaagcaggagaatcgcttgaatccgggaggcagaggctgctgtgagctgagatggcgccattgcactccagcctgggcaacaagaataaaactccgtctcaaaaaaaaaaaaaaaaaattagtcaggcgtggtggcgggtgcctgtagtcccagctactcggaaggctgaggcaggaaaatggtgtgaacccaggaggcgaagcttgcagtgagccaggatcgcgccactgcactccagcctgggtgacagagcaagactccatctcaaaaaaaaaaaaaaaaaaaagaaaaaaaaatctgttaagaactcccagtataaataaacattaaataacaaaataaaataaaaattagattctatataaaagcctagagatagttatcacaagactattaagtaccattgtttctaattcaaacttactaaaaaacccggattttttttttttttttttgagctggagtcttgcattgtcacctaggctggagtgcagtggcgcgatctctgctcactgcaacctccgcctcccaggttcaaacgattctccgtgcctcagcctcccaagtagctggaattacaggcgcccaccaccacgcccggctaattttttttgtatttttagtagagacaggttttcaccatgttggccaggctggtcttgaactcttgacctcatgatccacccacctcagcctcccaaagtgctgggattacaagcgtaagccatcgcacctggctgaaaccctgattattagtagtttcctaggatatttgaaactagaagagagccctaaataataaacccaaaaccttatttcagatcagaaggaaatagcaaactataagttaataaactggtcgtatagtacatataaattaatcatgtgcaaatccagtcaatgtgactaaatttcccagagtacagtttctcccctcattctggctgtggacattaactgttagtattattatacaataattgtgcttacttgactattgtagagttcttctagaagagctaaggatttaatggactttgatctgcaaatttcttgctctgtaaattgctggatagctggatgaaccttctgaatctgacccaaacgcaaaaatcctattttaaacttggctaacttcaaaagaatattgtcaacagcagagtgtgtatagctggtcaacaaaacgctaaaaccacaggcgtagagaattcttacctaataatgggtaagagaaaaaagaaaaaacagccttacttttaattccagataatttttaacatgtttataaacttaacaagaaccatatctaagagctgagccaagtaaaaattatgaagccaaaacattttacaaaaattacatgacattattatacgttattaataatatgtcaataatacatcataggccaggcatggtggctcacacttgtaatcccagcactttgggaggctgaggcaagtggatcacttgaacccagaaattcaagacttgcctgggcaacaaagtgagatgccatctctttttaaaaaat
